United States Patent Application Publication US 2020/0377945 A1 - sequence listing, part 14

SEQ ID NO: 2963 - DNA, 33186 bp, Unknown
  gut microbiota DNA sequence
aaggatattaaactagaagttccaggttttgcgaatctttgttcaaatgttatgatatcagtagatgtatagataacagtattagaaccacaaattataaatttgtctttagcataaattatggaataaaaactgtcgtatgaaattcttgttaaagaagaccaactaattccattttctgatgttgttgcatatccgtcccctatggcaacaaattttccatttccaaatgctacagacattaattgcgtccctgtatcttctcctattttaattgcagaagtccaagtcacgccgtcagtggaagtcgttacataaccatattctcttccaccatattcatgataccccacagcaacgaattttccatttccaaatgttatggaacataagtctccatataatgagggtattgaaactggggttgcccattctataccattcgtagaataggtaacaaatgctttttgcccactatatccactcccccccacagcaacaaactttccgtttgcataggtaatggcatgccaaactttcgaacctacctgttttggggtactccaatcaacaccattagtggacatagttacatatcccttttctcccacagctacatattttccattgccatacgtaatggcattccagttattacttcctactatcatgtttgaatctcctatttttacattaataatatcatctgttgccggtggtgtagtaggcttttcaggtttctcgggctcatctggcttttcgggtttaacaggttcctccggttgttctacgggtggtttaataggttcataatcatcattatccttttcacacgcaataaacaaaaaggcgcatagcaccaccatacaaaatacttttatttgcatcatttttctttgagttatcccgcaaccactgggatgagatatcttcaagaaagcgagttgctcctttcaaaggcactttcttgtttttctatttacacttgtgttctaataatgttaccagcttcgccaaccactataatagaaataagattttttatatcttcttccattacgagttgattactcgaataatttccagctacagctaactttacagcttctatctcactccttgtcggacatcgagttagttccgaactaaatgcacccgatttgagcgtgttacaaaatgctcttgttgcaattttacccataggtttctcctttctttaatgattaatatttaatatatgtattacggtctttttgagaagagtttttttaggggttttgccttttggataatcaaatgagtagatacaagaaaagggcacaaacatactcttcctcattgattggtaaggctctggtaagcccgaagttcaaataagaaaaagcagtctgcgccctcgattgagggtacaaactatgcttagactcattattttgaacttcatttaaaatttaccagattttaccaagtcaaataattgtctgcaagttatgcaatatgtctatttagaaataatatctgttcttatacctccttttttagttagtgtacaaagtaaacaaaaaaggaggaaacagacaaatatgctttagacaaatcacagactgcttatataattgtttcttaatttgattcccatgcccattcaggtttcatcagcaattctccgtagtataaacgctctgtaaacccgcctaagaaatcattgaaacgctcgccatctgtttgtttacgtgtgttgtatcggaatacaaactccttgcaatacttagaaagatgtttcttgcttgcaaggtgatagatacctttgataccacgcttgatgtggctccaaaatccctctattgagtttgtatgaaatccgttcaaagcgtaaatatgttgcttgtgtggaatagtcttatgcttgtaatctttacctaatgcgttatatacatttagttcatctgtaatgattgtagaaccttcacgtacacgttccttgataatagggtataaagtagttttctgaacattaggcactacttgtgcataaacaagaccgtctgaaaccataccgaatataggtgttttttccttgaggctacgaccttatgttccgttaccatgatttctacttttaccacccatataggtttcgtccatttgagtcatatcatcaaaagttgcatcatcatcctttatgttatgacggatgcggtgcagcataaaccatgctgtcttttgggtaacatgaatatcacgcgccaattggcagctactaatgcctttcttgtgcgaaaggaacagaaaaatagcatagaaccacttctttaacggaagattagaatcttcaaacattgtaccaatccgaaccgtaaaccgttcccgacaatctttacacttgtataaacctttgaactctcctttttgagttagtttatagtggtgtttagatatagagccgcaatgcggacaaacaggctcaccatgccaccgcatatcttcaagatacagtctgcaatcctcttcggtatgcagagtatctatcatttggagtagtgagtggaatggtttcatgtgtacaattattgattaatagagaaattgtacacgcaatgggctggaaatttcagttttgaggaaaaatcttaagaattttcgcaaaaaatagtagcaattgattattaggctattagttgcattaaaacgtagatttttatttgttttatgagagtaaatacatattctatcaaatcaaaattgtatcgaaatgaaaactcttacagaaaccctgaatgaaacgttggaaaatacgttgcaaatagaaattgcaaaaatggcagataatcaatcagaagagaaacaagaagaaacaacaaataaagaaaatgattaagtttactcgaagattggttgaaactaaatgttgtagaatgatataattgtaatgacaataaatcttaatttttttcagagtaacacaacctatttcatcttgatgcgttacatttgcaccattataaaaaagccaccgtcatgatgtcaaaatgacagaagctttgatagacctcaaaattgtgctgctacacgatgaggatgaacattaacattttactccacggatgtcagacaaaggcatccgtttttacttggagtttaatcccccttcttatgaatatggggtttcaaagatggtgtatttcctggagtctgcttgttgtctctttgacgacggtcaggctttcctgtggaaatagcaattctttttggacctgttttgatacccataatagcattttccttagttaaacatgtgaatttcccttttcaacggaaggaactccgccatcttgatttcagaaagataggtgtaaactgccgttatatccaaaaaatgaattttaagcaaaacggaatgccgatgacactgatgaaaactttcaaaaacagtaccaattaatacaaataatctttaatgacgcaatatctgccaaatagacagagattgtggcacattttgtatttctctcagctaaatcaagagaataagtacggtgagcaaaagttaaccttggagtgaactcgttattattggtataaccaatcattatacacaatcgttggtacaataaagtatatagttgcgtaaacattttagagcaaataaaaagaggttgtctcaaaatgaagtgcaccccaaaagttagacaaaaaacttttggggtgcacttcaaaatgatttttgagacagcctcttttattgattatatcattcaggatttttgtctgcgaaacactactatgcttactgccaacaagattagtataattccaacagcgctattcacagtaaaaagctctttgaatacaaaaactccgattacaacagccgttaatggttccattgcacccaagatggaagtcagtgtaggtccggcatatttaatagcttgtactaaagttatattggaaatagccgtagccggtaatgccagcccaagaataatcagccaggtatatccatccgacacaagttgaagtccggaagtacaataggcgcctatgaggtaaaaaatagttcccaaccccataacataacaagtcaatgccgtagagtttatttgtacgacccgcgttgtccgcactccaacaatataccctgcgtatgaaaaaacagaaacacaggcagcaaccaaaccaaccattgtatttccacttttcgcctccaactctcccaatgaaagtaaagctgctcccagcaaagacatcaatactgcaagtatcaccaagagagacttcttctcccggaagaaaaacatcattgccaaagcaacagccaacggatacataaaatgtatggtagaagccactccgctagctatattctgataagcaataatcaaactaaatgaagtaacggctctcaacaaactcaacagaaaaacaactccccaatcttttccagccaatcgaaaattgcaaccggataaccaaccaaacacaatcaatacaatcgacgccactccccaacgataagaaagtacctcgaaagccgaaaaaccggctaatagcaaagtgatagaaaaaaacggagccagcccaaaagtggaggaggataccgccgcataaagtataccttttatacgattcatagattcaaccaattttcgctacacaaatgaaaaaaacgatgcccatttgtttcgttgctttataagaatgtaagttcgggatagatgatagcataacacagtattgttgaggtaattttggaaagactgaaacgagcaagcgaataactattctatctccttgattcgctctatctggcgattcagaacttcattagagattaatcctctttattaatcctaaaagcaaaatccttgcaacttttactgaatttcagttagttgcaaggatttcttgaggttcctggcggattcgaaccgccgtacacggttttgcagaccgctgactaagccactcatccaaggaaccatttttctcgtttgcggttgcaaaggtagtacaaattttgaaattaccaactatccacagcaatttttctttgtactttttttctttacaccacactctttacgcttcttctctagcatatcctttagttcacagccacttacacaactgtcacaaggatttttattttctcgcgtacgacgaaaaaaaagaaagattccatatataatacgagcaatacagagtactaccagtactcctactacccattcctgccaattaatcatacaaataatcctccaatctgataaacggcaaaggatacaagccaagccaataccgtagtataacaagctgcaaacaatgcccatttccaactaccggactcctgttttatagcagccaatgccgcaatacacgggaagtaaatcagtacaaaaagcatataacagaatgcgaccaacggagtgatcggaatcctttctgccaaacttaccgaatctgcatccggatcatcgacatacaacactcccaatgtacttaccaccagctcctttgcccccactcctgaaatcaagccaattccaagtttccagtcaaaccccataggttctatcaccggctctatcgcacgtcctaactgaccgatataagaattttcctgttgctcggcaactgtctcgtatgcatcatgattcggataatatcccagaaaccaaattataacagaagcgaccataataattccgcccatttttttcaaatactgcgctcccttttcccatgtatggcgaaagatcgatttcgcagtcggcatacgatacggcgggagttccataacgaacggagtatcgtcacccttcaccaagaacttgctaaacaaccgtgctaacagcacagccagaaaaataccaattgcatagatgcttaacaataccaagctcgcattgttcggaaagaaagctcctaccaacaacaagtaaataggtaagcgcgcactacatgacataagtggattaatcaacatcgtaatgagacgacttttccggttttcgatagtacgtgaagccataatagcaggtacattacatccgaatcccataatcaaaggtataaacgattttccgtgcaaccccattttatgcataatcttatccataataaacgccgcacgagccatataaccggaatcctccattaatgaaatacagaaatacaaaatcagaatatttggtaaaaagacaataacgcctcctacaccacccacaatgccgtcaaccaacatatctttcaacgggccatccgtcatattgttacgaatcaaatcgcctatttgttccaccaaccattcaatccccatcatcggatattccccgagcacaaaagtaccttcaaacatcagatacatgaaaaggaagaaaataggatatccccaaatacggtgagtgacaatggaatccaacacttttgtagtctgcgcctgttccaaatgattatcagtaaaagtttctttcagcgcaccactgataaaaccatatttcgcatccgtaatagccgactcgcaatcttcattcatcgtatcctgtacgcgtttggccattttatcacgaatacgcaggatttcctccgcattcggcaaagtacgtacaaaactctctatgtccggatcattctccaacaattttattgatagaaaacgggtagagtacttatggcgaatgaactcattcttggaaacttcttcttttacagcctcaatagctttctccaaatcaggtccatgattgatatgaatatggcggaacacacgctcggtccttttatgttcgcgtacataatcttccagatgttcctcttcatgattcttacggtcctccaaagaatcatgccattcggtcagatccttcaatacttccggattcatattcccctgtttatcaaagaaatcgacgccttcataaaggttgattacgacatgaaacaaggtatccaatccacggttcttcttactgacagtaggtaacatcggtactccaaacagtttgctcagcaaatgatagtctaatgtattcccactggattccaattcgtcataaatattcaaagccaccaccatacggacattcatgtcaatcaattgcgtcgtaagatataaattccgttcgaggttggaggagtctactacattaataatcacatccggcgtttcatctataatatgacgacggacataaatttcttcgggcgtgtatgcagataacgaatatgtccccggcaaatctacaatacgaaaatgatacccttcaaaatcaaaatgcccttctttggcatccacagtcacaccactataatttccgacatgctcatgggcaccggaagccagattgaaaagagaagtcttgcccgagttcggattcccgaccaaggcaacattaatggtacggcgtttacctaacgccaaccgcttcatatcttcttcttttacagaaacatcttcaggcaaaccttcgtgataaatagtttcgccggcttgtttttttgcttcttcttcactgactacctcaatcatctcagcttcctgacgacgcaaagaaatttcataacctaagactttatatttaatgggatctttcaatggagcattcaataaaacttcaacggttttacctttaataaaacccatctccacgatacgtttacgaaaaccaccgtgtcccagcacctttacgatgacacctttttcgcctgttgttaattcggacaaacgcataactctctaaattttcggcaaagataattcataacttcggagcacgcaaattatttagattgtttttaaataagagtcatttctaatcgaaaaacctcctcactaaaaaagatctggtaatcagaaaaagaggaaacagaaggagaagttcctgaaaaattcaaaagactaagcaagaaactattatctttgcaaacatgatacagcaacggattacacaatatatagaaaagaatcatctgttttcatcagacagcaaaattctggtagcattgagcggcggcgccgactctgtggcactgctacgtattctccacacagcaggttatcactgcgaagccgcacattgtaactttcatttacgcggcgaggaatcaaaccgcgatgaatcatttgtccgccaactctgcctgaaatacaacatccgattgcataccgctgatttcaacacaacccaatacgcagccgaaaagcatatttcgatagaaatggcagcgcgggaactccgttataactggtttgaagaaattaaaaataaataccgggccgatgtcattgccgttgctcatcaccaggacgacagtatagaaacaatgttgctcaatctaatccgtggcacaggaatcaccggattactcggaatccgtcctcgaaacggagctattgtacgtccactcctttgtgtcaaccgcaaagagatcattcaatatttacaaaacattgaacaggattatgtaactgatagtacaaatctggaagatgaatacacccgcaacaagatccggctcaacctccttccacttatggaggagattaatccatccgtcaagaatagtctggtggagacgagtaattatctgaatgatgtagctactatatacaataaatgtatagcaaaaacaaaagcaagaatagtcacaccagaaggaatccggatcagcagtttgttaaaagaaactgtacccgaaactattttattcgagactctgcatccactcggctttaactccacacaaatcaaagatattgcaaactcacttcatggacaatcgggaaaacagtttgccagcaaagaatggagagtgattaaagacagggaatttttgctactggaagaaatccggtctgaagaaaaagacatccccccttttcaattaattaaagaagagaaagaatacacgtcaaattttcagattccacgggaaaaaggaacagcatgttttgacgctgacaagttgaatgaagaaatctatcaccgtaaatggcaaatcggtgatacttttattcctttcggaatgaaaggcaagaaaaaaataagcgattacctgaccgaccgcaaattttctatcagtcagaaagagcgtcaatgggtgctctgttgcggagaacgcattgcatggctgataggcgaacgaatagataaccgcttccgtattgacgaaacaacgaaacgcgttgttatttacaaaatagtctgaggctgtttctgcttcttgaaacaatccgataataaagccgcaaaaggagtatcatacacttttgcattcctaggacagactttcacgcaagcacagcatttgatgcatttggtttcatctacatttagttcatcgccttttgtaatagcacccgccggacaatgaaccacacacaacccacaatgtgtacacagactctcatcttttacccacggagtacgaggaagcggtgtgccacttttacgtaacttgataaccttcctcaaaaaacgaaataaggggaagaaaggctgcctcgggcgtttgatagcacgaacatctatcggataaagagtatccgggccggtagccgtttttattttttctatgatctttttcccgaactccgtagccagagccaggtccgaatcattcggacgtccggcagcaatcggatgttcatccgtactatatgaatgctcaccgataaaagttgcgccggcaatcactttcaatccgtggggaagggcgaaagcgtccaattccattaaggctttttcataagcacgattgccataaaccacaaccaacgcagtaggtgtatccaagccacgaatattctgcaaacgttccattgccaaaggagctacacgacctccatatacgggaactacgataatagccaatgcagatgcaggaattacagcttccccggtagtctgcaaagtgacattaacaggaagaatattttttattcctgttccgtgaacaatcgcctcggcaacttgttttgatgtgtgtgtaggcgaaaaataaattaaatgagcttcatttactgtcatactattttcttttatgtagcaaagatacacttttacgttgaaaaaaaggtttgattgtttatgaaaccaaaaaaatttattatctttgccccgttgaaacattctacgattcaacatatacatccctaattcataataaaaacaaaacgtatgctcgcatatctgtgaccggagagtcatagtaatgctgtccataattcagcaaaaaagaaatattaataacttaccatactatatgtataacattatccaattaaacgacaaagatctgtcggaacttcaagttattgccaaagagttaggcataaaaaaaacagactcattaaaaaaggaagaccttgtttacaaaatactcgatgaacaagcaatcgccggagccacaaagaaagttgccgcagacaagcttaaagaagaacgcaaagaagaacaaaagaaaaagcgttcacgcgtagcgcctgccaagaaagataacaaagtagtttccgcaaccaaggaaggagaagctgagaaagccaaagaagctgctcctgccaagccacaacagccttctaaaaaagaggaaagtgcaaataaagaaaaagagactcctgctgttgaagttaaagcagaaaataccgcagctcctaaacgtaaagtaggccgtccgcgtaaaaatgccgatgcagcagagcaaaaagaagttgaaagcgtgaaaactgcaactccggcaactcctaaagtaacggaagataaagtagttactgagaaagctcctgaagtaatagaaaaagcagtcccggcacaagctcccgaaaagaaaacaaaagccaacaaacctgctgaagagaagaaagtagtagtgaaaccgcaaccgcaaaagaaagccgaacccgttatagacgaagaaagcaatatcttatccggtgccgacgacgatgattttattcctatcgaagatctgccttcagaaaagatagaacttcccaccgaactttttggaaaattcgaagccaccaaaactgaaccggcacaaactgctaccgaacaacaagcaccacagccacaacaacaggctcatcagcaacaacagcaacaacgtccacgcattgtccgtccgcgtgacaacaataatggcaataataatgctagcaataataacaataacgccaataataataacaataataacttccaacgtaacaataaccaaaatcagaaccagcagcgtgtaccgatgccgcgtcctgcccagccaaacaacgcgaacgaaaatcttccggtaccacaacagcagcaggaacgtaaagttattgagcgtgaaaagccttatgaattcgatgacatccttaatggagtaggcgtactggaaattatgcaggatggatacggattcctccgttcttccgattataattacctttcttctcctgacgatatctatgtatcacagtcgcaaatcaagttatttggcctgaaaaccggtgacgtggtagaaggagttatccgcccgcccaaagaaggagagaaatatttcccgttagtaaaggtatcgaagattaacggacgtgacgccgctttcgttcgcgaccgtgttcctttcgaacacctgacaccgcttttcccggatgaaaagttcaaactctgcaaaggcggttattcggattccatgtctgcccgcgtagtagatcttttcgctccaatcggtaaaggtcaacgtgctttaatcgtagcccagcctaaaaccggtaagacaattttaatgaaagacattgcaaatgccattgcagccaatcatccggaagtatacatgattatgttgcttatcgacgaacgtccggaagaagtaacagatatggcgcgcagcgtcaatgccgaagttatcgcttctacctttgatgaaccggcagaacgccacgtgaaaatcgcaggtatcgtattggaaaaagcaaaaagactggtagaatgcggccacgacgtagttatattccttgattctattactcgtctggcacgtgcatacaacacagtatctcctgcatcgggcaaagtactttccggtggtgtggatgcaaacgcacttcataagccgaaacgtttctttggtgctgcccgtaacatcgagaatggtggttcactgacaatcatcgcaactgcattgattgataccggttctaaaatggacgaagttatcttcgaagaattcaaaggtacaggtaacatggagttgcaactcgaccgcaacctgtccaacaaacgtatcttcccggcagtcaacattaccgcatccagtactcgtcgtgacgatctgttacttgataagacaactctcgaccgtatgtggattctccgtaaatatcttgccgacatgaatccgatcgaagcaatggacttcgtaaaagaccgtctggaaaaaaccagagacaacgatgaattcctgatgagcatgaacagctaattagcagtaaaccataaataatgaacggtgaacagaatgcgttataatcgcagtttgttcaccgtttatagttttatcacccgtcatttattccaattttgtacaaaaaactttcacttgcgtccaaaacaagtattccccccttttttgctttcccttttttcctacttttgcttcaaaatcaagtatcacttaattctaaccaagaatgaaaacaatttatcctttcatgggattggctctttgcggcatagcagcccaagcacaagaaaagcccaattttctgattatccaatgcgaccatcttacacaacgcgtcgttggcgcctacggtcatacacaaggttgcacccttcctatcgacgaagtagcttcaagaggagttatcttttccaatgcttatgtaggctgccccctcagccaaccgtcacgcgccgctttatggagtggcatgatgcctcatcaaactaacgtacgctccaactccagcgaaccgatcaatacacctataccggaaaacgttccgacattaggaagccttttttcggaaaacggttacgaagctgtacacttcggaaaaacgcacgatatgggttcattaagaggattcaaacataaagagccggtagcaaagccatttaccgacccggaatttccggtcaataatgatagttttctggacgtaggaacctgcgaggacgttgtttcctatttaagcaatccttcggaaaaacctttcatatgcattgccgattttcagaatccccataatatctgcggattcgtaggagaaaatgaaggagtacatactgaccgacctgtcagcggcacacttccggaactgcccgacaatttcgatgtggaagactggaacaacatacctaccccggtgcaatacatctgttgcagccaccggcgtatgacgcaagcctcccattggagtgaggaaaattaccgccattacatcgccgctttccagcactatacaaaaatggtatccaaacaagtagacagtgttttgaaagcattatactccacccccgcaggaaagaacacaatcgttgttatccttgccgaccatggtgacggaatgacttcacaccgtatggtgaccaagcacatcagtttctatgatgaaatgacaaacgtaccatttatctttgcaggtcccggtatcaagcatcagaaaaaaccggtagaccacttactcacgcagcctacactagacttattgccaaccctctgtgacctggccggcattcctgttcccgcagaaaaggcaggaatcagcctcgcaccgacattaaaaggagaaaaacaaaagaagactcatccatatgttgtatccgaatggcatagtgaatatgaatacacagttactcccggacgtatggtacgtggccccagatacaagtacacccattatttggaaggcaacggagaagaactctatgacatgaagaacgacccgggtgaacgtaagaacctcgccaagaatcccaaatatgccaaggttcttgcagaacaccgtgccatgctcgacgactacatcacccggtcaaaagataattaccgcagtctgaaagtagacgccgacccgagatgcagaaatcatactcccggctaccccaaccacgaaggccctagcgcacgtgatattatcaaaagaaaataaattagaaaaaaagagcgaagattcttgtcagtcttcgctctttttgtttcttttgcataaaaccttgcaaacaaacatccggtgaatagaaacttacaccacataattactacaattataacggtattcatatcggtaacattgtacgctgcacatactaatgcagaacgtctgtctttattacagccgctcattcagtatgaccttgcttttaacaccggcgtcaccacagacagtattatcttatgggagaagctgttaacacctgaacttgaaaagcagcaacgatacgacatcttattccagctcaaagcaatggcggttcagtcatcaataacagaaggaaatatcagcctggctattgacaacgccaattcaatgtataagaaagctaaagagatagactacccgctaggaacagctcttgcactacgtgcaatcggaaatacatatttaagctcatcaacaccacaagttgccataggttcttatgaagaagcaatagagattatgcaacagatacccgaagccgacatctatttaaaaaacgcattatctcaaatgatacttattaagctcaataaccggcaaatggcaggaattgagaaagatatcaactacctggaagctctttgcgacaaaaggcccgattcaccttgctatttttatcttccctgttgccgtgcgttttatgagatacagtcagacaaactcccttcggcattggaacatctgcaaaaaatggagcgaatctatgccaaacatccgtatccatattttcttctgttaatcaaatacttatatgcttcctaccatatcgccgcaaaagaatatacccaggcattgcaatcgtatgatgaattactgccatacgtcaaagaatccggttcgtacaaagacatacagatatcacaagaacgggcaaaagttctttcattaatgggacgtatcgaagaagcatgtgaggaatatgaagtgattaacgcacgcaaagactcacttgacgccaatagctatctgcgccagatcaatgaattgcatactctctatcagattgacaagaatgaattaaacaacataaacaggcaaaagaaaatcttatactggagctggtttattatcctgtctgtcctctccttaattatattcttcatcttccgcatcaaaaggaacaacaaacgtctgatccaatcgcaacaagaacaagaaaaagtaaagaaacaggcagaaaattcgattcgcactaaaagcctttttctctctaacatgagtcatgagattcgtactccgctcaacgccttatccggcttttccaccattctgacggaagaatccattgatgaagaaacgaggaaacagtgcaatgatattatccagcaaaattcggaactgttgctaaagttgattaatgacgtgattgacttatccagccttgaaattggaaagatgacattcaagttcaaaatatgcgatgcagtaggactatgcagaaacgtcattgatatggtggaaaagataaagcagacccatgcagacgtccgcttctccactcctctcgattccttggaactactgacagatagtgcccgcctgcaacaggtactgatcaacctgcttatcaatgcaactaaattcacctcacaaggctctatcactctgcaacttgagcaacaaacggaagatacggcacttttctctgtcaccgataccggcacaggaatccctaaagaaaaacagaaaaagatattcaaccgtttcgagaagctcaatgaaaatgcccaaggtacggggctcggactatcgatttgccaactcatcatcgaacaactgggaggtagtatctggatcgaccccgattacgaagaaggttcacgtttcttgtttacacatcctattgacaaaagcgaccaaggaaaggaggaaacaagatgaaacgattaatactactgcacatagtctgttgctgctttcttgtcggaaaagccgattatgaaatgaacacggacagtttgatacaggtgtttcaaaacctgcctcatgactcaacccgtcttgtagctttaaacaacattataagaatagaacagaacaatcctaaatgcatccagttctcggacactttaatgaaagaagcattgtttcagaaggatgataaatacgcaggactggcagcctattatcacctattgtactattataaccacaacaaaacagacagcgtagcgaaatggattacacaaatggaaccacacgtccacaaatccggtatatgggattatttcttcgacgccaaacgtttccagatcgacttgtacacttacaacgaagaatacgagcgtgccattagcgaggcaaacaagatgaagcaacaagctttcgaaaaaaacaatcatcggggactggtagccgctcatcagtgtctgagcaatgcctacatcggcagtcaacgttgggaggaaggcatcaaagcactggaagaagcctacaagctacttgctccggacgctaatccggtagttcgcatctcggtactgtcgcaattggtatctgtcaccaaagaaatgaagaataacagcaagctgtttaaatacctgcaagaactcgaaagcacactctataaacatatcaaggaaaatccttctcttaaagacggtttctctgacgtatttctgttcaacgaattgttctatgcttattattacctgaatacccaacagccgcaaagagcctatgaacatctggtgaaagctaaggaatatcagaacgagaacaactatttcatgtatcaggtactttatttcgacacctacgccagatattacaaatatatcggtgaatatcaaaaagcctcagattatatcgacaccacattagtcatgctgaaagacaactatgccagcgactatgccgaacagttattggtgaaagctaaaatatgggtaaaggccggcgatagcgaaaaggccgttccactatatcagaaggcacttgccattaaagattccgcctccatgtcgcttgcaaacaatcaaatggaacaaataaagagcagttatcaactggataaaatcaatatggaacaacaacggcacaacaaccggattcgcctcatctttctggctgtgattatcgttgttttatttgtattattcattttcatgttccgtctggctatggtacgaaaggcattgaaacgttcggaaaacgaaatccgcaaagccgccgcaaccgttcgggaaacgaatgaaataaagaaccgctttctttcgaacatgagttataacatccgcactccgctcaataacgtagtaggattctcgcaactcatagcgtgcgaaccgaatattgatgaaggaacaaggaaggaatattcgaacataatccaccaaagctctgaaaagttaatgagacttgtcaacgatgtgctcgacttatcacgcctggaagctcaaatgatgaaattccagatacaagtttacgatgctgtcgaactatgcaacgaagcatgttatatggcacgtatgaagaatgaaacgacaggcatccaagtccgattctacacagaaacgaagtcacagcccgtccgcacagataccgcccgcctgacacagatgatacttagcacactggtttacccgtatgaataccagcaagaccaaaaacaggaacgcgtcatccgtttcatactcagccggaaagatgaaatgcttcatttccaaatcattaattcgccgttggcggatactacctttgtctcacaggaaactgtcatccggcacgaaatcaatcaattattgctgacacatttcggaggaacctatcaaatcaatacccaaaccccggagggtccggaaattgttttcacctacccgatcgcttccgattcggaataaagcgctatctttgcaaaatgtaaacttaaacgcttaatatgtataccaacaaacagatttggagtgtcagttacccgatactactcagcttgctggcacaaaatgtcatcaatgtcaccgatacggcgttcctgggtcacgtaagtgaagttgccttgggagcttctgctatgggcggactattctatatatgtgtattcaccatcgcattcggattcagtaccggttcgcaaatcgtcattgcgagacgtaacggtgagggacgctacacagatgtaggtccggtgatgattcagggagttatgttcctatttgtaatggcattactactcttcggtttcaccaaggctttcggcggcaacatcatgcggttgctggtttcctcggaatcaatctacaaagggacaatggagtttctggactggcgtatctacggattcttcttctcattcgtcaatgttatgttccgggcactgtatatcggaatcacacgtactaaagtgctgaccattaacgcagtcgtcatggcattgactaatgtcgtgctggactacgcactgatcttcgggaaattcggtctgcccgaaatgggtatcaagggagccgccattgcttccgtactggccgaagcctcctctatcctattcttcctcatctacacatatgtcactatcgacttaaagaaatacggactgaaccgtctgcgttcgttcgaccctgcactgttgatgcggattctcagcatttcctgcttcaccatgctccaatacttcctgtcaatggctacatggttcgtattctttgttgccgtagaacggctgggacaacgggaactggcgattgccaacatagtccggagtatctacgtcgtattgctgattccggtcaattcactggcaaccaccacaaacagtcttgtcagtaatgctatcggtgcgggaggtatcaagcacgtaatgccgcttattaataaaattgcgagattctcgttctttattatgctggggctggtagcagtcacagcactattcccgcaactactgttgtccgtctataccagtgaggcagcactgattgcagaatccgtcccttcagtctatgtgatttgtatcgccatgctcatcgcatcggtagccaatgttgtgttcaacggtatctcgggcacaggaaacacacaagccgccttactgctcgaaacaattacaattatcatttacggctcgtatatcattttcatcgggatgtggctcaaagcaccgattgaaatctgctttaccattgagattgtgtactataccttgttattgataacgagttatatttatctcaaaaaagcaaaatggcagaataaaaagatataaatacaagagatttttgtacatttgcaggctcaaaatattaattcgtaattaaataactatgttcgataatttaagtgaaagactagaacggtcattcaagattctgaaaggtgaaggcaaaatcaccgaaattaacgtggcggaaacgctgaaagatgtacgcaaggcacttcttgatgccgatgtaaactacaaggtagcaaagaatttcacagataccgtgaaagaaaaagctcttggacagaacgtacttacagcagtgaaaccaagccagttgatggtgaaaatcgtgcacgacgaactgacccagttaatgggtggcgagactgtcgaagttgatattgatgcccgcccggcagtaatcctgatgtcaggtttgcaaggttccggtaagactaccttctccggtaagctggcccggatgctgaaaaccaagaagaaccgcaagccattactggtagcttgtgacgtttaccgtccggcagctatcgaacagttgcgtgtgttggcagagcaaattgacgtaccgatgtactgcgaactggaaagcaagaacccggtagaaatcgcgcaacacgctatccaggaagctaaagccaaaggatacgacctcgtaatcgtcgatacagccggacgtctggcagtagacgaacagatgatgaacgagattgccgctatcaaggaagcaatcaatccgaacgaaattctgtttgtggttgattccatgaccggacaggacgctgtgaatacggccaaagaatttaatgaacgtctggacttcaacggtgtggtactgaccaagctcgacggtgatacccgtggtggtgcggcgctttctatccgttcggtagtcaacaagccgattaagtttgtaggtacaggcgaaaagttggacgcgatcgaccagttccaccctgcccgtatggcagaccgtatcctcggtatgggtgatatcgtttcgttggtagaacgtgcgcaggaacaatacgacgaagaagaagctaaacgtttacagaagaagattgccaagaatcaattcgacttcaacgacttcctcagccagattgcacaaatcaagaaaatgggtaatttgaaagaccttgcttccatgattccgggagtaggaaaagcaatcaaagacattgatatcgatgacaatgctttcaagagtatcgaagctatcatctactccatgactccggcagagcgttccaacccggaaatcctgaacggttcacgccgcacacgtatcgcgaaaggtagcggtacaacgattcaggaagtaaaccgcctgttgaaacaattcgaccagactcgtaaaatgatgaaaatggtaaccagcagcaaaatgggtaagatgatgcctaagatgaagaaataaaagatttcgtttcaaattctaataaagaaaggaagccggaagcttcctttctttatttttttaaacccctcttctcctttcctacatctactttatgtgattttctccttataatcacatcagctctgtcattcaattgtaatgattacaattttacatagattttatatgtatattcatttttatttgtttactttgcaaaaaataacagaacaaaagcacgaatatgcactacgtctacgtaatggtatatatttcactggcagttgcgatgcaactacttacgggaaattttccggtttcctttttcgcctttccgctcaatcttgtttttgcggcgctatggcttttcttgttatggatgttgtataaggaatataaaattgcaaaatttacccgattcctctattcttcccaagcaagtatcctatctatcggattactcatctgcggttgcctgataataggtcttttccctcaactatccgatgcggaagcaaaaatgcgtgaagggcttccagcctttttaggttgctataactttatgacttcctggatattcatcgccatacttctgttcttattaagtaacctggcaatgattaccattcacgcctatcattaccgcaaacaggcacgttggagattcatcctgaatcacgcggggctatggctggctctatttgccggttttctaggaagcagtgacacacagactttacgtatacctatatataaaggtgagccatcacgcgaagcattcgacatgaacggtgcatcgcattatttggattatgaaatcgaactcaactcttttgccgtagaatactacccgaacgggcgtccttcccgctttgccgccaatgtacgtctgggaaatgaaaaagcattgcttgaggtcaatcacccatacgcctatcggttgggagaagatatttacctcaccggctatgacgtaacgaaaggcaacgagagtgagtactgcatcttgcaggtagtaaagcaaccctggaaatatataatagtagcaggtatcctgatgatgcttgcgggagctattcttctattcattaacggacctaaaacagatgataaactgggataatttctatgtatttgcagcagtatctatctgcttatggctgataggagcagtatttgcccttcgctcgtcaacgagaagtaagacagcaatcggttttacgtcaggcggaattatcgttctggccgtattcattactggattatggctcttcctgcaacgtcctccgttacgcactatgggggaaacccgtttgtggtactctttcttcatgggcatagccggactactgacttatatcagatggcagtatcgttggattctttctttctcggcactgctcgccacagtctttgtcattatcaatctgatgaaacccgagatacacgaccagtcactaatgccggctctgcaaagcatatggttcattccccatgtcaccgtatatatgttctcttactctgtattgggctgtgcttttataatcgcattgactgggttgttccgccataaggaagaatacttgcacacagccgacaatttggtttatgcgggaatagcattcctctccattggtatgctgctaggttccctttgggcaaaagaagcatggggaaactattggagctgggatccgaaagagacttgggcagtcatcacttgggcagggtatttactttacgtacacctccgtctttttcggaaaacgggacggaaaacgctttatgtgttgctcatcatgtccttcctggctttgcagatgtgctggtacggagtaaattatttaccggcggctcaacaaagcgtacacttatataatcgtaataactaatctaaaaaaacaaatgtaaaatgaagaaaagtacaaaactaattgtggcactgttggtagtggtagcggcattagcagtcacttatcgacttatgcaccgcgtaccttctgccgatctggaagcaaatgcgcagatgcagcagattattacggatgcaggatgtttgagatgtcatacctcaacaccggacctaccgttctatgcaagcatgcctgtggccggaaaaattgtaatggaagacgtcagcaaggcataccgtgccttcgacatgacccaaatggaggcagatctggaagcaggacagcccctcaatccggcagacctggccaaaatagaaaaagtgatcctcgacggaaaaatgccccaggcaaaatattaccttgtgcattggggggcttccttcaatgacgcaaaaaaggaagtcgcactgaactgggtaaaaagtcaccgtatgggaatgtatacggacattacagtagcaccggaatttgccaacgaacccattcgtcccattgccgattctatcgcagtggatgtacgcaaagtcgttctgggtaatttgttgtatcatgacacacgtttatctgctgacaataccgtatcatgtgccagttgccacgggttggatacaggcggcgtggacaacaaacaatattccgaaggtgtaggcggacagtttggtggcgtcaatgccccgacagtatacaacgccgcatacaatttcgttcaattctgggatggccgtgccggaactcttgccgaacaagctgccggtcctccgttgaatccggtggaaatggcttgcgaatcattcgaccagattatcgataaactggctgaagacaaagatttcgtatccgcattcaacgaagtgtatgccgacggattgagtgagaagaatatcacagacgccattcaggagtttgaaaagactttgctgactcccaactcacgcttcgaccgctatctgaaaggacaaaaagatgcaatcaccgaaaacgaaatcgccggatacgaacttttcaagaagtatgattgcgcaacctgccatgtaggagaaatcctgggagggaaatcttatgaactgataggtgtacagcacgattactttgccgatcgacaggcagaaatgactgaagaagacaacggccgcttcaaacagactcaaatagaacgtgaccgccaccgcttcaaagtgcccggtctgaggaatatcgaactgaccgctccatatttccacgacggcagcatggctactatggatgacgcagtccgtgcaatggctaaataccagttgggcatcgatttgccacaacaggaagtagataagattgtagccttcctccgcacactgaccggagagtacaaaggacagctattaacgaataagaatatggaaatctaatcaggaaaaaagtcctttttagcctgtttccgaacagaggctctatttgcatcaaacggaggctctatttggggtaaacagaggctctgtttcacctaaatagagcctctgttttttttgtatcccgacaaaaacaacaatccttttggagagttcagttatttattttacttttgcctatcaccaataaatactctgaaaatatgactctgatagacggaaaagccatttccgaacaagtaaaacaagagattgcagccgaagtagccgaaattgtggctcagggcggtaaacgtccccacctggcagctatccttgtgggacacgacggtggcagcgaaacttatgtagccgccaaagtaaaagcctgcgaagtttgtgggttcaaatcttccctcatccgctacgaaagcgacgtgaccgaagaagaactgctcgccaaagtacgtgaactgaatgaagacagtgacgtagacggattcatcgtccaactcccgttaccgaaacatatctccgaacagaaagttatcgaaacgattgattaccgtaaggacgtagacggattccaccctattaatgtaggacgtatgtctatcggacttccgtgttatgtatctgccactcccaacggtatcctcgaactactgaagcgttacaaaattgagacttcgggcaagaaatgtgtcgtactcggccgaagcaatatcgtcggcaagcctatggctgccctgatgatgcagaaggcttatccgggagacgcaaccgtcaccgtatgtcacagccgcagcaaagacctgataaaagaatgtcaggaagccgacattatcattgccgctttgggacagcccaactttgtgaaggctgaaatggtaaaagaaggtgcagtcgtaattgatgtaggtactacccgtgtgccagatgcaactaagaaatccggattcaagctgaccggtgacgtgaagttcgacgaagtagcgccaaaatgctcttacatcacccccgtaccgggtggcgttggtccgatgacgatagtatcgttaatgaaaaatacacttttagccggtaagaaagccatttatcaatgagacatgcactgtttctgatgattttatttctctccctgtcctgcacctcccgatcgcaggcaaggagagattctattaataccttatctgatactctgtcgacacccgacagcatcatgtctgccgacaccttgcggcttcttttcgtaggcgatctcatgcaacatcaaggacagatcaatgctgcgcgtaccgcaacagggacttatgattactccgcttgctttgaatacgtgaaagaagaaattgggagtgtagatcttgccatagccaatctggaagttactttgggtggaaagccctataaaggttatcctgctttcagcgcacccgacgaattcctcaccgccattcacgacgccggtttcaacgtactggtgacagccaacaaccacagtctcgaccgcggaagatcaggattggaacgtactattcttctgatcgactcgctgaatatccctcatgccggtacgtacaccaatgccgaagaacgcgaaaagaaatatccgctcctgttagaaaagaacggattccgtatcgccctgctcaactatacgtatggaaccaacggaatcgccgttactcctcccaatatcgtgaactatattgatacggctattatcgccaaagacatcgaagtgagcaagacactgcatccggatgccattatcgcctgtatgcattggggaatcgaatatcaatcccttcctgataaagagcaaaagttccttgccggctggcttcttcaaaaaggagtagaccatgtcattggttcacatccgcacgttgtccaaccaattgaagtccgtacggatagcctgacaaatgacaaacatcttgtcgtatattctttgggaaattatatttccaatatgtccgcccgccgtaccgacggcggactcatggtaaaaatggaactggtaaaggatagtaccgtccgcctcaacaactgcgagtatagcttagtatggacagcacgaccggttcaatctgagaaaaaaaatcaccaattacttccggtaaacttaccgatagagttagttcctttaaaagcccgtaactcgttgaaaatcttcacgaatgatgcgcgatcccttttcagcaagcacaatcggggaataaaagaatacactttttataaaaaaaagtaatagaattctttggagatttaaagataatatctatctttgcaccgcgttagagaaacgcagacatggtggatgtagttcagttggttagagcgtcagattgtggttctgaatgtcgccggttcgagtccggtcttccaccccaacaataagagtaattgatgaaagcttcgagtagtaatattcggagcttttttcttatacaaaaacagtatattatggaaaataacaaaaaattaaccagagcttccgccggtaaccgaatggttgcaggggtatgtgccggaatcgccgattatttcggctgggatcccaccctattaagaatcgtctatgtattagcaacaatcttcaccgcttttgccggaatcatcatatatatcatcctatggatcgtaatgccggaaagaagaccgggagatggatatggggaccgtatgaacaaccgattacactaaaaataaacgtcggcagacttgagtgagaacactgcaagtctgccggcgtttgtcatttctattcttgtcttgcagaaaaaggaagcgggaatttcttacccgaaactaatacagttccaatccgaattcttctttcaactgcatcaatgcctgattcttttgagacatcatctggaacttctccacacgacctactgcacgaaccgtttctgtcggtgcactcacccgtaccgtcatcaccactttactattcttcaaccggccacggagataatcctgcaactcaggaatcaatgccgtaaagtcctttgcagcaatctcattatccactacaatttcaaaagtggtagagttattgagcaacaccggacgaagcacctgcatgcgttttgcgatagccacctgctctttcggcaactgacctgcatactcctgccaataataattcaaatcccgttcattgaagttagagtcttgttccggttgctgtactctgggaacatgagctacagttgcattctgcgcggcctgatcacgctgcggattcttgatagatacgcccaagctggacatcttcatcaccggaacctttcgttcctctttggcaaccgaaggaattcctgcgcccggcaaaggagcggatgaagtcgtattcgtagcagaaggcgatacaggccttgccgtcgtagccatctgcggctgcctgttgggagtgacattagcagtaaccgaagccggtgacgaatgaacaggagcctgctgtacagatgaagcggaagctacctgcgacggctgagcggcggcaggttgtgagaacacgggttttatagtctgtttagggctacgcccaccactcacatcatccccctcggtggtaagctgcgcaacctgtatcaaggtcagttctaccagcaaacgcttgttcttgctgatgcggtaattcaaatcacattcgttacagagcttcatcgccttatacaagaaaggcaacgggcatttctgcgcctgttcctgataacgttggcggatactcgctcccacctcaagcaaaggaagtgttaccggatctttgcctaccaacaaatcgcgaaagtgagaagacaatccggttataaagtgacttccgtcgaatcccttattcaacacatcattgaaaagcaacaacgcatcactcactttattggcaagaaagcaatccgtcaaacggaaataatattcgtaatcaagtacattcaggttgtcaatcacgcttttatacgtgatatttcctccggtaaaactcaccacttggtcgaagatagacaatgcgtcgcgcatacctccatctgctttcatggcaatcacgttcagtgcttccggctctgctgagattccttctttcgaagcaacatacgaaagatgattcaccgtatcttccacactgatacgattgaaatcataaatctgacaacgggaaagaatggtcggaagaattttatgcttctccgtcgtggccaagatgaaaatagcatgacggggaggttcttccagcgttttcagaaacgcattgaatgcagaagccgaaagcatgtgtacctcgtcgatgatataaaccttatacttgccaatctgtggcgggatacgcacctgctccaccagctgacgaatatcgtccaccgagttgttggaggctgcatcaagctcatggatattatacgaccgctgctcgttgaaggcaacacaagattcacactggttgcaagcttcaccgtcggcagtaggtgtcatgcagttgattgttttggcgaagatacgtgcacaagtagtctttcctaccccacgcggtccgcaaaataaatacgcatgagcaagtttctgagtagcaattgcattttttagcgtagtggtcagcgcccgctgtcctaccaccgattcgaacgtggagggacggtatttacgggccgatacaatatagttttccatatccgggattttctctatttttgctttgcttgcaaatgtacacaaaaaagtgataagtaataagggatagagagagaagttttgaagcagaagcgataagtttttaagttattagttttatctttgcagagattaaaaagattaattatgggtaaactaatcagtatctgggaatttatatgccgacgcaagtatcttatcactatcgtcgcatttgctgtcattatcgtttttttggatgaaaacagcctgcttcgccgtcttggatacgaacgggagatcagccagttgaaagaagaaatagaaaagtaccgggcggattacgaagagaataccaagcgccttaatgaaataagtaccaatccggatgctatcgaacagatcgcccgcgaaaagtatctgatgaagaaacccaatgaagatatttacgtttttgaagattaaagaatgaagcaactagtacccgccctctttggcgtaggcgctgtaatggccctcacaggagcagccgtattcattacaggctggatttatgcaccctacatatatactattggagccggattcattgcactggcacaagtaaacaccccggtaaaagggaaaagcaagacactgaaacgtctccgtgttcagcagatattcggagcactcgctcttatactgactggtgctttcatgtttaccacacgaggcaatgaatggattgcctgcctcactattgctgccatactcgaactctacaccgccttccgtattccacaggaagaagaaaaggaaagggcataaaaaaacctgtccaaaacttcacagcctagaacaggaacattataatttacatatttctaatataaacaatgaaatctcttttataagagaaaagctaaaaaaagttacttattagcagcaggtgaatatcttgcattcaacccgtctacgatttcttttgtgatattgaacgcgctatcagcataaagcagattatcaaaacctgtattactgaaaatcaagctatatccatgtgtcttattatattctttcaagaaagcattgatagaatcacggaacagcaaactgttcttattgttttcttccattaaaccgttttgaagtttgttactcaactcttgcaagtcttgttccatcttagccaaacgattgtattcttgttgagctctatcctgtgacaggaaagcaccgttttcatacttcttctggaagtcttgtttttccttattcaaagcagtagctttctgattcagtgtcatacgaacattttcgctcttcttcaccattgcctcattcaagtcaatacagaagttatatttagctaatagcgaatctatttcaacataggcgattttcattcctgacagttcggcattcacctgagccggagttgttgaagtttgattgtcagttttgccggcacattgtgaaaataaaacaataaacgcaagagcagccaaaccgttcatgaggtagttcattctattcataatttaataagtgtattgtttttaataatttaattcatactatcgttcaaggctttttccaactcatcaatagaaaaacgtggcttcttctgtgcttcgcgatcttgagactgtgcacacccaatccctttcttacgcagcgctttattcccactcacatgaccgttcgggaacttccctcccttcgtaaagaatactttcacccctaataataccagggaaatagcaactattaacaaagttatcagtatagtctcaaccatttctattaattttgtgagtgcaaagataggctttaatgagatatgagttcagataagccaatcaaattaaccatatttagcaatagaagaagccaaaaccactcttctattcctattataaaatagaaacagcatggaaaaaaaagatttgaagccggccggcgtattcaagtatttcgaagaaatctgccaggtgccccgcccttcgaagaaggaagaaaaaatgattgcctacctgaaggcattcggagcaaaacataacctggaaaccaaagtggacgaagccggtaacgtacttatcaagaaacccgctactccgggaaaagaaaacctgcaaactgtcgtactgcaatcgcatatcgacatggtgtgtgaaaagaacaacgacgttcaacacgacttcctcaccgaccccattgaaacagaaattgacggtgaatggttgaaagcgaaaggtaccacccttggagccgacaacggtatcggcgtagccaccgaactggctattctggccgacgatagcattgagcacggtccgctggaatgcctgtttaccgtagacgaggaaaccggactcactggagctttcgccctgaaagaaggtttcatgagtggtgacatcctgcttaatctcgactcggaagatgaaggagagatctttatcggatgcgccggaggtatcgattccgttgcagagtttacttataaagaggttgaagttcccgccggatatttcttcttcaaagtagaagtgaaaggattgaaaggagggcactccggtggtgacatccacctcggacgaggcaatgccaacaaaatactgaaccgcttcctcacccgcatggctaccagacatgacctgtacctctgcgaaatcaacggtggtaacctgcgcaacgccattcctcgcgaagcatacgcaatctgcgcggttcccgaagacgccaaacatgacgtccgcaccgaactgaatatcttcaccagcgaagtagaaaacgagttatccgttaccgaaccggacttgcgactagtccttgaatcggaaactccccgtaaaacagctatcgatcaggataccaccgcccgtctgctgaaagctctgtatgcagcccctcacggtgtttatgccatgagtcaggacatccccggactggtagaaacgtctactaatctggcttctgtcaagatgaaaccgaacaatgtcatccgtatcgaaaccagccaacgcagttctatcctgtccgcacgcgacgacatggcaaatactgtccgctccgctttccaactggcaggagccaatgttaccttcggtgaaggttatccgggctggaaaccgaacccacattcagctatcctagaagtggctgccgaatcatacaaacgtctattcggcgtagatgccaaaataaaggcgattcatgccggactggaatgcggtctgttcctcgacaagtatccgacgctcgatatgatttctttcggcccgaccttgacaggagttcactctcctgacgaacggatgcttatccctaccgtagagaaattctggaaacatctgttggatattctggcacatgtacctgccaaaaagtaacggacagataagccactataaaaaaggagattgtggtcgtagcagaaaaagagcagctatggccataatcttttttgttatgggcttctgcaccctctcctttgcacaacaaatccgtttcagagttgtaagttggaatgtagaaaacctattcgacatacatcatgattcgttgaaaaacgaccgtgagtttcttcccgatgccctccgtcattggaattacaccagatacaagaaaaagctgactgatatggcgcgtgtcattactgccgtcggcgaatgggaacctccggcattagtcgggttatgtgaggtagaaaatgatacggtacttcgcgacctcacccgccgttctcctttaaaggaattgaattaccgctatgtcatgaccgactctcccgatttaagaggcattgacgtagcattgctctatcaacgggatttattcaagctcttgtctttccgctctgtctctattccgcccctgaaacagtttcgccccacgagagatttgttgcacgtcagtggtttgctactgaccggagacacactggacgtatttgtctgccacttgccaagtcgttccggcggagcaaaagaatccgaaccgtaccgccttcatgcagcccgaatactgtacacagaggctgacagtattctcaacatacggcttcatccacaaattatcattatgggagatttcaatgactatccgaccaataaatctattcagaaaatactggaagcagaatctcctccgccaactgctccttctcctttaaagctttaccatttacttgcccgaaaagcccaatccaaaaatttcggttcatacaaatatcggggagaatggggattactcgatcacctaattgtatccggttctctacttaactcagcaaacagtttttccacaagcgaaaacaaagcaaccgtttccaacctcccttttctattgaccgaagataagaaatatggcgataaggaacctttccgcacctataaaggaatgaaatatcaggggggtattagcgatcatctgccaatctatgtcgattttaatctgatactttattaattaagaccataaactgtcttaccctggatttggttgactactct

SEQ ID NO: 2964 - DNA, 574 bp, Unknown
  gut microbiota DNA sequence
aaacttctcatcggtcatcgcacagagcttcgtaagggcgctgtcggtcaactctctcagctctgtttcctccggcgaaagctcgccgcgcatctcacgcagactgtcaatcagcccggtgcggctgccggtattgtaaatgcacatcaggttaatttcctcaaaagtaaagtttcccatatcaaatctccctttccgcactctttttgggtgctgtctttttgtgttctgtcttgggctggcctttcagctgctccatgacggactttttcttttcccgttcctcccgatgggtggcggctgccaactccatcagggaaatgggctgaccgcttcgggcctgctgttccagctctgccaccgtgggttcttttgcgccattgttgatgataccgtcaatcatgccgtaatcgtcctccagcatcatttccgcatttttcagcgggttttctggcaggaatccggggatctgggtaaaaccaacactgtcacagtaatgacaggataccttaccgtcctgtctgatcgcaacgatgtcgctgacgctcatggagggactgtgaaagtccacggg

SEQ ID NO: 2965 - DNA, 71978 bp, Unknown
  gut microbiota DNA sequence
atcttgcacctcgaattctttgaacacattctgtatttcggtgtattgccgcaatagttctgcgttgatttcggatgcactttgctttagtttgttggtacaaccgtttctaacccgttgcttgtctgtgtcccatttttctacatcaattctatatcccgttgtaaattcgatacgctgactggcaaagataacacgcatacggattggcacattctttgtaactggaataccgtcttttttgcggctttccggtgcaaaaatgatatttcttttaatattcataattgggtgtgtttgaaaatgacacccaaaaatacacccgaaaaatgagatatacaatgatattaagagatatttagattaatgaaagaaagagataaataactgattatatgatatttgatgttctgtgagattttataaaaaggttcgagagacaccctaccaggtccacaaacaaagaattaaacctctgctttcagaggttttttctttttgataatcgttttctcccattctattggagactaaattcaatattacaacagttttttatatctttgactgttgatttaagtcaaatctattaattatgcaaaaaacacactgtcttttaatcattttgcttatgcactttttttctttggcacaggcaaatgagtatactttcaaacatataacatctgctaacggattaccacaaaactatgtacgttccgtcatacaggattcaagaggatttatgtggtttactacttttgacggtatagtccggtatgatggatattctttcaaaacgtatcgtcggtatgataacggattagataccggattgatgttgtacgtcaccgaagatgcagccggcaatctatgggttggtacggaaatgggactttactgttatgatatagatactgaccagtttacacgtatttcttcatatttcccgaaagatttcggaatacaaagagctattctcaaaatcaaagctgtaggagaagaccagatttgggtgtacacaggtaaaggggggatttatcggattgatgttattgataaaaagaataataaatatcaattggaacaatatttgagttcctattattattttcctagtttatgtattccttttaacggatactatttaactgtagcagaaggaaaagtttatacttttgataaagtccgcaatacatttgaacgctttcaggaagatattctcgaagatgttgatcaaatttttgtacacaaacagcaactctatcttctcaaaaaaggcttagcatacctttataatgagaaaacatcgactcttttccaactgacaaaccatccggggagagagttgttcatttcttcggataaccaactttggatatctagtttcgacggtctgtatcgtacgtctttgaaagggcttactccggaacgggctatggaaactgtttttagtggtaatccttggacgacttcatttaccgaggatagttttggtaatatatggattggcacttatcgtaatggaacattttgcttccacaagaaccagactccttttcaaaaaagtatgtctggcaaaaacatcgaatgtatgtcaacggaccattccggcaattattggataggcagcctgaatggtgaggtatgtgtacttgactccacacaaaaacaaataatggggaagacgattttccctaatgacatgatacatacaatttgtggtcaagagtctttaaacaaagtatgggttggtaccatgtatggcctttatgaagcatggatagaaaataacaaacaaattgtttatcaaaaaacttcgggaataaatatcccttctatccgaagtattgtgcaggattcttgtttcttgtggattgcatcttacaacaatggggttactctttataatcattctactcgacaaagtgttgtaacttatagaacagattctgaagttttgcctcttccctccaatactatacgtacaattctgaaagatcgagagaataatttatgggttggtacggcagaaggacttgttgtgttaaatggcaaggaacgtttcacgtcttctcccatatttcggaaatttagctttgccactcatcagaataatctgttgtttcaagataacatcgttcatattcgtgaagccaagaatggtgatatatgggtagggactttagacaatggattgtattatctgaaacgtaatccctctactaatgattggaactatcaatggattaatgttcagaaggggctttccaataattgtatcaaagctatatcagaggataacaatagctttatctgggtagctactaataaaggattgaacaggattgaccctcaaacattgtccgtcaaaatctaccaactaaatgacgggcttgcaaataatgagtttagtgaaagagcgtatatagaaaaaaggaatggaactttatattttggcggcattaacggtattacttcgtttactcctgctgtttttacggaggatactattcttcccaaactttcttttgtcaatctttccataaataataagaccctgaaagtcggagaagaagtgaacaggcagattctattgaaacgctccattcttaatactgacaaactgacattgtccagtcgtaacaataatttttcattcgacttcgttgccttgcatttcacttccacagataaaattatttataagtataagttggaagggtttgataaagaatggattactagcgaacaaggtaatcgttcggcaaaatatactaatatacctcccggcaattatcttttttcagtgaaagcctcttgcaatggtgagacttggtcggaaccactgaaaatggaaattcaggttttgcagccgcttttactccggtggtattttatactattatatatacttataagtatattcattgtatatatgattattcggaatttcaagattcgtgagaaaaggaagaatgaactctttcttgcgcagaaagaaaaacaacagatacgggaattgtcagagatgaaaatgaatttctttatgaatctgtcacatgaatttcgtactccgttgacattgatcatctctcctctgcaaaaattactttctacgccggatatttcgaaggatgaattacatcgtcatctgatgaacatacaacataatagttctatattattacgtttgataaatcagatacttaaattgtctaagcaagacaaaggcaaactggatatcgaactacgggagggggatatcgtggaattttgtagaaattgtttctcacaattccttcaaatagctcatgacaagcagatacagtttgcatttaatacaaatgcctcttacattcttttgttatttgatgcatataaaatggaagaaattctgtataatcttctttccaatgctatcaagcatacgcctgacggaggttctatcacattggatgtcatggaacaagagaaaggtgtttctattcacataaccgactcgggtacgggaatgacagaagaagtgaaaaaacatattttcgaacgtttctattcggaatcaggagtcggcatcggactttctttgactaaaagtctggtagaacttcataaaggaacaattctgttcaagagtactgagggggaagggactgtttttcaagtttttattcccttccaaaataagaatactcttatagaaccattatcagagacaacaaccttctcacaggaggattctgttccctttactgcatcagaatatatacatccggaaatagaggatagagacagagatatgagtgataaaccggctttgcttattgtggatgataataaaggtattgtacaaatattggatgagttgttttgtccttattataagatattgactgctttcaatggtaaagaggcttttgacctttgtttgtctcaaataccgtcattggtcatctcagatatctatatgccggagatgaatggaatagaactctgttccgctattaaatcgacgaaagagacttcacatattcctgtaattcttctaacggcaaagacatctaaagagatacagcaagaaggattgtctgtttatgcggatgcttattgcagtaagccttttgataatgatattttaatttccacagtacattctatccttaccaaccgacaaatgttggcccaaaagtttagcaataacttaatgtctgaggaagatcctactactgtttttccggaaaagaccgatagggattttattcaaaaaatcataaaggtagtagaagataatattgctaatgaagaattgagtgtttcgttactttgccgtacaataggaatgagccaattgacactcaacaagaagataaaacaactgactaaccagacaacaaatgcttttatccggagtattcggttgaaggttgcttcacaaatgatattatcacaaaagtatagtatttctgaagttacttatgcggtaggttttagtgatttacgttattttagagaatgcttcaaaaaggagtttggagtattaccttccgattacaaaaaataatagctttctctaggaggagggggataaattatataaaaactatcttttttctccccctttctaattcctcccctctcaaatataaatatcccaccccacactcttttttaaagttcctttctttgcgtatactcaaaatgcaaagagataaaaggtcgaactttaaaaagaaaggaggaaattaataagtaaagagattaaatgaaactgtattatgaatcttaaattagtattgtgattaactttaataaacatacatgaaaccaaatttatttcacacccaatttttccggttgttttttcttattttattagccggaatatcaatccaaacttacgctgcaaaggacagccaggcagctcctaaaaagcgtactattaccggtacggtaatttccgaaggagacaatatgcccattatcggagccaatgtatggcttaaaaacagctcgacgggagctattaccgatttggacggtaaatattctattactatcgacaactcggttgtaggtggagtactcgtattctcatatataggaatgagtactcaggaagttgcgataggaaaccaaaacgttatcaatgtgactctaaagtttgatactgaaaaaatcgacgaagtggtagtcgtaggttacggtcatcagaaaaaagccagtgtcatcggttctatttccactattgatatggcaggtgttaaagttccgggttcttctatttcgagtgtactggcaggacaactagcaggagttgtagcgatgaatcgcacgggagaaccgggaaaagccagcgcagccgatttctatattcgaggggtatcttcttttaccggtggtaacactccattggtattggtagacggaatcgaacgggatttggacttagtagatgtagaggatatcgcttctttttctatattaaaagatgcttccgcttccgctgtttatggtgtgcgaggagctaatggtgtaatcttgattacaaccaagaaaggggcagagggtaaacctgttattaatgccagagtagaagctggttttactcaacctaccaaaatgccggaatttgtaaactctgcacaatgggctgaattatacaatgagatgaaaggttatgaatattatactccagagcaaataggatatttccagaatgggacagatcccgatttgtatcctgatgttgactggatgcatgaactttataagaatatggcctctaaccagcgggtaaatttgaatgtatccggtggaggtgatatttgtaaatactttgtttccggttcgctgtataatgaaggttctatttttagaaatgcagggcaacgatatgactatgatacatctcttcgttacaataaatatagcttccgtgctaatatggattttaatgtaacaaagtctactgttctgaatgtaaatctggccaatatatatgagaagttttatggtcccggtgtagagaaagataaaatctggtcgagagctttcgaagcttctcccggtgtttatcctaaagaatattcagacggaactctttcttatccgagtatgcaaggtggcgagaatccttggaatcttttagttcattccggatatcgcgaacaattttggaattccgcacagtcacttatcggaatcaatcaggatttaggagatttagtcaccaaagggctaacagcttctattaaattttcctgggatgcggttaatactaacaccattgttcgttctaaaacaccgaatcaatattatgctaagggtcgtgatgaagacgggaatttgatttttggtagtcctattgtgaccggaacagacgaattaggacttagtgaaagtggtagtggttccattactacctatttggaaggtagtatcaactataatcggttgtttgccgaaaaacatcgtgtaggtgccatgcttttatacaatcataaggttacaaacaagaaactgacttatagcaaaaccctttcattaccttataaatatcaaggacttgccgggcgtgtgacttatgcttttaaggatacttattttgctgaatttaatatgggatataacggttcggaaaactttgccaagggacatcggttcggatttttcccggcttatgctgtcggttggatgatttctaatgagaaattctgggaaccaattcttccggttgtcagtgaattgaaattgaaagcgtcctatggtagtgtgggaaatgacgcgattggtggagaccggtggatttatcaatcaactatcagcaccaacaatgggtggaattatggtgagaatggaagtgaaggaggcggaggtatccaagtcggaaatgttgaaaatttaaatgtcagttgggaaaaagcttataaaaccaatttgggatttgaaatgagactgtttgacagaattaagatacaagctgattattttcatgaaaaacgtgaaggggtatttattaaccgacaaggacttccggctatcgtcggactgacaacaaaaccgaaaaccaatatcggggcgtctgttaaccggggagtggatgcaacactcgaatatgaggaaaaagtcggagaggtgtttttgaccgggcgggctaattttacattcaaccggaataaattactgaataacgacgaagtagaacacctttataaatatcaaaacagtattggaaaaacattcggaactggaggaaaccatactttcggacttatagctgaaggattgtttcaaagccaggaagaaatagacaatgctcccgaacagaattttggaacttatcgtgtgggtgatgtcagatacagagacgttaatggagacggagtggttgatacatatgataaagtggctttaggatatacaaatattccggagattacttatggtttcggactgactgcccaatggagaagctgggatatcaatgctttcttccagggaatagctcattgtactttctatattggcggcactgcaatgcgtcctttctctaccggtaatattaatcaaagtgcaatcaatgctgatatttacgatcatgtgtggaagacaaccaatacaccggaacagaacctggctgcttactatcccagattgagtgaagccggtggggaaggttctactaacaataaccagacatctacacttactatgcgggacgggcgcttcttgcgactgaaaaattttgaaattggatacactattcccaagtctattcttgaaaaaacgtttatcaaatctacccgtatttatgtctcagggagtaatttgctgacctttagtaaattcaaattatgggatccggaaaccggaagttcagacggaggtatttatcctccattaagagttttcacaataggtttgaacgctaaattctaatataatatgaaacgatatatgaaaaaaataactaaatactgttcttctttgtttgtgtgtgtcttactgctgtcacaaacatcatgtgactcttttctggatagacaggaagatgaagcgctgactttggataaagtgtgggaaacccgtgcggattcacgtaaatattggttaactactatgagtttcttaccggatgacgctaatgatttccaatatactccatggagcggggcagctgatgaagtaacagtttcaatgcgggaccgtgaatatcatattatgacttccggagcttggaatccgtcaaatgtaccttacgaacgtatgagtacttattatagagggatacgtgagtgtaacatatttttagctaatattgatcgttgtactgacccgttgttgagcaatgatgaaaaagaacagtggaaggtacaaactcgttttgcacgttgttattactattttctgatgatgagaatctacggaccggtattcattctgcatgatgagctacttgattttacaaaaagtgcagctgagctggaacgtccccgtaatacatgggatgaatgtgtgaattatgtaataggtgagttgaattcgttgattgatagcccgtatatgaagtctaattggacttccagtacagaaaagggcttggctaccaaaggtgcttgccaagccataatctcacgcttgactctttattctgcacgtgatttgtttaatggaaatacgatgtatgcctctgttaaaaatcctgatggaacgaatctatttccgcagaattatgatgcggcaaagtggaaaacggcagcagatgcagcatacaagatcattgatggcaatctttaccaattatatcactctgatgatgatgatccgtatgataattattatggcataacacaagaaaagtggaacagtgagttaatatggactaccggttcgaaagggcgttttataatgtcggctcatacatgtcctacttccgttgcaggtagttcttcttggggatttgtcggggttactcagcaacaagtggatgcctatccaatggcaaagacaggtaggtttcctattacaggttatgaatcagacggtagtcctatagttgatcaggagtctggttatcctatggacgagatggcttatactgatttcgtctatcctgcatggggaggagctgcttcttacaaactgaatactgtaaagatgtgtacggaaagagatccgcgtttttatgtaacagttttctttagtgggagcaaatggcatcatggtaatgaaatgacacttacttcttttgctcatggggccaacggctatacttcggacgctcgtcctaagtctggttttttggtgaatcgcttttatgaccatacggctaattcggcaaatggacaatggggagaaattacttttccgactttccggttgggagaaatttacttgaattttatagaggctgtgttagaatgtaaaattagaggggtgaatatcccggctaattattataccaaagcaatggaagtgtggcaagagctgagagcaagagttgctctgccgtctattactgaatcttatcctcatgctgatgataatgaattacttgatttatgccgtaaagaacgtcgtgtagagctggctttcgaaaatcatcgtttttttgatactcgtacttggaaaatcgctgaagaatgtgacgggggtaagatgtggggtatgaatgtggaaactaccggaagcggtgatgtaactcctgatagtttttgggaaagaacagtgtttgaaaaacgtgtattcaaaaaacaacattacttgtatccgtttactcagacagaaatcagcttgaacaaacaactgacacaaaattatgggtggtaatttcgtaaatcaacaaaaagaaaactgtatgaaaaacaatatatttaaaatcatcatcttttttctcgcattagtgtcattaggcgcttgtgatgatggatgtgaggattatctggatcaatatgagtctattctctattttaaaaataatggagagcagcatgttactatttatgatacaagtaatgaagccagttgtgaattcaccgttattagggccggatataattcaaagaaatattcaacagttgatgtttctgttttagatgctgttaatatacaaatttataatgcagaaaatgaaacggattataaattgttacctgataactgtttcaagctggaaacaccaacattggcgtttgaagataccgataaccacaaaaaggtaaaagcgtttttctatattgataaaattaaagaattggataaggccaactatattttgccacttgtcttgaataattctagtgatgatatcaatattgataaaaggcaaatatttattgttccggatattgtcaccccttatctctattttgaaaaatcaggttatcagccttataaagcggaagaaggtggggaaacaagtttcgatattactatacctataagtatgccgatggaaaataattggaattttgattgcactttaaagattaatcctgaattgttgactgcttataatgagactaatcatgcagatttcgaattactaccggataattgttatactttagcagaaaaggtttcgttcgtttccggaaaaagtacaagtatcgctacggttaaaattaatattccggatgatttgaaatttggtaaatacatgttaccgatagaattgtccgaatgtagtatgcctacatttgacattaaagaaggggtaaatacttatctggctggtatcgtatatcagaagcatattgatataacagaattaaaagagatcaaactgacagaaagcatgatctccagtaatgcgagaaccgaagattttgaatcattggatccacgtacgcaacttgtcaatatcattgatggagatatcaatacctccttccattcgtattgggcatttcatggttatcctagtgatttctcggaattcccatatatacaggttgaattgcctcatgtgtatagtggttttaaatttagctatatcactagaaccgccgcaaatggttctaacaatggtaatgcaaatccgcaagagctcaatatttatacaagtgagaatggaatagactttactttattgaaaactttaagtgatgatctgccattgtcagaaatgggagccacttatgaatcggaacttatggtgccaatgtctggttcgttcagatatctgcgtattgaatcgactcattctaaagagtcaatactgaatgctatagctattgccgagttaaatttatgggttgcggaataaatcaaataatatacttataaattaaaaatgtatggataaacaagatatacaaagaatcaaaagcttaattttggttatgcttatatgctgcatgccggtcttctgtggatgcaatgatgaagatgaaaatcattctatacctcaattggaaatagcggaagaatttctaatacaggatttcgataacaaaaaacatgatatcgaaataccggtaattaccaatttatccaaagatgaatggcgtattacatcttctgccccaaactggtgtatggcgacgaaagttattgacgaaaacatggtgcgtctgtatattcctgccagtgaagaaccagaggtcagagaagcagtagtaaaagttgtttcgacagtcaaagaatatactatcaaggttcggcaactaggatatggtccggcaattttggttactccgcttactgctaccacattatctgccgacggtggagatgtaagacttaaaattacatccaatatagattataaggtcaatataccagaagtctgtgattggttgaacgagacgactattcctgatacacgtgccctgagtagtaaagaacatactttccatattgataattatgcgatgtacggagaggtgcgttctgcttctattcattttgataatgagaaatatgaaggcgtagcggctgaatgtgttattcaacaaaaaccgttggaacccaataccgatgatgttgaaccgggaggagatgttatgttcaaacctatcggtggaactgccagtcagcatcaaccgggacaagaaatagaaaaatgttgggatggacttggtggaaataatttttatcatagtccttgggctgcgggagccacgaaattccctgtcattcttgagtttgattttgacggaacacatacattggattattttgtttatactccgcgaagtaccggaggaggtcattgggggatatttgacctgtattatgcgacacaagacacacctgaatatattcttctgggttcatacgatttcaagaagtcaacttcgcagactaaacttgctatggataaaccattagcaaagatcactaaattaaaggttgtaatcaataccgcaaaagatgattatgtaaactgtgaagaaatcgaattttatgagatgaaatcaggcttgagtgaacaagagaaacagctgttaagtgtatttacagatctcacttgtagcgaagtgcgtccggaggcaactatgcaacaaattcaagcattgcccggctattttatcaatatagctatgcaactgaaaaacggcacttatgatacttgggaaaagaaattccgaattcaggaatacaaaccttatagtactcctaataattgggctgataaactgtatatgaaatcatacactgatttggataatcctactggtatctatgtaaattcaggtgatgaattaatagtcatggtaggagaaacttatgggaatactattagtttacaagcgattcgatcctccaatttgagtggagacaaatacatgttgaatgaaggtatcaacaaactccaaatgaagggtgatggtatgttgtttgttatgtataacaccgaactaacttcggagaatgcgaagcctgtaaagattcatataccattgacttccggtacagttagcggttattttgatttggaaagggataagactgatgctgtttacacggaacttctccaaaaggcgacctatgaatactttcttattaagggaaatgaaatgttactgaattttcatcgtaccaagttacttcagtggcagccgaattctatagttgagtatatcactatgtttgatcattttgtgaactggcaatacgaactattgggcttggaggatattcgtcctgcattgttcaataatcatgtgaatggttcttcgatcaatgatgatagctatatgtgggccggtaacggacaaataggtttcgggattaatgcattggacgaatttatgcctactgaaaagttatataccgaacgacgctgctggggccctgcccatgaaatcggtcaccttcaccagggagctattgcctggaccggttgttttgagtcatccaataacctcttttcaaattatgtactttataaaatagggagagaatgttcaaacggagctccgttgagcgtattggcagacaggaaactgaataaccgtcctttctgtaatttccttggcgatcccaagaaggaagatacggaaattcatatgcgtatatactggcaattatggctttatttccaccgatgcggtatcaaatccgatttctacccggaattattcaagaaattgcgtaataatagaaacttgaataatatccctgtaggagaacgacaaatgcaatttgtgaaatatgccagtgacatagctcaaaagaatttggcagatttctttgatatgtggggatttatgactccggtagacgaaactatcgaacaatatgggccaaatcgctatactgtcaccaatgcaatgattgcagaaactagagaatacacttccaaatatccgaatcctcaacctttctactatattgaagatcggaaagacggagatgcaggtttggaaagtctgggactgactggtaaaataggggatgtagggcactatactcagtttaaagagaatcaaaagataaccaagaccccggcttatagtgtcagtggacagcaagtaaccataattaacggtaatgaagcggtagcttttgaaatctggaaagacggagaacgaaaatacttctctaacttcctgaaattcactttacccgacgaacttcctgtcagccaatgtactatcagagccgtacaagcagacggtaaactgataactgttgaacgttccaaataaaatgtatataagtaatgattatcagatgtttattaatgctttggattactgtgctcgtcactgggtgcacactgaaagatgaagaacaaattatcaccgaggcgtggcattccggagaaactctacctgtcgaaatcgggaagaaatatcctcctgctcccattgccatgacgatagataaaggatataatgtccttattgatctttcgcatcaatgttcgttcaatttcatgtggggattgccggatatgttacaccagaaaggatttcgtagtgtatcgtcacaagcctcactcggtagtgtcctggatgagaagggggtgtcccgtatccgtattccatatgatccggaacgtaagatttatccttttgcctggtatcctaattttagatataacgtaatcattacttttcagaatgacccttctgctccggtttatacggagcaggagtgtctcttgctcaaagattttgtatctgagggaggtggcttgattattctggctgatcctgtaaaagcagaacaggtcgataattggtctctgaaccggttgctcaagaattttgatgcaagttataccaaagattatcagaactataagaatcgtcggcatattggtttggctctttcagaacagtggataccttgggaaatggggagtgacagtttgcctatccgcgcttaccgtgaatatggtaagggacgtatagcagtcggtacggctttagatgattttctaagtaatggagaagcgggaagtgcttttgttgaccaaataatggactggttatgtgagaaacaggttccggtgggaggagagcctcgtttgccccaaacaatgggtggtggcggagctatctatccggaattggaaagtgttattaatggtatggtcacttattatgcgcctactgttaaccatactcttcttgaatgtataaaaaaagaattctttaggataaacgatacattgttgcaatggtatccgtctcggcaaaccgaggaaccgatgtttctcgttctctctgccggaagtggaggaggctgggctgtcaacagtttctttcctaaggagaatggtattattagtcaagattcagccagtctgatttctatttatggacatgaactggcacatacactggcaggcccggtcaacgagaaaggacaagcggctggtgatgtaccttttggaaatcagggagaagcacatgccggttggtttcaagggaaagtagaggcactttataatgaggaactccggcaacatgcgaataaaaagtgcgaagatttcttccgttcttccgaattcagacaactagacttaaaaagatatacaaatgacggagagtatgccaagcaattttcttacggggcaggctggtataaactttggtatatctggcaacgtttggacgacacatatggaaatacttggtatgcccggtggaaacatatccagtatacccgttggaaaaacgatccgatgcgacttctgacttgggaagagatgatagaggacatgagtcttgcaacaggacacgatctatttccctttttcatatctttaaatacaggtctggaacgtcgtgaaatgggtgaagttatttatgaaggtaagaaagtgaaactatccggagcagttatcccgataatagaaccgggtaatgtatgcctgaacccaatcgaaaattataaaacgataaaatttgaataaacatgaagaaattgattttatatactttaattttatttcttatgtcttgtcggtctacgcaagaggtagacacctccgtttatatggatgccaaacaacctgtagacaaaagagtggaagcattgcttgcgcagatgacattggaggaaaagatagggcaaatggatatggttaccgtatgggataaagaggccatatttaagaatggatattatgatttcggtgcatggctggcggatttggagcctgaagaatgcaatcaactacaaaaactgtccgaacaaacccgtctgaagattccttatcttataggcatggacgcggcacatggatatgcaatgcttacgggcagaacgattttcccgacttccataagcatggccgctactttcaaccgggaattaatttatcgcacgacttcgaaggccggtgaagaaatccgttcctccggtatacattgggcatttgctccttgtatagatatcgttcaggatgcccgttggggaaggaccggtgaaacctatggcgaagatccttttctgacaagcgaattggttaaagaggctatacgggggtaccagggcaatgaaaatccttttaagaaagtggctgtttcagtcaaacatctggtggggggaggcgcatccgtcggaggatgtaatcatgctagtgccgaactgtctgaacgggcactccgttcgtattttctgcctcccttcaaggcagccatagaggccggatgtatgactattatgcccggacataatgatattgcaggagtgccggtacatgcgtccaagtggttgttgactgatataatcaagcaggagtatggttttaaaggcttttttatcagtgatatgggagatgtggagaatttggctacttctttgcatcagatagctgaaaatcagaaagaggctgtttgtaagtcggtcaatgccggtttggatatgcatatgtattctgctgactcggcacgctttgtacgtccgctcgtagagttagtcagggaaaagaaagtatctccccggcgtattgatgatgctgtcagaagaatcttgaagattaaattcgagctgggattgtttgagaagcgttatgtatctcctgaagaagatagttatggtagcaaagagaacaaagcattggctttggaagctgctagagaagccattgtcttgcttaaaaatgaccggcaaatcctacctcttgacaggactaaatacaagaagattttagttaccggaccgaatgctgacaatcaaagtattttgggtgactggtctatctttcaaccggatgaccacgtaactactattctggagggtattcaggcggcagcctctcccgagcagtcgatcttatacagcaatagcggacggattaaggcaaagaaatctgatctgtcggtaaatactaccgatcctgctatccagaagaagctgataaccgaaggcggcggcatctctgattacagtattgatgatgctgtccgaaaggcccggcagtccgatttggcaattgttgcaattggaggatatggaatacgttcggaatggggattaagaacttatggagaatcggcggaccgtccttcaatagatttctacggacgacagttggagctggtccaagcaatacatgccactggtactcccgtagttatcgtcattgtaaatggcaaacctctaaataacgaatggataaccaaaaacatcccaaccatagtagatgtgtgggaaccgggaatgtatggcggacaagctttagctgaaatattatttggagaagtgaatccttcgggcaaattgccaattaccattcccaaacatgccggtcaaatcccaatgtattattatcaaagaccttccagatattggacgggttatggtttgggttcttccagagaagatgaaaaacctgcattttgtttcggtcatggattaagctatacgagttatgaatattcaggattgaaaatcgacagtgtcattcctcaaactcaggatattgaattcacatttactgttaagaatacgggaaacatggcaggaaaagaaaccgctttagtatttatacgtgattgtgtttctagtgttgtaacgcctgttgcctgcctgaaaggttttgagaaagtgagtctgaatccgggagaatctaaggatattcggatagtcattccttattccgatttaggactttggaatgaagatatgaaatatgttgtcgaatccgggaagttcaacctgatgataggtcgttcggtggaggacatacggatcaaaaaagacttttttataaaataatcaaatgatacgttagagttagaactgaaaaaatatagaattatgagaaataagatactgttttttatactcttaaccttttgtttgggattgtcggcacagcatcgcatggtaaatacggctgtgaccgaacaaacaggaaagaaggtttccaaattacttaagactaatcatcgaatgcttaatcctatttctcctccgggcgtgtatattgccgatccggaggccaggcagatgcctgatgggcgtgtctatgtatatggttcgcgtgatgagccgacaaatgtctggtgttcgcatacctatgatgtgttatcgacttctgatttgataaattgggatgtggaacagttttctttcgctacaaaaggtatagggaaacaagtcgactataccgaccagttgctttatgctccggattgtatctatcacaacggcaaatactatttatactattgcctgacgaatgaaaaggaagatgaaggtgttgccgtatcttcttctccttatggaccttttaaagagggaaaagccatagccggaattcatggaattgatccttcggtctttatagatgatgacgggcaagcttatttattctggggacaagccaatgccaaaggagctaaactgagtaaggatatgttatctatcgaaggtgaagtacatgagaaactgttgacttataatgaacatgcattcaatgaaggcagttcggtccgtaaacggaatggcatctactattatgtatatgccgggcaccagcgtcacggtgaatctaattgtgctaccctgaactatgctacggctacttctccattaggtccttatacatatcggggagtaattatagacaattgggggagtgaccggaatttagtgaacaatcacggttctattgctgaaatagatgggcagtggtatatcttttatcatcggcctacccatgctagttcatctatgcgcaaggtttgtatggaacccattgtatttaatccggacggaactatcaatgaagtagaaatgaccactcaaggttgtggggggcctattaatcctttattgcgtatggatgcggcgagggcttgtcttttgtcggggcataccacggtagttgttcggcgtccggcacatagcaatccggtagaatatttgtcggctatacggaatggagattgtgcttactggaaatatttcgattttacaggaatggaggtgaattctttcatttgcaaaacatggggaaagaatgctgccggtactattgaaatccgtttggataaaccggatggagaactgattggtacttgtgagctgcaaccgatgaatggggatgttgcctattccgttcaccggacaaaagtgaaaccggtgaccggtgttcatgcattggtgctggtgttcaagaacaatgatccgtctatgaccgggcaggattttatgaatctggagtggtttatgtttgaaaatcatgaccgctaattcagatgtatggggtaaaacacctctttgaatatagaaaaataacttaaataacctctattatatgcagcttaaaagactctcttttctattattgtttatatgtggatatttaacttgtgtgcaaagtcagacaacggtacttaatcctcaaacggacaagaaacttctaaaacagtttcaagatgccaaactgggtttgttcattcattggatggcttgtcattcacccggtacaggagattcctgggctattggtaatggtactcctaaaagtgtggcggactctattaccatgaaatggaatcctcagaatttcaatcctaaagagattgtaaatgtagctgttcaggctggatgcaaatatatggtagtcatttcaaaacaccatgacgggttttgcatttggccgagcgaatattctatctttgatatagaccgcatacctttcaagcgagatattttgaaggaattgggtgaagaatgtcggaaacagggattgctttatggcatttactattcaatagcagacattgattattgcggttggaactctatggcacaagttggaagagaaataaaagaaccgaaatatgggcgggaagattttatccggtttgtgcataaccagacaaaagaactgatagaccgttaccagccggatatcttgtggtttgacggcttttggctggatcctctttggactgcaaaagaaggaaatgatttatatcagtatatcaagaaactaaaaagtaatacgttatctactcgtctggctattaccagaggagaggacgggcatgaaactttctggacagacggctcatcgggcgactacttctcaatagaagccaaaacaacagatgctcccccgttcccatgggaagcatgtaccagcgtcacttatccggtatatgcttacgaacctgatgctaagatgctgacagcagacgaactgatcggaatgtttagtaaaacactttgcggtaacggtaatctattagtgaatatcggacctaaacctaccggagagatgcccgaagaacaagtggaacggttatatgaattgacgaaatggatcaaccggaatagagaagctgtgtatgatacacatggaggtcctttcaagcaaactgatgaaataggaagtacctataaagatgagtatatatacttgcatttacggaaaccggtttctacccttcggataaattctttggaaggctatcagataaccaaagcttttgatttgtcaacaggtaaaaggattaagattcaacgaaagaataatgaggtcatcttatctttgccggcttgggagaaaggacgacaaatacctgtcattgccttaaagctcgatagagaatatcgttttgtaaaatggttgccgtttgtattgctgaagtaattgtttttcctatctttgtgaccactggaaaaacaattaaggatttgctttatgacgaatgtaatagaaatgatgacctctctgtatccggtttctgatgatacaatacaactattgaaggataatgtgacactttgccatttccctaaaaaatatcaattgataaaggctaatcaatatagcagatcagcttatttcatcgaaaaaggaatgacccgctcttattggctggtcaacggagaggaaatcactacctccttctcgtgtgaaggagggattgttttcagcatggatgaattatattataataaaatgagtgaggaatttgtggaaacgcttgaagacgtggttgcctataaaatagcactatctgatttgatccggctttttcagaccaatatcgaactggctaattggggaaggatcattcatcagaatgaataccgacgcttacaccgttcacacaaagatcgcctgactttgtcggccaaagagcgatatgaggaatttatgcagcagtttcctcagatatgccagcgggtacaattaggatatattgcctcttatcttggaataacccttccgacacttagccgccttagaagccggaaataatttctggtaggggcgtattttgatgtaggacaatttttttaataactaacttctgtaactttgggccctcatcagtgatacgcaaaataataatctaatttataaatttatcatgcaaaacatctcttcttctgctgcatttgcagatagtaaaccccattatgaactccttgacggcttgagaggaatcgctgctcttttggttatatggtatcatatatttgaaggctttgccacaagtcccatagaccagcggttcaatcacggctatttggccgtcgatttcttttttatcctgtcgggattcgttgttggttacgcttatgacgaccgttggaaaacaacgatgaacacaaaagactttttcaaacgcaggttaatccgtttgcatccaatggttatcctgggagctgttttaggtgctattacgttttgtatacaaggttgtgagaagtgggacggtacgcaggtcagcatatctatggtgatgcttgcattgcttctcaatcttttcttgattccggctgtacccggttcgggttccgaagttcgtggaaatggagaaatgtatcctttgaacggtccgagttggtctttgtttttcgagtatatagggaatattctgtatgccctgtttatccgccggttctcgaccaaacagctgaccgtgcttgtcattctggcggcgatcggactggcttcatttgctgtatgcaatctttccggttatgggcatttaggtgtaggttggtcattgctggattataatctgctcggaggatttctgcgtttgctgtttgctttttccgcagggttgttgatgtcgcgtatttttaaaccggtcaagattagaggagctttctggatatgtagtattgcgattgctgttctactgtctataccacatatcggcggtatggaagcttcgtggatgaatggtatttatgactctgtatgtaccattattcttttcccgatccttgtttacctgggtgcctccggaaaaacgacagataaagggacttccggaatttgcaaattcctgggagatatatcctatcccttgtacatcgttcattatccttttatgtatttgtattatgcctggttgtggagtggggaaaaactcactttctccgatacatggccggtggctttgatagtattcttcggaaatatcctgttggcatacctctgtctgaagctgtatgatgaacctgtaagaaagtggctgactaagaagtttctggctaagaaacaggcctgatatatataagaaatagtcccgttcatcgggactatttcttatattcgtgaaccatttattttaatatcactatcaggcaatagtcttttgatacgttcaattccttctttgcttattttcccgaataactctaaatgttcaatttttatctttgatatttcatccggtatatcaatctgattaatgaatcttatttccaatttctttatttcagtgagttctaacaaaacagaaggaaattctttcactctaatagaaatgccacgaccgaaacctgtaccttgtgcatctgccattaatttgtttttcactttgttgttagtgaggtctttctttctgatcatccaactgatttgtggtcgtagagcgaagtttcttttattctgttcaagcccgacgaagcctgcccaaagttccaacggagtttctgtaactgtattgttatatacttcctgatattttaaatctacttttactatttcatcaggcagactgtctgtgccttccagttgttttagattgttcctttgtccttttttgtcataaggaaagaatttcactatccagccgtcgatcatattaggagcaccatacttctcttgcgaatgatatttaaacatattgcgccaaaagcctttgttaatttcgcctttggatgcttttacaaattcctccagaagaggttccagctcggagatccaccattcgagcttatatcctttcaaacttttagccttacttagcaccttctcccaatcttcaggtgtaccttcgagggttatttccgggattccgcaaacaatgcgtataacaataaactcaaaataaggcttcacggattccatgattgttatttcagaggcaattttctctaaaggtgttgttgttgagaagttgcaagtcagtgtttcaaccaggctatttcctacttgtttttttatttgttctgtaaattgagggaagatctcattccatgaaagagtaggatcttccaactgtttatctgtcttaacaatcaacgattgttttccggagaaatcgacgatatagtctcgcattgcttcttgattagcgttgatatgtcgtgcaaagccttggctgattaacaaccagatcatgtccggagataacacaaacggtctgtggtccgcataagcctgatacataccttgaaagaaagaatggtagcgataagataccaggctgtcgggagcttcgctttttgcgatgatattgaacggcggattcttttcctgcttttcaacttcttttgaaaaaacttcggtttcggacatgataagtcttttgtagatatcgtcgtaagattgcaaataaaggaagttttcgggagttgaaagcttttctattttgaaagtaattcttttttgagcaaatgcggaaatgctgcaaagcattattaatacgcaaaatagtatttttttcataatattgaagtatatagtactgtgatataaacttttcaggtgcgcctgtggtttcaatagataatatgcaaatatagtattattaagagtcggtttggtgcaatcttgaatattttttgaaccgctaaacagaaattattcaggaatttatagtaagtttgctctgctaatcgcaagaaatggttcagagaaagatcatacacattgacatggacgccttctacgcatccgtagaacagcgtgatcatccggagcttcggggaaaacctctggcagtcggtcatgccgaagaaagaggagtagtagctgctgccagctatgaagcccggcgttacggtgtccgttctgcgatgtcctcacagaaggcaaagcgcctttgtcctcagttaattttcgtaccgggcagaatggatgtctataagtccgtttcccgacagatacatgaaatctttcatgaatataccgatatcattgaaccgctttctttggatgaggctttcctggatgtgacggagaacaagaagggtatttctttggctgtggatatagcgaaggaaataaagcagaagattcgcgaccagttgaatcttgttgcatctgccgggatttcttataataagtttcttgccaaaatagcttcggattatcgtaaaccggacgggttgtgtaccattcatccggaacaggcactcgagttcatcgcccgtctgcctattgaatccttttggggagtgggacctgtcacggcaaagagaatgcatctgttgggaatccgtaacgggcttcaactgcggaaatgttcattggagacattgaccgcgcattttggcaaagtaggatcactttattacgaatgtgcacgagggatcgacgaacgtcctgtggaagcggttcgtattcgtaaatctatcgggtgcgagcgtacattggaacgggatatttcctcccgttcatctgttattatcgaactatatcacatggcggtagaactgatagaacgactgcaacgaaaagagttcaagggaaacactctgacgctgaaaatcaagttccatgattttagtcagatcacccgcagtatcacccagtcgcaggagttgacgacgctggaccgcgtgcttccactcgccaaggaattattgaaaacagtggaatacgagcaacatccgatccgccttatcggactttccgtttccaatccgaaagaagaagccgatgagcaacacggggtctgggaacagctcagtttcgagttcagtgactgggaataaaacagagcctctatttcactcaaacagagcctctatttaccccaaacagagcctctgttttactcaaatagagcctctgttttttgcaggataaaatcatcgcttttatgacttgaatacttaatttaagctctctgtgagtacaattcttgaactctgtactattttgtcatcaggttcgtatgatttgttcacctcgtttttagggagatgcgctatctttgccatacttaaatgaacaaaataccatgaatcgaatgaaacatttactttgttttcttctggttgcaactttgggaagtctttctttcaaagccaatgcttacaccgaacgaaatatgctgcaaaaagcggctgatgaagctacgttgaaaaacgtattagtaatgaaacaagcttgggtgccttacccggcttataccgatcgggcagcctgggattcgttaatggggcctaacaagcaacgtcttatcgcagccggtgagaaacttctcgattataaatggaaactgattcctgccactgcttatctggaatacgaacgtagtggtaatcgtaaagtaatggaagctccttatgacgccaaccgccaggcattgaatgcgttgatgcttgctgaactggccgaaggaaagggacgttttatcgaccagttattaaacggagcttacatgagctgcgagatgaattcatgggttttgtctgcacatttgcctcgccagagcagtaaacgttcacttcctgatttccgcgaacagattatcgatcttggttccggtggttatggtgctttaatggcatgggtacactattttttccgtaaaccgttcgacaaaattaaccccgtggtgtctcttcaaatacgtaaagctattaaagaacgcattctcgatccttatatgaatgatgatgatatgtggtggatggctttcaactggcggccgggagagattatcaacaactggaatccatggtgtaactccaatgcgctgcaatgtttcttattaatggagaacaacaaggataaactggtcaaagccgtttaccgttcgatgaaatcggtggataagttcataaactttgtgaaatccgacggggcttgtgaagaaggaacttcctactggggacacgcggccggtaaactttatgattatcttcagattctttctgacggtacgggtggcaaaatatccttgtttcaggaaccgatgattcgccgaatgggtgaatatatgtcacgctcttatgtaggcaatggctgggtcgtaaactttgccgatgcatctgcacaaggcgggggtgatcctttattgatctatcgtttcggtaaggctgtgaacagtgaggagatgatgcattttgccgcttatctattgaatggcagaaagccgtatgctacaatgggtaatgatgctttccgttctctccagtccctgctttgctgtaatgatcttgccaaagcgacccctaaacatgagatgccggacgtgacttggtatcccgaaacggaattctgctatatgaagaataaacatggaatgtttgtagcaaccaaaggagggttcaataacgaaagccacaatcataatgatgcgggcacattctctttgtatgtgaatacgattcccgtattgattgacgccggcgtgggcacatataccaaacagacattcggaaaggaccgctataagatttggacgatgcagagtgattatcataacttgccgatgattaacgggatatcgcagaaattcggtcaggactataaggctaccaatacggtgtgtaatgagaagaatcgctttttctctactgatatagctgctgcctatccggcagaagcgaaagtaaaaagctgggttcgttcttataaactggatgaccgtaagttggtggtggccgacaactatacattaaatgaagtgctggcgcctaatcaggtgaacttcctgacttggggaaatgttacatttccgtcgccgggcaaagtgcgtatcgaagtcagaggacagaaggtggaactggactatccggctcaatttaaagccgaactggaaactgtcaagttagatgatccgcgcctgtctaatgtatggggtaaggagatttaccggatcacactgaaagcagaagaaaagaaaatgaccgggaattataaatttgtcattcaacaagtaaaataagaaagaatagaaattgagatattaacaattaaattgctataagatgaagaaagtattatttgccggccttttggctatcgcgggagtaagcgtaagtgctcaaaatctgattaaaaacgaaaagtttgctaccgaagtgaaaactaaagtaactaacgccaacaaggctaccgcaggagaatggtttattatgaataatgaagctgacggagcgactaccattgtttgggaacagacaggagacgccaagtatccgaatgccatgaagattgacaactccggagccgaaaagaatatttcctggtacaaggcattcttgggacagcgtgttaccgacggtctggaaaagggtatctatgttctcactttctatgcaaaagctaaggaagccggcactccggtaagtgtatatatcaagcagacgaatgaggaaaagaatgataacggtaagtacaacactactttcttcatgcgtagagattatgatgcggacgctcaaccaaacgcttcgggtgcacaatataacttcaagattaaggatgctgataaatggactaaagtagtggtttactatgatatgggacaggtggtgaatgctatcagcagtaagaaatcaaatgccaatctggaagtatccgatactgatgatgatgcggctatcctgaaagattgttatgtagctatcctttccctaggtaaaggtggtgtggtagaaatcagtgatgtgacgctgaaaaagaaataaaagaaaaaagggtttaatagtgggttaataagaaaatagggcggtgaagtaatactacttttccgccctgttttttccaactaagtctataagaatttgcccgatacgttttatcggattccgagtttctgtttcaattccttcggtagggagtctttgtgtaccataacgcagatagtcttggcacgtacatagctttccgacatattcaggtaaccgccggacttgttactttctgctccccaggagttcttggtaatataatatttagtaccgttctgatcttttgcaatgccggtgatatgcattaaatggtcgtcggtagttacaaacttttcatagccttcctgacggatttcaggtgttacggcgatttccggataagggtgctcaaacttaaacacttcgtccaggcgttgatatttcggcatactttcaaaacgggcgcgatcggtagtagagtaatcttttacgtcttccacttgtggattgatagcaactccgttcttaaaagagaagccttgttcgctgacatcaccgtcccaacatacggtatatcctttgttcagtgcatagtcgatagtttcaatcagttcatccaacggaagattatacatcggctggttctcccagttgtccggtacctcgggagagaacatttcataataaggtttgtgggtgaagctggtcagttctatgtaatcatccatattcagtcccaggctttcggtgaaagactgcggtgtatattcctttcctttataagtgaatttctccggcagcttacccaaatacgtatcgaacagattattgataagtgcataatattgcggagtacgctttttagaagcgatatttgcgtctaccaaagccttgaaataacgtgataacgctccatggttatgttctttgttgccgtctatcaaaccggagtatgcctcttccggtacaattcctacttgcttataagcgtttttaaaagtatgtgccaggcttccctcgccgatatttccttttccgcgtcggagataattatcttccatttggttcatgtacttttggcggacgatgaacatctctgataaatcgtattctcctttccccatgcggagcagttccgactccataaaagatgcagtggcaaagcaccagcaagttccggtggacgactgatctttgacaggtgtggctttgtgggatacaacggttgtgaattcatagccgggtgcttgtgcaaatgaggctatggcaaaggcgaataccgcgaccgatattaatagtttcttcataattgatgtgttttattatctttagagtacaaaagtataaaaaaagcgaggatactcgaaagttcctcgctttatttcaatataattagtgtgtttatttacatggcaacctgctgtgacagcagtttttgaagtttaccgttcagggtttggcacattgcaccatttcccattgcttgatagcgtttaatacggtactgtaacatcataatcttttcatttgcattctttttcataatttgtttcctctttttttgccctccacgttttgaagagcggttttacatcttgttttctttattaacactgcaaagatacgaaatgtttttgaattatatgctgtaaaacataaaatatttctttttcttctgctttttctttttataagaggttcgaacacggtatatattacaaacctattacatacatttacaaggacttgtgccgtctttctgaaaaaaacttgtaattttgtgaacgtatcttttaagtacgcataaaatagctcacatatttattttattaagatatgaatataaacacacacattcgactattacttgttccgattctatcggttgtattgttttcctgtggtgaatctcactttctgaaggaggaggcttaccggaatcaggtgtttcaggattttgaacagaagcagagggcacttcctcatggagatttgttcgcaatcttttccgattcgactttgactctttccgagcgtgaagctctgatgtttttgtatgcctatatgccgataggggatattacggattattccggaaattactatctggagaatcttcgtctttccgagcaggcccgtaacgaaatgtcttggggaaaaaacgtcaccgatgaattattccggcattttgttctgcctatccgggtgaataatgagaatctggatgattcgcgaaaagtgttttatggagaattgaaagagagggtgaaaggcctttcgatgaaagatgcaattctggaagtgaaccactggtgtcatgagaaggtggtgtatcgtccgagtgacgcccgcactagttcgcctttggcttcagtaaagacggcatacgggcgttgtggggaagaatccacttttactgttgccgcattgcgttccgttgggattcctgcgcgtcaggtttatactccccgttgggcacataccgatgataaccatgcgtgggtagaggcttgggcagacggtgaatggtatttcttcggggcttgcgaaccggaaccggtcttgaatctgggttggtttaatgcgcctgcaagtcgtggaatgctgatgcataccaaggtattcggacgttataacggtccggaggagattatgctcgaaactcctaactatactgaaatcaatgtaatagggaattatgctccgacggcaaaagccgtggtgacggtgacagatgcgaatgggaaacctgtttccggagccaaagttgattttaaggtgtacaattatgccgagttttatacggtagctaccaaatacactggtaccgacggccgggcatcgttgacagccggtaaaggagatatgttggtatgggcttccgctgacggggcattcggcttttctaagttgtcttttggtaaagaagatactttgaatttggttttagataagaaaggaggagaagcatatacattggatttggatatcactcctccggttgaaggagccaatttgcctgaagtaactccggaacagcgtgccgaaaatgatcttcgtttggctaaggaggattctattcgtaatgcgtatgttgccacgatgctgacggaagaacgtgcaaaaactgcgttggcttcgtttcaacaagaaggtattgccgatacggaacagtttgtgaaaatgttggtcgcttcgcggggaaactatcagacgttacttgatttccggaagtcggcaaccgaatgtgatagagaaggacttgctttgcccttattacaacaactttctgcaaaggactggagggatgtctctttggaagtattggaagatcatttgaagaatgctcctgatcctcaggaaacggacttatgggcatgtgcggagattgccaatccacgtgtagagaatgaaatgttgacaccttaccgttcttttttcaagaaagtcatttcaaaggaagaagcaggggagtttataaaagaaccgatacggttggtagaatggtgtaagaaggaaatccaaatcaataatgagttgaattcgcagcgtatacctatgtcgccgataggagtgtggaaagcgcgtgtagcagatgaaaagtcgcgtgatatcttctttgtggcaatggcacgtactttaggtatacctgctcggatagataaggtgacagggaaagtgcagtatactgataaggagggacatacttttgatgtgaatttctctacaagttctcctgtacaggccactaccggcatattgcgtgctgcttataaacctattgcctcattgcccgatccgaagtattattctcattttacgctttccaagttcaaagacggggtattccaactgttgaattatgatgagggggatgtagatatgggaaaaggtgctacgtgggcgaatcttctaaagaatggagcaaaactggattccgggtattatatgttagtcaccggaagccgtatggcaagtggtgcagtgctttccaatatcactttctttaatgtgaaaccggaagcgactaccgatattgaattggtgatgagagaaagcaaagaacaggtacaggtgattggaaattttgattcggaatcgctctatcgtccgttaggagatgaagaaatacaatcaacatcacaaagtattctacaaacttgtggaaggggatattttgttgtcggtgtgttgggagtagggcaggaacctaccaaccatgctttgagagacattgctgctttgggcagtgagtttgagaaatggggtagaaagattgttcttcttttcccctccgaggaacaatacaagaagtttcatcctgcggagtttcagggactaccttctactattgcttatggggtagatatagacaatcgtatccaaaatcagattgctaagtcgatgaatctttctaattcggatattcttcctatgtttattattgccgatacgttcaaccgggtggtctttgtatctcaaggatatactatcggactgggagaacaactgatgaaaaccattcacgggttgtagaaaaatgtaggataggaaggtagtaatgtagtgtgacagaatgcaatattcgttaattctctctatcgggcgcacttttgtgcgaattaattgttacgtttgtaggagagttattatgaagtatctattgtgcatactgtcacttgcatttttacttgttggagtaggtttgttctccaatgaagaagacttgcagggatttcgggaagaaaccggagtcccggttctttgtgacgtctcgcctaccggattttcttcggcacctgcggaacattatgatttcggcatattgactgctttttctcttccaagaaacatatctcctgtccgtacactgaaatttaatgatatacctacgattgtacagttgttgagttctagaactttccgtctatccgaagataaaaggaaaattatatattcagatactgactatttaaagtattccaataggtattatatctataccttagcccatatcttgatttagcccttctttgccataagtattcctgagaatttgtgcaaatatgtttagcaggttcggattatattcattttccggacgtgtcttgtttgtgcataaatgattgtacaactagtttttatattactatgattcatttattattatccacattggctatgatggggttaacctttctcataggcttctttgtcgcggcagttatcaaactgattgcttatgctgccgattcgtttgacttttatagttcccacaagctggagctaatccgccttcatcgctggcggcagcatcgtcagaaagtggagaaacttgtcagacagataccgcttgaagcagaagaagcattgggggattatcgtgaagacttcagccgtggtatcaaccgtaactttaccggttacgccggttattatcatggtgtaagtcacggagcttcggatgaaactctgctggactattattatccgcgggatacccgtgaattctttctcaaggaagaagaacgggcacatatcaacaagaaaaactcaaagaaacctactgctaacaaacaataaaaagacacttatttatggaaaatatagatttcgcgaccttatttcaaggcattggcacaatgatggcgagcggttggttcctcgcttctgccagaatctttctggtacttctcggtttactgcttatctatctaggctggaaaggagtgcttgaacctatggttatgatcccaatggggttgggaatggtagctatcaactgcgggacactgattatgcccgacggcacattaggcaacctttttctcgatccgatgctttcggacacggatgcactgatgaatacgatgcagatagactttctacaacctgtctacacccttacattcagtaacggactgatagcctgttttgtctttatggggatcggaaccctgctggatgtaggcttcctgcttcagaaaccctttgctagtatattccttgctttgtgtgccgaactgggtaccttcctgacggtgcctatcgctgctgctctcggactgactttaaaagaaagtgcttctgttgctatggtaggaggtgctgacggtccaatggtattgtttacttcgctggcattggcaaagcatttgtttgttcccattaccgtagttgcctatctgtatttggggttgacgtatgggggtatccttatctggtgaaattgttagtaccaaaacggttccgtgccattaaaatggtaacgaaaaaggctccgaagaattatgacgctaaagtgaagctggctttctcggctgttctttgtgctgttctctgtttcttgtttccggttgcttctcctttgttcttctctttgtttctgggggttgccgttcgcgaatcgggcatgaaacatatatatgattttgttagtggtccgttactttatggttctacctttatgttaggacttttgttgggtgtactttgcgacgctcacctgttgcttgatcctaaaatcttgaagttactagttctgggtattgtagcactgttgctttccggcatcggagggattatcggtggttatatcatgtatttcatcaaacgcggcaattataatccggtgattggtattgcagctgttagctgtgttcccactacggctaaagttgcccagaagatcgtgagcaaggataatccggactcatttgttctgggcgatgctttgggcgctaatatttccggagtgattacttcggctattatcacaggtatttatatcacggtcattccttatttgtagcttgaatcgtatccataactctccgggcggtagttacgtttcgttcgtattcgtcgatatgtacagtgccgcccatggatactgattcatttttataattcattccgcttttgatgttttcacgtgcagagaaatgaaattcccgtatccctgtttccgaggcgattcgatgaatattcttttcattgacgccgcatcctgcaagtaggataatccttcctgccgcttgctcttgtaattctttgagcaaagggatgcctgattcggcagttggttgttgaccggaagtgagaatacgattgcagccaagtgcaatgatttgttccagtgctttcttcggatcacgacaaacgtcaaaagccctgtggaaagtaacggacaatccttgtgctgccttcattaactcttgcatgatagtaagatcaatttctccttcggcagttaaacaaccaaatacgaccccgtcagctttcagctgtttggccatttctatatctttcagcattgcctttacttcgataggagagtagaggaagtcaccgccccggggacggataatgacgtgcaaacgagttgcatcgagaacctcacgtgctacggagatttctccataagaaggagttgttccgccttccggaatgcctgcgcatagttctacccggttggctccgcctttttgtgctgccagacagctttctactgaattggcacaaacttcgaattgaaacttattcatagattgatgtttacggggtaaaaatgaataatctgctaagtattaattacagtgtatattaaaagagggcgaattgcttcgccctcttcatctattgaatcctttttgtattctgatttttatttagcgaagctaaccgcacgtgtttcacgaattacggtaatcttcacttgtcccggataagtcatctcatcctggattttcttagcgatttcgccggacaggctttctgtctgcttgtcgtcaatcttatccgcaccaacgataacgcggagttcgcgtcctgcctggattgcataagtcttggttacacccggataagacatcgccaattgttcgagatcattcagacgcttgatataagcctctacaatttcgcggcgtgctcccggacgtgcaccggatatagcatcacaaacctgtacgataggagccaacagactcgtcatttccgtctcatcgtggtgagcaccgatagcgttgcagatgtccggtttctctttgtatttctctgcgagtttcatacccagcaatgcgtgtggcaattccggttcttcatcaggcactttacctatatcatgcaacaatccggcacgtttcgccttcttcgggttcagacccagttccgatgccattacagcgcagagattggctgtctcacgtgcatgttgcaacaggttctgtccatatgaagaacgatatttcattttaccgataatacggatcagttcaggatgcagaccatggataccaaggtcgatcgttgtacgtttaccggtttctatgatttcttcttctacttgtttacgtactttagccactacttcttcgatgcgtgcggggtggatacgtccgtcggtcacaagctgatgcagtgccagacgggcaatttcacgtcgaaccgggtcgaatgcggaaagaacgattgcttccggagtatcatcaacaacgatttccacaccggtggctgcttccaaagcacggatattacgtccttcacgtccgatgatacgtcctttgatttcatccgattcgatatggaataccgttacggagttttctattgcagtttccgtagctacccgttggatagactggataacgatacgttttgcttctttgctggcagtcagtttggcatcatccataatatcgttgatgaatgattgagcctgcgttttagcttcttctttcagtgattctaccagacgttcttttgcttcttcggcagacagtccggagattgtttccagtttctcgatttcctgctgttgcagtttgtccagttcctctttcttcttgtcaacaataacaagctgcgcttccaggttttcttttacagcctcggcttccattttcttgcgctgaatttcctcctgacgctggctgagtaccatttcacgctgtttcaatttgttttccgcctgctggatcttctgattacgcagtgccacttccttttccaaatccgcctttttgttcaggaatttctccttcacttccagcagcttgtttttcttaattacttcagcttccgtctccgcttctttcaggacgttgtcgtatttggatttcagtgcataccggaatagtatgtatgaaagtaatcctcctacgatgaagcaagcaattgctgttgctattattgctatcattctacatttaatttaaatatataaataaaaacgcaccgccaaatatccaagcagggctttgcttggatattgtgcagtgcgtggttgtttctctcttatcagcgaatggccggtcgttcttattcctctttaaaataatcttccagcaattcagttagttcttttaccttctccacataggggctggtatcgttacgttgcattaattgcagtttctctaacgagaactgataggctaccatggcaataattttttccggttccagatttttgtatacttcccggtacttattaagcctgatatttacctgcttggcggcttcccgtaccgtttgttcttcctctcggttgatggttaacgggtagtttgagtctgctatttgcaggtttatttttatcttatcgttcatacatctccttctttattcattcaacaaagcgatgcatttatcgacttcacgcactaattttgacaatcgcaacttcgtctcttttacgtcgctgccgttaagggtgattgccgtagctgtctttaggttcgtatagctgacttccaattcatcgtattgagcctgtaccttctcattttttagcttttccatatcaagaagcttcttcaattcggcattttcacgctttaattcatcgtggatatatatcaaatgccgtagttgcgtttcaaaggttttcaataactttttttcttcttctgtcatcactacaccaaaattgtacacaaaaatacgattaactctgatattacaaaaacttttcgggataaaatgttctttttagttcaaaatagtatattcggtatctattgttaatggtattttgagcagattttgtactgtattgaattgtcattttccttctttattaatgaatataggtatgggtcattttggcggaatctgttttgagatgaatgattgtgatattgaagtgaccaacacatcagaagaaaaaatatttatatctttgcaaagtttctagtgacataagaaacagtaatagtaatctatttttggaaacgtattatgttgaagatattagtaacctacgccgtccaaggcgaatttgtggaaataaagtggcctgatgtagaaccttattacatccgcacaggtattggtaaagtaaaatcagcctttcatctggctgaggctattcgtcaggtgcaacccgacttggttttaaatatcggaagtgcgggggctgtcaatcatcaggttggggatatttttgtctgccggaagtttgtagaccgtgatatgcagaagctggcaggtctgggaatcgaatgcgaaatcgattctgcagctttgctcgaagcgaaaggttattgcaggcactggacggagaatggaacttgtaatacgggggatagcttcctgacagaactgactcacgtcagcggagacgtagtagatatggaagcctatgcacaggcatttgtctgccgtgccaaggaaattccgtttatctccgtaaaatatgtaaccgatattattgggcagaactccgtaaaacattgggaagataaactggcagatgcccgtcagggactttccaactatcttaatgtcttgaaagagagaatatgataagtgacccctgcggcaatcaaccccaagagaatttttacccatagcagaggaatgaggaagaagatgcaatatagcattgttccccacatcagcacaagtgagataactttggctcggagcggaattgctttattctcgcggaagttacggatataaggaccgaagtgccggtgattcagtaaccagttatataatcgtggcgaacccttgaaataaagggcggctgtgagtaacagaaaaggagtcgtgggcaacaacggcagaaagataccgagaatgccgagtgccagggagatgcttcctaaaatgatacagagagttttcatgcagcaaagatagtgtaaaaacaggaaaaaaacatcggatttgctgaatggaaactctttttatattacctttgtcattgcatcgaggtgacattagatgcgtataacctaaaaaaagacgtataacaatgtttacagtaatcaaacgtttggagatatcggcttctcataagctggtgctcccgtatcgcagcaaatgcgccagtctacacggtcacaactggattatcactgtctactgccgttcggcacgactcaatgcagacggtatggtggtagatttcacccgtattaaagaagtggtcatggaaaaactcgaccaccagaacctgaatgaagtactcccgttcaatcccaccgcagagaatattgcccgctgggtgtgcaaacagatcccgcaatgctataaagtagaggtacaggagtcggaaggcaatattgtcatttacgagaaggacactgtaaaagacaatgcctcgaatgatgtaaaagaccattcggaagataaggaagaataaaccatagcggacaaaacaaattagtgaacgatgagaaagattaatgaaatcttttacagtttgcagggggagggatattataccgggactcctgctattttcatccgtttctccggatgtaacctgaaatgtagcttttgcgacacacagcatgaagaaggaacaatgatgaccgatgatgaaatcatcgccgaagttaagaaatatcctgccgtaaccgttgtccttacgggaggcgaaccttccctttggatagacgacaccttgatcgaccgcttgcatgaagccggtaaatacgtgaccgtagaaaccaacggtacgaaccccttgcccgaatctgtcgactgggtgacttgctcgcccaaacaaggcgtggagctgaagatcaaccggatcgatgaagtgaaagtagtctacgaaggacaagatatcagtatttttgaactacttcccgccgaacattttttcctccagccttgttcttgtattaatactgctgatacggtggattgcgtcatgcgacatcccaactggagactcagcctgcaaacgcacaaactaattgatatccgctagacacataggcggatgtagcagaggatgcttataatttttacataatatattatgaaagtaggtttgtttattccttgttatatcaatgctatttatcccaatgtaggggtggcatcgtatagactattgaaaagtttgggagtagacgtcgattatccgttggatcagacctgttgcggacagccaatggcaaatgccggttttgaaggtgaatcggctaagttggcgctccgttttgacgacctgttccgggagtacgattatatcgtcggtccctcggccagttgtgtggcttttgtgaaagagaatcatcccggtattttgaagaaagaagggcacgtttgccaaagtgcgggaaagatttatgacctctgtgattttattcacgatgtgataaaaccgtcgaaactgcctgcacgctttccgcataaggtcagcatacacaacagttgtcatggcgtgcgcgaattgtttaattccgctccgagcgagttgaatatcccttattacaataagttgcgtgatttgctaaatcttgtggaaggtatcgaagtctttgaaccgagccatattgacgagtgctgcggcttcgggggaatgtttgcggtagaagaacaggcggtatccgtctgtatgggacgtgacaaggtgaaagaccatatagctaccggagccgaatacattgtcggggcggacagttcctgcctgatgcacatgcaaggcgtcatcgaacgggaacatctgccgattagaattatccatatagtagaaatcttagcgtcgcaatcatgagtaccagacattcaaaggctgccgagaaattcttgcaggacagcaaaatggcagcatggcataatgaaactctttggctggtccgtgccaaaagggataagatgagcaaggaagttcccgaatgggaggaactgcgcaacaaggcttgtgagttgaaactatattccaacagccacctcgaagaacttttactggaatttgagaagaatgccaccgccaacggagcaatcgttcattgggcgaaagatgccgatgaatattgtgccattgtctacgagattctgaacgaacataatgtgcgtcattttatcaagagcaagtctatgcttgccgaagaatgcggactgaacccctttttaatggagcgcggcattgacgtcgtggaatccgatctgggcgaacgtatccttcaactgatgcatcttgaaccgagccacatcgtcctgcccgccattcacatcaaacgcgagcaagtgggcgaactttttgaaaaggaaatgggtacggagaaaggaaacttcgacccgacttacctgacgcacgctgcccgcaagaacctgcgccaccttttcctgaatgcggaagcagccatgacgggcgcgaactttgccgtggcctctaccggtgatatcgtggtctgtaccaatgaaggaaatgccgatatggggacttctttcccgaaactgaatatcgccgccttcggtatggaaaagattgtgccggatttggacgctttgggggtatttacccgactgcttgcccgttcggctaccggacagccggtgaccacctatacttctcattaccgtcgtccccgcgaaggcggtgaataccatattatcatcgtggataacggccgcagtaccatactttccaagccggatcacatcaagacattgaactgcatccgttgcggtgcatgcatgaatacctgtccggtatatcgccggagtgggggatactcttacacctactttattcccgggcctatcggaatcaatctcggtatggcacatgacccggagaagtattacgataatctttccgcctgttctttgtgcatatcctgctccgatgtctgtcccgtgaaagtagatttggcggaacagatttataaatggcgtcaggatttggacggactgggaaaggcgaacaccggaaagaaaatcatgtccggtggcatgaagttcttaatggaacgtcccgcactgtttaatgcggctttgtgggcggctccggtgataaacggtctgccccgctttatgaagtacaatgatctcgatgattggggaaagggacgtgaactacccgaatttgcaaaagagtcattcaacgaaatgtggaagaaaaataaagtacagggaaaggaggaaacaaaatgagcagtaaggaagaaatattagcccgtattcgtcagaataccggaactcgttacgagaagccggacattgcagctatgaaacggttggcttatcccgataagatagaacagttctgtgccgttagccgtgcggtgggcggtacggctgtcgtgttgggagaaggagaagatgtaaatgcagtgatccgcaggaactatccggatgcgatgcgtattgcctccgtcttgccggatatttcttgtgcaacgtttaatccggataatctggacgatccgaaagagttggacggaacagatgtggcagtgattaaaggagagataggtgtagcggagaacggtgctatctggattccgcaggaagtgaaatataaagcgctctattttatctccgaacggttggtgattctgattgaccgtaataaaatagtaaatacaatgtatgatgcttatcgtgaactggacgggcaggattataaattcggtacgttcatctccggtccgtcaaagacggcggacatcgaacaggcgttggttatgggagcacatggggcacgggaagtattggtgattttgacatagctccggttcatttattccagaatctatttgatttaaaaacaatgagcccgccttaagtcgatagtatctacaattctcctccttctggaaggaggagtacccgtagggggaggtggtaggtgaatacatgaaccgcatattatcaacattgtgtaactgcctgcctgccaccccggccttcagccctccctcttttccgaaaggagaggaatcagaactttaaaccagattgagccatggaagcgtaattttgttaggacaagaacaaacagaacttccattaaaaaaacagaggttctgttctttctaaaaacagagcctctatttagtgtaaacagagccttcatttcactgaaacagagccttcgttttccctaaatagagcctctgtttggagagagtgaaaacaaggattccgctcttctttcgcatcgataagaataataattgtctaattgtaacaaatatgtatgcaaataaagtaaagaaaatagctgccgttcatgacctttccggtatggggcgtgtttctctcacagtcgttatccccattctgtcgtctatgggttttcaagtttgccccttgccgacggcggtattgtccaatcatacgcaatatcccgacttctcctttctggacctgacggatgaaatgcccaagattatcgcccaatggaaaaagctgaatgtgcagttcgacgctatttacaccggttatctgggttctccgaaacagattcagattgtttccgattttatcaatgacttccgccatgaggacagcctgatcgtagccgaccctgtactgggagataacggcagactatataccaattttgatatggaaatggtgaaggaaatgcgtcacttgataaagaaggcggatgtggttacacccaatatgaccgagctgttctatttgctggataaaccttataaagcggacaatacagacgaagaactgaaagaatatcttcgtctcctgtccgacaaaggtccgcaagtcgttatcatcacaagtgttcctgtgcacgatgagcctcacaaaacctcggtttatgcgtacaaccgtcagggaaatcgttactggaaagtaacctgtccgtatcttcccgcccattatcccggcacgggagatactttcaccagcgtgattaccggttcgttgatgcagggcgacagccttccaatggctctagaccgtgccacacagtttatcctgcaaggaatccgtgccactttcggctatgaatatgacaatcgggaaggtatcctgctggagaaagtgctccataacctggatatgccgatacaaatggccagctacgaattaatataagagaaatcagatgaatgcaagagaaatcaaaactctaccgtaactcttgtcggaaggtcgccggacgtccacttcggaccttctttgacaagccggattgcttctttgtcggcagattcgcataacccgtgaacgacagtgatattctgtggccttccttctttatctacaaagaaagagaggactacttctcctttcacatccttacatgactcgtcattcggacgaatcagattttcttccagatatttcttgtatttgcgcttacctatcaccggttgcggcgtcttgtatttttcttttgcctttaaatttatttttgccgtagcaccggcgacgttggacttcttctttttgccataccccactaccactacttcactaagtgcttgttggtcttcattcatggctatcagcattgtccggctggtatctacgggaatctccaccggttcgtaaccgatgaactgtgctgtcagttgcttgttgcctttttcttttttcaatatgaactcaccgttgaggtctgttactgtaccaatattcgtaccggtatatgctacactggctccgatgataggttctcctttttcatccgtcactttaccttttatcaggttcaaattgggggtggctgctttggctgccttcaattgatgaacttcggaaagtgaagtatccgtatccgctactattctttcctcttgtatatctgtccgcccgacggtttcctcaataaccggcgttattgctaccggtgcactttgagtttttggaatagatttgctcttggctactatatctttcttatccgttggcgtcgcagtgacttcgtgagtggaatcctgctttatcttagtttctgctaaagaagaaatttcttctttcggactaataggttcaaataccgctgaaggaatctcttctttagcgatgaatacatcatccgtcatcctctttttaaggaacaggaaataagagctgataccgataccgattaccaggcaggcggcaatgctccaagtgacagcatacgaattctgtttctttgaaagattccttttctttgtggcacgagccgagacctgcatccgcagttgcccgattcgttgttcatgatttccctccacttgaccatatccgtccatagcatcggccagaaaagggtctttcatcgactctttctccagtcgatgtgcctcttttcctttgcggagtcctcgtatgtagtctaatagtttcatagggcctgtttcttgatacaattttttaagtttcgctttccgttttggatatagcttttcacattgttcagagtaaatccggtctgttcgacgatatcggcatacgacatttcttctaaaaagaaacgtgtaatgctggtccgttgttcttcgggcaacttttcaagacagtgttgcaatgccttcagttgttcctccgaactttcctcttcacttaatagatgcagaaattcgtcggattccataacgttgatcgtataatctaacggaatttctttgttttcttttcgcagaagttgcagacaatgatttttggctacccggtagagccacggcttgaagacttttatctcgtagttgcccgttttcggcaataaatcttcaaacaattgcatcaccgcttcctgtgcacggtcttcatcttgcagatatttcaggcaaagtccatacagtaacgggatataacggttgtatagctcaccgaaatattccgtatcaccggactttgtataatgtgtcagtaattcctcgtccgatagttttgatatgtttcttttgaaaaacaaaactgtttttgttgccaaagatagggattgggactaaatatagcaactgtcggaagaaaaataaaaaaaacttcaatcggtttatggaatctgtgtgaaatctgcatctctatatcaaaagcgaattaatagtaacattttaaaacgataaagttatgaaagcaaatcaattcagagcaatgatgctcgtactgctcatggcagttgtttctttaggtgtggtgaacgcgcagacgctgactgtgacgggtacggtgacggatgttgcggacgggactccgattgtcggttgttctgtaatgctgaaaggtactaccaaaggtacggtgacaaatgtaaatggacaatatgctattcaagcgaagaaaggggagacgttgttgtttcagtttatcggatacaaacaagaaagcagagtcgtcaaatctgccagactggatatcaggatgaaagctgatgaggttgcgttggaagaatgcgtggtggttggctacggaacccggaagactaaggctataacaagcgcttatatggcgatatgtcctacacctgcgtatgatatgtgtgtgaatacggaagaatatggttcttttcaggaaaatggcttcaaagaggtggcggatgcagcgctttctactttctccattgatgtagatgcagcttcttacagtaatatgcgtcggtttgtcaataaaggtgagttacctccggtagatgctgtccgtacggaagaactggtcaattacttttcttatgactatccgaaaccgaccggaaacgaccctgtgaagattacaatggaagccggagcctgtccttggaatcctgctaaccgtcttgtccgtatcggactgaaagcaaaggagattcctacggataacttgcctgcctccaatctggtatttctgattgacgtgtccggttctatgtggggagccaatcggttggatttggtgaagtcttctcttaaattgttggtcaataacttgcgtgataaggataaagtagccattgttacctattcaggaagtgccggtgtaaaacttgaatcgacttcgggcagtgacaagcagaagattcgtgaagcgatagatgaactgacggcgggaggttcaactgccggtggcgcaggtattatgctggcttataaaatagcgaagaagaattttatctctaatggtaataaccgtattatcctttgttctgacggtgacttcaatgtaggtgtttcttcggcagaaggactggaacagctaatcgagagagaacggaaaagtggagtgttcctgactgtactggggtatggaatgggtaactacaaagataaaaagattcaggtacttgccgaaaagggaaatggtaaccatgcttatatagataatttgcaggaagccaatcgtgtgctggtcggtgagtttggcgctacgcttcatacggtggcgaaagatgttaagttacaggttgaatttaatccggcacaagtacaagcgtatcgtctggtaggttatgaaagtcgtctgctgaaagatgaagatttcaataatgatgcaaaagacgccggagatatgggcgcagggcacacggtgacggctttctatgaagtgattccggtaggaggaaagaatacgtatgcaggaaaggtggatgaattgaaatatcagaagaaagaaaaagtgagtgtgaagcctaccggttctgacgaacttctgacagtgaaactccgctataaggctccagataaagatgtcagcaggaaaatagaacttccttttgtggataataaaggtaacaatgtatcttccgatttccgttttgcgtctgccgtagctatgttcgggcagttactccgggattctgatttcaagggtgaggctacttatgacaaagtaatcagtctggctaaacagggattggatcatgatgataaaggatacaggagagaatttgtccgtttggttgaggctgctaagggaatacagcaagagaaataaatatatcctgttagtataagtaagttctctgtttgaatggtgacagacatataattaagtaatcattgatattgttattggctagtaagagttcgggaggatacaccaacgaaataactttggcgatatcttgccgaactcttttctttatagatttccgcttcccgcctttctcatcaattcccaatataaataggtgggttgttttatttcgcttttctctatcagtggaccgagttgttcggcaaagtaactaatcatggcattgggtgtttctatttcttttaatcccattgataccctttctttacttcactttttaaggccggtccgaattcgaatcccatttgttcgaaccattcttttcgttgaaggatgttttggtggaaccgggtaaagtcaagtctctctccctgataccacatttgttctgccaatgccaagatacggggaaacagacgtcggtctatcattcgttctgtaactccgtcgtcagtccacaaagcacaagtcatgccaagaattaaagggtccttttggttgatcgccttgtcggaaggattgttctgatatatgtctttcaggtcgaaggtacgtgtattggtatatcctctccaaggagtgaccgggaagttcagatacgtataataattggaactgcaaatgactggataatggtgtttaattgcattccgaagtgctagctctttgtgcccacggtagttccaccattgaattactatgttgtccggtaacggatatccgtcatgataaactacatccccccagaatatggcctttcgtcctttcgacttcagataatccgccatttgtgccgaaaaccataattgcagatcatggctatctttcagattcattgctgcaattctgttttggcaatccggacatttgtcccaattacctttcggggcttcgtctcctcccaaatgtatatagggtgaagggaaaatagcgcatacctcatccaatatatttttcaggaaatgtaggacttcttcttttcctgcacaaaatatattttgagtaaatccgtgctgtggtacttcaacaggttgaccgaaacaaccgagttccggataagcggaaagtgctgcttcggcatgccccggcatatcaatttcaggaacgacggttatgtttcgttcgctggcatattcgataatttcctgtatctctttctgtgtataaaatccttgttgttcttctccttttcctaccgagcctcctatctgtgcaagacgcggatattgtttgatttcgattcgccaacctagtccttcggtcaaatgccaatggaaataattcattttaagtaatgaaaccatatcaatatatttcttgatagtggatattttctggtattgacgtccggaatctagcagaaaacaacgccatggcgtacggggagaatcggaaatatcagcacaggcgaaggtgagaattcctgttgaaccagtaacccattgccgcaaggtttgtactgcatgagtgaatcctcttttatcagaggcggctatcaccatttgtcgcggactgatatttatccgataaccttcgggaggaagtgaagaatcggtcatccagcggatttcggctttagatgctttcttcgtccatttgacagaagcgttatgaagtacttctgtacggaaaagacttaaataaaaagttgtggtatcttcagcgtatatggaaatcttttttcttaaagtcaggtagcctttttgcatttccacttgattgggggaaggaaatacaatttgcccacaggcgataactgcaaatgatgcgagaaagaaaatcgttaggaatagatatttcataagatatatatgtgtttatttggatttcgtaagtaaaataagggaataacttgcacttattcaagtcctaaaagtacaaatctattccaaaaaaacaattattttttgatataatttacgaaatcagagaaggataagaaagaactgtccgttataataagtacttcggacagctctgattgattaaggtctatctattggaacagatttatttaatttttgaaacgtcccaattttaatgggacactgatgatgtacttcaatataagagataaaaccgcaaacagtctcatcaactatttgcggttttatctctttgcacgggaggagaggctcgaactcccgacacccggttttggagaccggtgctctaccaactgagctactcccgtgtttgcggctgcaaaggtagtagaaacttccgaatctgcaagcgttagggtaaataagttttgaactattttaatttttcccactcatcgggcttgaaaccgaccaatacaaagctgtctgttactactagtggtcgttttactaattttccgtttgtagcaagcaatgcgatctgttcctcctcgctcatgtttgggagcttttcgctcagtttcagttctttataaaccaaaccgctagtgttgaagaatttcttgataggcagaccgctacgcggaatccatgctcttaattcttctattgtaggattttcttctacgataagtcgattggtgtattcaatgttattttctgttaaccacttcttggctttttggcaagtactacatgccgggtattgtaaaaacagaggtttcatacgcaatttattgtttaatgattactattacatatatatatttaagaaagaatttgcaaatcctgatacataatccggtaagcagtcgctttcttgtctaatgccaatgggtatgcccgtgatgaggaaggcattcggtagagccgcatggcgcgaccttcgaaaataaattccgagtaatcgccgactttgggttcctctatgttgaattgttggcggagagtatctgtggctttctgtcccgtagtgacaatagctttacattcgggaagttgccggagcagtgctgtcacgtcagtagcttccactacttcgagaaatttatccgatgcattatcttgtaatcggcgaatagatgaagcggtatcgaacaaagcaattcccttttcattcagaaaatcaataattcgttcgcggcaaaatgctttccgtgtctcattcagaaaataatccttgtcatcgaagaataaaatcccgaagatgcgccacatatcattattgaggttcggataataaaaatccattgaccaacgttttttttgtggcggaaaactgccgagcatgagcagctttgctttcgcaggaagaaacggttctaacggatgtttttcgatttccatttttatgtatcattttaatttcctacaaaaataatgatattgttcatttccctcaaaatcaagataaaaaattactatatttaaaatatttagttatttttgtggcataatgaatacacgatttattagaatatcattgaaaaaaagaatttttataagttattgtcttataggattattcttttttcttggagagaactgttacgcttcaaagcgaccggtgtttagggaaacggtgagaaaagcctctgctgataattcaacagtaaggggacgtgttgttgatgtcagtggtgaaccccttattggtgcaacgatacgagagaaagggggaacccgtggaactgtgacagacattgaaggaaatttcatcttatctgtgccggatagtgcggtcttgcaagtttcttttgtggggtacgagagcatagaagtcagtgtagggggtagaaagacacttgagatacagcttcgtgaaaatacagtgatgcttgacaatgtgattataactgctcttggtcttgaaaaaaaagaggcttctttagcatattccattcagaaagtgaaaggggaggaactcacccgtatgaaagaggttaatatgataacagctcttgccggcaaggctgcgggagtgcagataaataaaaattcctccggtataggaggttctgcgaaagtgagtcttcgggggattcgttccgcatccggtgataatcagcctctttatgtcatagacggcgtgccgatgttgaatatcggtactgaacaagcttattctgcaatcggtggtactgcaaatgccggaaaccgggacggaggtgacggtatctccaatttgaatccggaggatgtggaaagtatcagtatcttgaaaggtgctccggcagcagctttgtatggaagtcaggctgcgaatggggttattctgattactaccaagaaaggtaatactgccggacagaggaatattcatttctccaccggattgacatttgacaaagcattcagtcttcctaaaatgcagaactgctatggggtgagtgatgttgtagatagttggggagaaaaaacgtatctgcctacctccaatgaactgaatgatttttttcgtaccggattaacttccattacttccgtatccgtcaattatggaaatgaaaagatacagacttatttctcttatgccaatactaccggacgtggtattgtagacaagaaccaactgacaaagcataacatcaacctgcgggaaacagctgtaatgttcaatcaacgtctgaaattggacggtaatgtgaacgtgatgcgacagattgtaaagaacaaacctgtatcgggaggtttttacatgaatcctctggtcggcctttatcgttttccccgtggggaagatttgtcttattataaggataattatgaaatatacgatccggaacggaaactggggatacaaaattggcatacttttacagaagattttgagcagaatccttattggatacagaaccgtatacaaagtaaggagacacgtatgcgtagcatcatctctctctcagcgaatttgaggataaatagttggctgactgtccaggctcgtggtagtgttgattatatatccgataagatgcgccagaaattttatgcttctactgctcccgctttatgtggggcaaacgggcgttatattgaaatggattatcaggaaacgttgatttacggtgatgtcatggctatggggaagaggaaatgggaggattttgcgttggatgtggccattggtgggagtatcaatgataaaaatgtcaattccacccgttacgattccaagaatgcttctttgaagtatgccaatgtgtttaatttggctaatatcgtaatgaacggttccgccagcattgaccagaagatagattcccgacgccagttacagtccgtatttggtacggcacaagttggctatcaggataaggtattccttgatttaacagcccgtaatgactgggcatcgactttggcatatacaagccatgagaaatccggattcttttatccttctgccggtctttcttttcttatagacaaatggatacaacttcccgaatggatttcttttgccaaactacggggaacatacagtaaggtaggtaatgatattcctcagtttatcacaaactccgtttcacatattactgctgggggagagctccaggcgaatgacgctgctccttttaaggaaatggaaccggaaatgacccattcggtagaggtgggtacggaatggaggttcttccaaagtcgcttaggcttcaatctgacttattaccgcaccaatactcataatcagtttttcaaacttcccgcccttgccggagatatgtatgcatacaggtatgtaaatgccggagatatacaaaaccgtggttgggaactgaccgtagatgccactccggtacttactccggattttacatggaaaacatctttgaatttctcgtccaatagaaataagatcaaagaactgcatgaagaactgaaagagttagtttatggaccgagcagtttctcatccagttatgcgatgaagttggtgaaaggtggttctatcggagatatttatggtaaggctttcgtgcgtgatgccgaagggaatattgtctatcagaccgagggcgaccataaaggccttccggctgttgaaggtgaagggaatacaataaaggtgggcaatgccaatccacgttttataatggggtggaaccatacattctcttacaaaggcttcagtctctacttcttgttggattggcgttatggcggcaagatactttcgcagacacaggcggaaatggatctctacggggtgtcccaagtgacagcgctggctcgtgacagaggatatgtaactcttgaaggacagcagatagacaatgtgaaaggtttttataagaatatagtgggcggacgtgccggagtgacggaatattatatgtatgatgctacaaatcttcgtttgcgggaagtctcactgaactatacttttccgaaaaaatggatgcagaaaacgaaagtgctgaaagatttgcagcttgctttcgttgcgcgtaatctttgtttcctgtataagaaagctccttttgacccggatttagtactttctaccggaaatgataatcagggaattgaagtgtttggtatgccgacaacacgaagcctgggctttactgtgaaatgtgaattctaaagatacgggaggagatgatgaaaaagaactatattcatatatacttattggggatactgttgctttcggttgcatgtaccggaaaattccgtgagtttaataccgaccagtccggcattacagatgaagatctgataattgacgacaatggttacggaatccgtttagggattattcagcagggtatttactttaactatgattatggcaaaggcaagaactggcctttccaattgacacagaacttgaacgcagatatgttcagcggatatatgcatgatgccaaaccattgaacggaggttctcataattccgattataatatgcaggacggttggaacagtgcgatgtggacacacatgtattcgtatattttccctcagatttaccagtcagagaatgcaacccgtgatacacatcctgctttattcggtattacgaaaattctgaaagtggaagcgatgcaccgtgtgacggattattacggacctattatctacaagaattttgcagatgcagggaagcattaccgtcctgatacgcagaaggaagtttattatgagttttttaacgaacttgattctgccgttgtcgctcttaccagttatgtggaagcaaatccggaatctaatggattctcccgtttcgatattctgctggacggcagatattcttcgtggattaagtttgccaattccttgcgtatgcggctggcgatgagaatttctgctgtcgagccggataaggcatgtgttgaatttcaggaagggcttaacaatgaatacggtgtctttgaggccgaaacggaacgggtggctgtctccaccaagtccgggtatactaacccgttgggagaactcaaccttgtttggaacgagacttatatgagtgcttccatggaatcgattctgactggatatgacgacccgcgtattgctgtctatttcgcaccttgtaccgacgaacagtttaaaaacacatatcgcggtatccgtcaggggacgtgcttttcgcattctcattatgccggattgtcaaaactgaccgtaacgcaaacaacggacgctcctttgatgacttcatcggaaatttggttcctgcgtgccgaagctgctttgcgtgggtggacggacgaagatgaagaaagctgctatcgaaacggagtaataacttcctttcatcaaaatggaatttatcaggtggaagattatctgaacagcgaacgaatggctttcgattttgaagatacgtatgataacggcaacaatatcgaagcccgttgtaaagtatcaccaaagtgggattccgaagctgataaagagataaaactggaaaggattatcacgcagaagtggattgccatgtttcccgaaggttgtgaagcatgggcagaacagcgtcgtacgggctatccccgtttgttcccggtgcgttataaccatagccaaaacggatgtattgatacggaaattatggtacgccgtctcaacttccccggcacattgcaaacggaagatcccgaccagtatcttgctcttgtagaaaccttgggagatcctgatgacggaggtacacgactttggtgggatgtagaaagtaatggcttggactaaaaatctgttgtaagaatgtgtatatgtgtgccgatttaactaattttgcaccttcatttaaacacattcgtcatgaaaacaatcatctctactatttttctgtgtgtattgctttcttttataccggaactgcgggcacaaaacatacagttacattacgactttggccgttctttgtatgacaaagatttgaaagaacgtcctttgttaacgtctactgtcgagaagtttcatcccgacacgtggggaagtacttatttctttgtcgatatggactatacctctgagggtgttgcctccgcctattgggagatagcccgtgaagtaaaattctggaaaggacctttctcggcacatcttgaatataatggtggactggcaaaaggattctcttacaaaaacgcttacttggcaggagctacttatacctataacaatgcttctttttccaaaggcttctctttggcagccatgtacaaatatatccagaagcataaatcgcctaacaatttccagttgaccggaacatggtatgtcaacttctgcaataatctgcttactttctccggatttgccgactggtggcgtgaggaaaccgattacggaaaaacgatcttccttaccgaaccgcaattttgggtaaatctgaaccgcatcaaaggaataaacaaacactttaatctaagtgtaggttccgaagtggaagtaagtaataacttcggtggtcgtgacggattctatgtaattccgactctagccctgaaatggacattgaattaatttattgaatacatcaattattggatgaaaacagatttaatttacggtgtagaagaccgtcctctttttaaggaagctttgtttgcagccttgcaacatttactggccatttttgtagccataataacacctcctcttatcatagcaagtgccttgaaactggatgtagaaaagacgggctttcttgtttccatgtccttgttcgcttcgggagtttccactttcgtacaatgccgtcgtttcggtccggtgggggcgggactgctctgtattcagggaacaagtttttcctttatcggtcctatcatagccacgggattagtaggtggattgccgttgattttcggttcctgtatggctgccgctccgattgaaatgattgtcagccgtacattcaaatatcttcgcaacatcatcactccgttggtgtccggcattgtcgtactgcttatcggattgagcctgataaaggtcggcatcgtatcttgtagcggcggatattcggcaatggataacggtactttcggttcgtgggaaaacctgtctatcgcagcattggtattattgagcgtattgtttttcaatcgttgcagaaacaaatacctgcgcatgagctctatcgtgcttggtctttgtttgggttatggattggcttttgctttgggaaaagtagatatgagttcgctgaatgttgaaatgctgatgagctttaatattcctcaaccttttaaatatggtgttgaattcaatgtttcgtcttttattgccattggtttagtttatttgataactgccattgaagcaacaggcgacgtgactgccaactccatgatttccggtcttccgatcgagggtgattcatatctaaaacgtgtttccggcggtgtcatggcagacgggttcaattcttttcttgccggagtcttcaattcctttccgaactcaatctttgcccaaaataatggtattatccaactgaccggagtggccagccgctatgtggggtattacattgccgcaatgcttgtcttgttgggattattccccattgtaggagccgtattctctttaatgcccgatcccgtattgggtggtgcaaccttactgatgttcggtaccgtagcagctgcaggaatccgtattatttcgtctcaggaaatagggcgtaaagagacattggtattggcagtcagcctctccttaggactgggtgtagaattaatgccggatgtcttgaaacaggctccggaagcgatacgaagcatattttcttcaggaatcaccaccggaggccttactgcaattattgcgaatgtcgtaatacgcgtaaaagagaactaacttggcgtaatacttaaattactcatcttttctgtcgtccggaaggggaaatcaggatactcgtaaagactgaagcgaggttcggtttcccctttcgtatagctccatattgaagcataatcttccgggtcttcccccatttttcctaattggcgtagataagcagccaacgacttattctctacgatataaatttgtcccatttgattgataatcggactatgatgccgtgtaccgtcgtgttcgaaacataggatacgttttccttcttccgtaagtcctactaactgaaaagtcatacttttaccgatagccggcagattcagcacactgcgatcggtagcaaggaagggcaggcgatgttttctcatgaaacgtcttagttgcttggcaacatcctcttgtgtttcaatatccgcacctactttcgtttccagtatcctgtacagttcttccgcttgttccggagtcatttgaccatatatcttttcttcctgttgttcttgcattgaacgactgttcggtgcgaatactgcataattttcattgaatccttttacagagaaagtatagtaacatacaactcccaatgaattaagtacctgtcggagtcgtgtcgtatgtccccggcgcgaagcagccaccgtatacactaactggttcgtaatgatccaccccgcagaaaggattttccggattgcctctttcgcttcgggggtcacctctagcggtgtttgaaaatgggtctgaataataaactgcttgacaccaattgctgaagccttttctttaaattcgcgtagaatttcaaccagttcatcattaatacgcattggcagataagccaataaccgtgatcccaaccgtacccgttgcagttctgcatacttctctccttcgggcctttcaagatttgctctctgcttgcggactgccattcgatacactgcttccagtatatgtcgtagtgtcttattctggctcatcaatgcgtcaccacccgttatgagaatatcccgtaattgtgtatcctcttcaaagtaagtcatcaaccggcgcaatttgcggtcccatgattccttcgggcgtaaagtctcaaattcgaaatttagccgttcgctttggaagtcatacatacgttggcaagaagcacaaagcccgccgcaagcccgtcccattgtatcgggaataagaattgccacctccggatagcgtcgatgaatattatgtccgtccggtaaaatccaccccgcagcattcggttttcccgcctctacaatatcttccttttcccatgcacgaatatttccatacgtttctaccaatcgtggtgaataaagaatataacttcggattgcctcgtcattatacccgtatcccgtcacattaagtaatgataaataataaggagtggcaaaaaaaggcatcccttttttacgggcacggtagagtagatacattgtttccgaagaaagcgagtttcccagaaaacggttcagctctcccggactttttaccgccattgccaagtgaaaacgaaaatcattccaccattcgctcaccaaccggtatttctcctcataactcattccctcctcaaaatgaaaacgaactgaaggtttcgacttcctgttttcaatcttctgaatcagtaaatgtaacattctctccttgttttcatcgcgaatctctctcacctcttcgtccagtccggtttcccagcggtcatttcggctcttgatacgttgaggtgaaggtagaggaaccgtttcttctttcagccttttgaacagctgaaacaattcaataaacaaatccgtcggcatttccatattttccagcgtttccgtcagaaacttgtagagcagtcgaatagtctgtactgacatatcctgtcccgtagacagttcatggacatgctgtccatcataatggagtaagagtcgaatttgctccctcgcctccttcgcagtatcactctttatatcacaagtttccgaaaaagtcagtaattcagccttaaagtcctcaacagtagtacttttttccgctatctccactagttccggtagctcttgattaaagatttgtttcaactgtgaaaaagtaagtgtaagcaatttcttttgtttcataagcgatctatttctttttgtaggttcataaataaggatgatgcgtcaattttcatagagcctataaagataacaaaaaaagcggaggaacagaacctccgctttttctatcgttcaattctttacgaatctttttttctttctaacatttcggacagactattttttcgtctccgtgtcgtcgttcttccgtttcggttctttcttggcgagaagaacgatattgtaaacataatccgtcatccattgttcggagtatccgagacgttctttgtactgacggacagccatagccgtcttgtgcacgtcgtcagccttccataccgttttggtacatacgtcatgaaccgttttctgcgtcattccatacagtgcctttttgaagatagacggcatacggaatttccactgcatcaagttacccattaacatcatcaggtcattcgagaacccctgatacataaataagtaagattggatatcattctgtgtgcggcaattacgttttacggatgcatcgatttctttgaagaaattatcgttcagtccgtagtcctgcatcagcattttgcgtgaggcggacttctcacccagtcccagtttaccgttttgtgtaggcactttaaacagacgtttgaagttagccacgtccggcaaaaagcggatattggtgataccaaggtttgtggcgataactgactggaaataaacccgggtcagtgatatgaaatcttctacattgccgacttttgtttcatcggattttttcttgaataaaccaaataagcccattgttatattaatgattatattatttacaaattactatttgaatgagtggaaggtgtgtcccctgactcccacatggcaatttgtgtgcaaaggtacaaaaacagttgggtttcaccaacattccaagtccttttcgatgtctggcattatctcttttttgttgggcgagttgtacactgttggcggaaccgtccaaatatccggtattttttgtggctattcgttcttaattcggaagtaaaacttatgattttcgaatacaggttccacaatatcataacggacaaatttggccaacagatgttcggcggcccggcgggaaagtcccgttcggcggcagtagcggttgagtgagagtaagttaccttgttccagttggtcgagcaagagttgttcccgttcggtataacggatcagttctccccgtggactgtcgctttgttgccatacacggaggtggataggagttgccagtatattttcatctttgatgcggaggtaggcgagaggctttccgttttcgtctttggcgtataccggtttgtggggtgtttcctcaatggtagctactaatacttgccggccttccactatatatgtctgcatggtatattccacttcggggatacagtaaagttgtgcggcagcttcaatcatatatttctcttcttcggagcgtacgcctgctatttttccgttgtctttcacgccgataagcaatcgtcctccgtcggtgtttgcaaaggccgataatgttttggctattttgcgtgcgtcggaaatttcaaatttgaaatcctgttgctgatgctctccttcagcaatcaatgcatgtatataatcggtatctgtaagcagtttcatggctacaaaggtaggtaaaaatgatgaaaagccttttttttaggtatttttcaaagattatttcaaaaaaaatattgtttttatgcgtttatttcgggaaacagtgtatttttgcggcacattattaacgaaaaaataaaaggattatgaaagaattggtagaaaaggtagcagctctttatgctgacttctcaaaagatgctaacgctcagattgaaaacggtaacaaggcagcaggaactcgcgctcgtaaggcttctctggacattgaaaaagcaatgaaagaattccgtaaagcatctttggaagcttctaaaaaataatattagaagtctgctaagatattagaaaacaaggagagggtatatccattcgggtatgccctttttctatttttggcaaccaatcttttaattgtttttgcatggatagttactattatttaggtagaaaggtgtatctttgtgtgtggcaacctcaaaaattataaatatatgagtaataggatttatcctatcggtatacagaactttgaaaaaatccgtgtagacggttatttctatgttgataagactgcgttaatctatcaaatggtaaagacaggtggctattacttcctgagccgcccgcgtcgtttcggtaagagtctgttaatatccacgcttgaggcttatttttctgggaaaaaagaactttttgaggggctggcaatggaaaagctggagaaggattggataaaatatcccgttattcatctggatctgaatgcaaagaaattcgatacggtagatgatctgattcgtcttgtcgaccgtcagttgctggtatatgagtctcagtatggctcatgttctaaagatgtgacgatagacgaccgtttggtcacccttattcgtttggcggcggagaaaacgggacagcgtgttgtgattctcgttgacgagtatgataagcccatgttgcaggctattggaagagatgagttgcaagaagagtattggaatacgttgaaggctttctatggtgtgttgaagtcaatggacggttatattaagtttgctatgttgacaggtgttacgaaatttggcaaagttagtgtattcagtgacttgaacaatcttgacgatatatctatgcgtcagatatatgtggacctttgcggtatcagcgaacaggagcttcatgataatcttgaaagtgaattgcatgaattggcggatgcccagggagtaacgtatgatgaaatatgcaagaaactgcgtgactattacgacggttatcattttacatataactctatcggcatttacaatccgtttagtttgctcaatgcattcaagtatcaggagtttggcagttactggtttgaaacgggtacacctacctatttggtcgaattattgaagaagcatcattatgatctccaccgcatggctcatgaagaaaccactgccgaggttttaaatagcatagactcaacttccgataatcctattcctgtgatatatcagagcacaagaaggtgcaatcgttaatcctattacagtgaaaattaaagtgatagctactacaggttggggagcaccggagaatgctgaaacagaattgactattacatatccggcaggttcaactaaataattaaatatttagaaaccgggatatcgacaaacttcattgatatctctcgtcattcgcttattcccattatggacttatcggagcgggagatatctttgaattaataattcaagtttcgtaagtgctgcattccgcatggattatactgctgagaattataccgcagggaattataccgcaggcttcccctccttttgggaaggaggggtgcccaaagggcggggtggtaggtagagataaggtatattccttatttcttttaaaaaggtaaactcattatttttcctaccacctccccctacggggactcctccttcccgaaggaggagaagctatgcaggatgcttgcgaaagtccgggcttttcaatacttactcttcgctccaacacttttcggcgtcgaagcaaggacaagccttgatccattcctccggttcaatctcaccgttgccgttgaggtcaggactcaggtcacgatgtccgcagacacgacatccgggataatccctcaataacgtcaggataagcacacgcaaagaatgtttctgccacggtgtccgggtatctttgggatgtccctcgttgtccagaccgccctcatagcagataccgatactttcactgttgaagccacgggcgtgcgcaccgatgcgttcgagaggacgggtcgatttgatgtccccattcttgcgaatataaaaatgataccccacaccgttgaaaccacgacgacggtggcaaacgtccaggtcgtgctcggtgaaactcttgtcctcacgagtggcggaacagtggacaacgatcagactgatagctctcatgcgttgccgttatttcgttggatacactctttgttgacgcattgcagggcaatagcttccgacaacttacctttcagcgaaaagatttcggaatgcatctccttcacacggtcgctcaggttgaaataatccttcaataccttctcaagctgctgcatgaggaaattgtactgctctttcactaattcgctgaattctttgacttcctgcatcatctgttgacgcttcttgcgacctccgaaaaaaggaaggacggtcatgataatatcaatgattttgtctaacatcttatttaattaaaatttgaatattgaaagttgaagattgaaaacagaaaccgcatggcgtggaaccgtagaagtcggctcctgaagccatgcgggactgtttttcgggttttatactgacgggtccggtgtcactccgcctccgcccggtttctcctcacccgaaccaccctcgtccggatcgctgccgtcgcctttaccacccaatgcgaacaccacattattatcgctctgcgtgctcgtgtggctcgaattgattaacttcagcgccttatcggcaacgaaacggacattgacacggcggatactacgtaccgtgcaatccttcttcacctccgtaccgtcactggtcaaggtgatatgaaacgttcccaacccgtcgattttcactttatcgccctgagtaagcgacaaccgcaactgctccacaaatgcttcaatggtatgcttcacatcccctgccgtaagcgacgacttgctttcaatggcggcagccattgtatcgacatccatgactcttacattgccggctttctggcgaatgtaatacaacatcggagcatcctcctgattcacatacttcctacgctgatagcgttctactaatacatccataaaattaaaaagttaaggtttagataaataattctataatctctttctgatactacaaatatacaaaatccaagaggcgaagtcaagtaatcaaccgtttattttctctatatttataaaataatttggcagatataatagttgataatctattatttactgttatattatttatataaataaccaaaactatttggcgtatttattcaaatattccattggaggaacatagtcataaaattttgtaatagactgattatgtccgaaatacacatttcccgtctccccgttacgttgcttggcaacgatagccacacccagtccctctgtcgggtaaccgctttcgcggtcggtcggaatatgcagcatagccggtcggtaaaggagtataacgatgtccgcatcctgttcgattgctccgctttcgcgcaggtgcgccagttccggacgacctccgggacggttctccgattcgcggttcaactggctcagcagcacgacggggatatgcaactcctttgccagcaacttcgctttgcgggtggcttgtgccacctcctgttcccggttccggttgacctgcttggtgctcatgtcgcaaagttgcaggtagtcgatgataatcatgtcacactgcttgcggcttttcagcagccgtgcgctcgaacggatgtgatccatgctgacggaagaactgtcgtccacgtagataggcagttgtgccagtcccgaggcggtggtgcgtgcctccgctacctcttggggattgggaatcccgttgcgccaccggtacgggttgatgttgcaggcggccattagccaacggtccccaaggcgttcgccctgcatttcgagactgtacacggctactgcgttccccgccagagccgcatggcgtgccaggtggagggcgaaggccgttttgcctaccgagggacgggcggcgataacgatgaggtcattgtcctgtaagccacctgttttcttgtccagttccgtcagaccggtgggaatgccggtgacgccgttcacgctcttggcgatgcgcctttcggcttcttccattgtgtccgccataagggtttccatgtcgcggatgtgggcgttgtggccggattcaccttcgagacggtcgaggaggttgtgggcgtctatgagagtgtcgtcgatgtcgatcgtctcgtccatggcacaggtgagcagcttgttgaagccgacaaccatttcgcgtgccaggtatttctggtgaatgatttgcgcgtgatattcgatatgtgcggaggaggcgactttgctgctcagttgcacaatggcatacggtccgcctatcgcatccagatttccgcgacgggcgagttcttccttgacggtcagtatgtcgatcttcttgccggcatgatacatcgccatgagggcggcgaagatcagttggtggtggtcgtcgtagaacatttcagggcgtaacttgtccgctatgagcggcaacgcttcctgctctatcaggcaggcgcctatgacggcttcttcgagttcgggtgcgtgtggttgcatattctttgtctttttagtccatatattcgttcagaaaagccttgtctttcaggtaagtggaagcgtgggcgatgaagcgggtgtcgttggtgtggtagtagacgtcctcgatgcggtctattgccagttgttgttcctcgcgggtgagcttgttccattcgcggcggccacgggcgacgttgactttcggcttccgcatcacggtgtggtatttgtcccagaaaaggtcgaagtctgtggagatttcttcctttcgggcgtctttggcttccgaagggatacgtccggtccaaagatcaaagttggtgatacggatatggagtatcttttcctgatgagggatgaggtctataatgcctcctttggccagtcgttgaaagaaacgggtggttttggggcgtgtccagccgaaaatattgctccagtggtgatagctgataagggagtcaccgcgtttgcatagaatgattgtcccgttgatgtcgtatggcacgtcggaataattggtgtgcgccaggatttggagaaatgcttctgtctctccggcagcgccgtcggttgcttgtctgtttagtaatgcccgggggatagtgatgtaaccttgtttgagagatgatgtagttaattgtttcatgaattgaaatggtttattgttttacactcgttgttgaatgcggtgtaaatataaggcgatatttcccgtcggcaaaatagcgttggacgctgttggcggatatggacggcggtgtagtatttggacggaaagagccggtaataaattgtcggtattgatagggaaggagagaaaaacgaggattttgcccggtcaaggcagaaccttcgtttcagtgaaacagagccttcatttcggtgaaacagaggctctgtttaggggaaatagagcctttgtttagggaaaatagaggctctgttttcgggactgtgaccgtgccaccaaccgtgccgccctctttgtgatgataaccgtttgtatatgagggttttgcacgggtgctgaaaaacggggcgtgccacgaaccgtgcatatataaataaaaatatatattattctatattatatagttcgctcaactcattttttccgtgttttgcctacttctggttttccggtgtttcgtcatgaccgtgcagcttaatctcgggaggtccccaggtggtgaaaagtatgcactgttgtttggggctgaggcgtgcggtcttgtgggtgtagtgcgtaggctttaagtccgcgagcaattgcgcgtcgttctctatgtcatggcgcattcttttgattgcagcgtcagtgctggtgtactctggaaagtattctactgctgctatggagaaagatttgaaacctttaatactccattcatcctcatcgtcaatctctttgacttttttcatgtttgtaaaaattaatatttaattagttggtgtgattctctttgaatccctgcaaaggtagttaaaaaataattgttgtgataaaattataaatatattttgctttgtataatatataatgtaataatttatatatttattatttttctttttgaagcatagcttcccgcctcttaatttttgacttattttgtacttatatatttgctaaacttttttttctgccggtttctcaaattaaattgtatatttgcgaaagaatcggagaagtaatcagaagaaccgaaaaaagggggtcatgaacgaaaatgtcttagctaaattgaagatactggcggagtctgccaagtatgatgtttcctgttcttccagtggcacagtgcgttccaataaaccgggaatgctgggcaacacggtgggaggctgggggatatgccacagttttgccgaggacgggcgatgcatctcattgctgaaaatcatgcttaccaattattgcatctacgattgtgcctactgcgtgaaccgccgcagcaacgacctcccgcgcgccacgttttccgtctcggaactggtagagctgactatggagttttaccgtcgcaattatatcgaaggcttgttcctcagttccggcgttgtccgcaatccggactataccatggaacggctcgtgcgtgtcgccaaagacttgcgcctggtgcaccgcttcaacgggtatatccacctgaaaagcattcccggtgccagtcgcgaactggtaaacgaagccggactttacgccgaccgtctcagcgtcaacgtagaaatccccaaagaagaaaacctgaaactgcttgcaccggagaaggatcataaaagcgttttcgccccgatgaaatacatccagcagggagtattggaaagtaaggaggaacggcagaagttccgccatgccccgcgctttgcgcctgcgggacagagcacgcagatgatcgtaggagcgacctccgaatcggataaggatattcttttcctctcgtcggcactctacgggcgcccgacgatgaagcgtgtctactattccggatacgtctccgtaaatacgtatgacaagcgtcttccggcattgaagcagccgcctctcgtgcgtgaaaaccgtctctaccaggcggactggctgctgcgtttctatcagtttaaagtagatgagatagtggatgatgcgtatcccgatctcgacctcgaaatagatccgaaactctcgtgggcgttgcgtcatccggagcagttcccggtcgatatcaacaaggcggattacgaaatgctcctccgtgtgcccggcatcggtgtgaaatcggcgaagctgattgtcgcttcccgccgtttctcgcgactgggattttatgaattgaagaagatcggagtggtgatgaagaaggcacagtatttcattacgtgcaaggaactgcctctccaaatggcgaccgtgaacgagctttcgccgcaacgggtacgcagtctgttgctgccgaagccgaaaaagaaggtggatgaacggcaactgttacttgattttggcgaatgaattgaactttgcgaatgaatgtctacctctacgataaaaccttcgacggtctgctgacggctgttttcgacgcttacttccgcaagacttttcccgatgcgctgctgtcggaaggagacgctttgccgttattctgtgacgatctgcacaccgtagtcactgacgaggagaaggcggcgcgtgtgtggcggggattgcagaataaggtttcgtcttccgcgcttggctgtctcacgcagagttggctgtcggagcttccggaggtcggtattcttattttccgttatatccgcaaggcgattgatgcgccgcgctctatcgaaacgaattttgccgatccggacgtcctccggcttgcacagatttggaagaaggtggacggtgagcgtgtgcatataatgcagtttgtccgttttcagaaggcggcggacggcacgtttttcgcggctttcgaaccgcagtataatgctctgccgcttacggtgcagcatttcaaagaccgctttgccaatcagaagtggattatttatgatatgaaacgccgctacggtttttattatgatttgcaggaggtgacgctgatttccttcgatgacgacagccgcgaagctcacctgataacgggaatgctggacgagagccttatggataaggatgaaaaacttttccagcaactttggaaaacgtacttcaaggctatctgcatcaaggaacgtatgaatccgagaaagcacaagcaggatatgcctgtccggtactggaagtatttgacggagaaacaaaaagttgtacctttgcagatcaaaacggatttttaaccctgtgagtaagagaaggatgaagaaaaggatattttacattatcagctttctggtaatattttgtatagaggtattgatagctttgtacatacgtgataattttgtccgtccttacattggagatgtactggtggttgtgcttgtgtatagttttgtccgtatatttctgccaacggggattccgagaatgccgttctatgtatttctttttgcctgctttatagaagtgatgcaatactttcagttggtggaaaccttagggattacgaaccgggcggcaaaaattattctcggatctacgttcgattggaaagacattgcctgctatgcggtgggttgcgttctgattttcttgttcgagcgtatttgtcaaaagagtttataataacaggtcttttataaagaaataagagaatgtttaacaagtcggtagtatcttccattcccctccttcccggaggttgtgtaaaaagtaagcatcaagtgttctttgacatattgtataaaaaaggaaat

SEQ ID NO: 2966 - DNA, 571 bp, Unknown
  gut microbiota DNA sequence
atacttttacaatgaagagtttgatcctggctcaggatgaacgctagctacaggcttaacacatgcaagtcgaggggcatcagtttggtttgcttgcaaaccaaagctggcgaccggcgcacgggtgagtaacacgtatccaacctgcctcatactcggggatagcctttcgaaagaaagattaatatccgatagcatatatttcccgcatgggttttatattaaagaaattcggtatgagatggggatgcgttccattagtttgttggcggggtaacggcccaccaagactacgatggataggggttctgagaggaaggtcccccacattggaactgagacacggtccaaactcctacgggaggcagcagtgaggaatattggtcaatggacgcgagtctgaaccagccaagtagcgtgaaggatgactgccctatgggttgtaaacttcttttatatgggaataaagtggtccacgtgtggatttttgtatgtaccatatgaataaggatcggctaactccgtgccagcagccgcggtaatacggaggatccgagcgttatccggattt

SEQ ID NO: 2967 - DNA, 19860 bp, Unknown
  gut microbiota DNA sequence
ctaaatatattcctatataattgtatacattgaactttttcttatttttggaccttattatataagacgtgtaattgtttcatcccaaatacttgactgattatgaataaagacttaagaaaagtagtgattctgctggcacaccccaacatcaaaggatcacaggcaaacaaagcattaatcgatgctgtcagtgacattgaaggagtggcggtgttcaacctttacgaactgtcagaggacattgctttcaatgtggacgaatggagtaaaatcatctccgacgcttcggccgttatctaccagtttcctttctactggatgtctgccccgtcattactaaaaaaatggcaggacgaagtgttcactcacttgtccaagactccggctgtcgcgggcaaaccgttaatgatagtaacgaccaccggctccgaatacgatgcttatcgtagtggcggacgaaaccgattcacaaccgatgaacttctacgtccgtatcaaggcagtgctattcattcgggtatggcgtggcagacacctattgttgtttacggaatgggaactgcagatgcaggaaaaaatattgccgaaggagcgaattcatataagcaacggatagaaatgcttatcaatagcagtaacgcagggaataattggtaaaacaataaaaagcgtagctttatccgtcctaaagctacgctttagcatccctaaagcactgctttagacctcgtaaaccacttcttcttcagcgtcaataccggcaggaaaataaaaactccaattaccgacataaccaatcccccaatcgtacctgccgccaacggaaaccagaaaccttctttctccgcacctatcatgaaaggaataaatcccagaatagtggaaaccaccgtcaggaaaataggaatcactttcgtgttccaggctttcacgtatgcccggagcggcgagagacacgggtaacgtttacgaatagaattatattcgttcaggatatagatactagcatttactgtgataccgcaaagcagaacaaaagaagcaaaacctccctgatcaaaattcagtttgaaccagtagaatgtaagaaacactccgatataagacaccggaatcacaaaaataatcgctaacggctgtttcaaagaattgaacagaatactcgtaataaagaaaatgatagcaatcacaataagcaacagacgatattgcttattgtcctttcctccccacgaccagttattgtcctccgatttggcagtatatcccattggaagaatctcattaaattcctccagatctttcttcaacagcttatgcccctgttccgaagaaccgatatactcatattgcaggcacagccggtactgctggttttccttggctacttcctgcggcatctgccctttttccactgttgccagttccgacagtttatattcttttccgcctgccggaaaaggataatactgcattgcccacacatccctttcttccgactggcgggaagacaattttattttttccgtaccttcttccgtcgtcaccgaaccaatctccatattccgtccatatatcggtcggatagcggaaaacaatcttccggctccgatattttcctccgccattcggagcttgtccagactgaaataaaattccatataatcatccttccaccacgagaagtcggaaccgatcgttacttccttgatgcgacggtgagacaagaacttctctttcagttgttccgcccggtcatacagttcgtcataattatacccatacattttcacccggaatgaacccgcactctcacgcacattattactgaatccttggtcctgcaatccgtaaatactccaatctcctccacccaattgaagtgccttgtttatcatattagctttcagcgtatacgggaaaccgctcttttggtgctctttcgtgaaataaatatgaatagatgccctgcgtgcactttccacagacgtctggaactgcttgatttctttaaattcgctcaagtaagtttccattcgcttaatcaacgtattcatctgctccagcgtactcccattcggcaaattggcattggcatgaagcaccacttcttcattacgcgtaaaataacttccttcatatactttctgtacaaaaagtcttaaagctcctcccaatgctttatccactaccggttttaccttctctttatacgtagaagtacccagtgtcttattataaaattccgcccatttatcttcccccttcatcttttccggcaacagaaataccggtaatccgaaagccagcaacaataaaatgcagaccgccaccctccaccggcaaagaatccgtatcagccaactgtaaaaacggctgaaatataccggaaaacgatgcattttagaacgtatccacataaagaaacgtatatttcccgacttccacttcgcacctgaaagcgaagattttttcctccgcttcaatccggttttgtcgatcagggaaggaacaaaaaacagggcaaccagcagtgataccccaagattaataatcactaccgcagcaaaatcctgtaagttcaggcgtatcttctcatcgaggaaaaagataatgaccaaagcccccattgtagtcaacgtagccgccagtacggacataaaagccttccggtttccacgccgcagataatggtcgctcatcacaatcgtattgtcaatcaccagatttagagaaaccgtgatacctgccagagaatacaactgcatttcaagtccgaatgcataatagaagataacggctatcgctacattaactgccagactggttacaatcagaaacaaatacttcggactaaaagtaatcaatagcacaaacagaagcagaatcgctaccgtcacccccgttcgcagataaatcttccccagttcttcctgaataaactccgttgcatcatagctggtatgaatctcgtatcccgccggaagaagtaaccggatatcatccatatatgctttcacttccttgctcaatgccaactgattggccgtttcctccgccacgacagacagatagatagagttcagaccgttaattcggtagtaactttgcggctgttcctccacacgggaaacttttaccaattcattcagaccaatgattttgccatctttcatcttcacctgtatccgttccgcatcaaagtcccggttattatattcgggaaccagcgccagacggatccattgcctgcccgaactcccctgttccatatcgtatgtacccagaaactctttctggtaatgcaaccggacagcctgacggatatcatccgtacttatcccaagcgtatgtaactgttcggagtcatattccaaccgccattccattggagtagccccgccaagattaatcttataaattcccggaagttgtgccaaacgtgtcttaatatgttcttccgcatactgttgtatcagaatgggaatagcaggcgcattaatcgtaaatgccataaaagggccctggttgttctgccccggactctgcatctgaatatacggatagctcaccccgtccggcagttccggccatgtctgacgaatgatggtggacgcttcaaaacgtgcaactgcaacatccacatgtttatccagattcacgctgatactgccccacccgtttcctgaagtagaatagataccccgaatccctttcacgcgggcaagcatcgcctccagtttgctggtagctgtcatttccaccacgcgtgccgaagtgccgggcatactgaaacgcaccgtgaagccgggtaatgtccgtgaggggttcagtttgaccggaagcaacggcacaagcgccagcccgaccaatgccacgcagacaaaagccacaatcagggtgaaagcggaagccttcgaggacttttttatttcaagacttatattttgcattaccattatttatgtaaatagaaatctctgtcatataagcgacagcatctctgtttatgacagacttaatggagatactaccgagaataaacgccgcaattatcatttgatcagcttgcctccgttaaaatcgaacctgtccgaaagtgaaagttttgtagcaaaatcaaacaacgtaagccgtcgtatcttgtaataattcaaccagtaattctgcaaagcagagataaagttacgctgtgcctgctgctgcctgttcagagaaagagtcaggctgtttatatccgctttgccgatgataaaacgctgctttgtctcattataagcgagtatggacaaatccaaagcttcttccgtactggcaatcaattgttgctggatattaaaatcactcactgtcattatcacttcctcctcaatacttatctcgtcctggcgtgccgaaatcttcaccacattcaggttatttcgtgccatattatactttcctttgcggacgccccagtccagcaacggaatagagacactgaccgccaccaaatcctgctgcatgggcttatgatagacatccccgaaattgtccgccacctgattaaaaccgatactggcattcacacttgcattaaaacgcgactcctttttagtcttatccacattacgctccgcttccagcacattctgtttcaattccaacaattgcgggttgttgctccttccccacctcaaagcctcatctatcggaatctccagcattcccggacgggaaggaagttccagctcgatctgcgtattcttatccagattgagaaaagaagccaatgagaacatagcccgcttcaaatcgcttgctttattctgcaatgtgttctgcgcattcacccgatccagcttcagagtcaacaggtcggcttgcgagatagctgcgatccggtgccgttgttgcccgatgcggtacaacgtatccgtagaagccagattttcttttgccaggttatattccgcttgtgccatagccagagagaagaaataactcgttgccgtttccgaaactttctccacattataaagaaattcctttttcacacgttcatatttcaaaggctctatcttccgttcccatttgaatggattataccccaccagactttgcgaatacccaatccttatcgggacactggtcagctgtgtcgcactattatccccgaaattacgcatataggcaagattcgattccagataaaatgtacctccggtcaggtcaagattctgccggacacttaaccctccataagcataataagactgttgcgtacggtacacatccaaatcctgtcccgaatcgtaacgtttcgtaatatcccggttatattgcgccggagtaagatccagcgtcagactgggcaggcggtttgccttatatgtcctgtactcccaataaccggacaagtacatattctgtgtacggaatgactccaatgaactgtcattggcaagagcgattgtccggttcaaatccagtaccagacgtttctgtgcatgaagcagggattcaccacagaggacactaagaatacagagaaatgcccatatccttttctttgctgaaaagaataactttgtctcctccgtggtaaaatttaataatccattcataactctcatatttgaactattcgttattacttgctacttatttcttctttctttctgtaaataaaccagtaaagcaatggtatgatgaacagactcactgccgtaccgaccgacattgtccctatcatggcgatagacaatggtttctgtaattccgaacccatatccgatgaaaacagtaacggcaccattgcaaagatagtagtcagcgaagtcatgataatcgggcgcaaacgcctgcgtcctgcttcatggatagcctccaacaacggaacacccgctttgcgcagttcattgatagcgtccagtttcaggatagagtcattgattacaataccacaggtgacaataagtccgatagcagacatcagattcagtgtatgcccgcaaagccaaagcagtaataacgcaaaggccacatctatcggtatctccgccaaaacaagcaaaggttgcaggaaactttcaaactgcgaggcaagaataaagtacatcagcaacaacgaaataaacaggattaccaccagctcgtccaacatctccctgttggaaaagaaacttccggagaagcctgtatcccattctttcgtttcctccgctacctgcttcacttcccgcatcaacttgtccccgttctgcacgtcataaaaattaaaggggacatattcaccattacgccccgaagtaatacttttcagatcctcagcaggagctatcgtaaccagctcccgaagagggatatattctatgtttcctttattatccggttcagtctgtatcaacgtctcctgcaatatttcattcacagtcttttcgctgccggcaacgctgatcggaagatattgttggtaagaatgcaacattgtcacactattctcacgaaaagcagttttcaagatacggtagagctcattataggaaacacggtaaagcaacagtttctctttgctaatacttagattcagttgattctcgaaagcgatacccgtaggggcgattcccgtcttccgtgccaagtccttctccacgcgccggatggtttccgcttccggtgcctttgccttattacgggtataaaactcggctatgatatccggttcgcctgtgacaaagagtttctcaaacacagtctccggcggagagaaagaaatgacggaaagcggataacgctctttcagtctgcgataaatttcttgctgtaaaggagaaatagtttcgggtgtctccgtacggaagtaaagttcagcctcggaagaagaaagctccctttcacggttcagaaggaaatcctgcctgccaatggacgccgtgtgctcggctaccggttcttccagttctttaaaaagttcgtccacacgcctcctgttttcatccacatgaatattctcattccactcaatcctggcaatcaattcattctcctcaatatcgggcatgcgctgcttgtcgataaagaaaaagaaaaatacacaaagcggaatggaaatagcacagaacaaaacactgaacgttttatgactgaatacccagtccacccccgcatcataaaaacgatctaatgtatgatcttttatcgggttattgaatttaaaggaaagccacttccatttccgggtatggataccggtccggtagaccagcagataaagtacgggaagcaacatgatacccgtaaaataagaaaccataagtcccactgtaactgaaaaagcctgatcgtaaaagatagctccggcaataccactcataaaaatcaacggcgcaaacacggcaatggtcgttaaggaggaactcaacatgggagtcaccacttcgcttgttcccgtgatacaggcacggcgcaacgaatatccccgttcccggtattgcgatatattctcagttacaataatcgaactgtcaatcatcatacccaatgccagaatcaatccggcgagtgaaatgatattcagggacatattgcacagatagaagaaaacgaaactgattacgatagaaaccaccatgctaagtccgataaccaacggagattttacatcccccagaaacaagaccgctaccaggcagataaagagaaaacctaaagacagattctgttgcagattcgaaattgtgtagtccagcaattccgtctgattacggctgatactgaaatcaatatccggatatacccgttggaagtactccatcgtctctaccagagatttcttcatcttatccatattctcatccgcctgcttgataacagccagcgtcactgcccttttcccgttagatacagatacccctttttcttttacgggcacaatattcacccggcagaaatcctttaactgcacaatccggtctcctttacgcagataaatattttttacatcttctacagtacgcaggagggtggaaaactttatgttatattcataatatccgtcacgtaccgtcatactacccggttccacattattggcagccagagtcgattctatatcctcaatagaaattcccaacatggagagcatatcctcatcgggcacaatctgcacctggcgttccaccaatccggtcacatctaccatagccacttcttcaagctgctctatcctacgtttaatgaccgattcggcaaattcacacagatccagaaaggactgttgtcccgtaatgctataagcactgtcattcttcaaagtcagattcaggtaaaaaacaggtatatccgttgcgctcgccttaatgactttcggacgttccgtttccttcgggagatagttcattgcagcgtctatcttttcattgacctcgataaaggccaggtccgtattagtaccgaaatcaaaagacaagcggataataccggcgccgtctctagactcactgtgaatatctttcaatgtagaaacctgtatcaactggctgcgcaaaggtttcacaatcgtattttccagttcgcgggcagatgtattggcagcagacacctgtatagtgatctccggaatagcgatattcggaagcagagatatcggaagtgtagaataagtcaccagcccgattataaaacaggcggtgaaagccatcagcacggcaataggacgctggattaaaaattttatcatgcttttctctgtatttatcgtttgcagtcaatcattcaccgcttatagtcacctccgtttcatgcgctaaattcaagttcccggtgacaataaccgtatctccttccaagaggccatcttcaacacctccctgagatttatccgagataacatattccgtagcattctccaatcccgtatgtacataattccacattgccttgccttcttttaaggtaaacacaacctgtttgccggaacgcagcaccacagccgttttaggaatgaccaactgctcccctaaactccgcttgacgcttacccttacgttcatgccgctaaacaacttcccctgtccgtttaccgcagcttttacttttaccattccgttcgcatccaccagcggattgatttcagatacactaccttcataagaacctccgccggcataaggagtaatcattactttgtcaccggttttaataaaagccaattcgttctccaacacggtgaaatcagtttccatcccacgagtgtcaatgacagtacaaaatgcctcggacgtattagcgagattataaggttttgaaaacagattagctactatcccgtcaaagggggcaacaagtgtagcatgctccgtttctcttttcgtaagttcatactgggacttcgactgttcatagccgctctttactttcgcaagtttcatggtttcttcaggcaccttgctaaaatcatccggcgtatatccctgcccgataagtacatctttcagttcaagctccgctttcaacaaagcatcttccgcctgtgataatttctgttccagacggaatttatccagctcggccaacttctgccccttacgaacacgatcaccgtttttcacatagacatgagcaataacctcattcgtttcaaaacgaagatcagcctgcccgcgggcacttaccttaccgttactgactagttcgtgatgaaaatcacacctctttagaatttgaacggtgacttcattctttgaatccggaagaacggtagaaacacctttatcctgctcgtctgcatcacttttcttgccagagcaagatgtcattccaccataagctaaacaacatagcagcatccatatataactgtattttctcataatatatttattgctatcgattatgcattataaattaatccctctattggactcagactttatttatgcccgacaatcttattcttgttattcttttgtattttttccttcaaatgatttaaatataatcgtgttatatcctgttgatttttactaggaaaataaaatgaggtcattcgcccctggttatttacatatgcaaaaaatcgttgactcaatcctgttgttcggctacttggaaactccagaaattcctcggatatatttgtgaatctaaaattactcaatttattttttaaaagcatcatattataacgattattttcataagccggcaatattagtattttatttttcccaaaactcttttgtatattattcatatcccttctatttatttccgtcttttcacttatataaaaagaaatagcagaaacagacataactgaaatacaaacagttatgaaattatttaaattcataatagagtatcaatggattagattcatctcttaattttcttatactttctttattctttagtttatcagatatataattctctttctcaaaatactgcaactcagaaaaacattcaggagtaacataaaaatatacacccaacgaatcactacaaagaaatatcggaatatgagaatagtcaggcttaatagtaaacaatatatcatttagtgttttctcataaacaagtgttctcccacttttaatatcatgctgaacctgttgattagactttctcatacattcaaaaaatagctggtctttatatttataaatatgggaaatatgctgtattttaccttgtttgttaagcctatttattagagaaagaatatttcgacttcttacccgaggatcaagagtcagaagcttttcatcttctaatatatctttttttaaaactatcccctcactttgaatagccatatatggagaaattctctgttctttaatagacataatagtatccattaaacccatgataaacaaatcttcattcttgccaacattataaaaaacattgccatgaataagttcatcattccaccctttattatactctgatgcatccatccattgtgcaattctttcccctgacttgacatctacttgctgtagtaaatagtatctatcttcttttgaaggttgaaaaaaagtctgtgctccatataagcatccactattataagcaatgtaattaaaatgaatattcttatccataagaattcctcctttaaacttacctgaagaaatatcatacctatatatcttattctgtaaagaatcaaagatatacagttcattatcatctatattaatcgtaaaatcatcacaagatacatattcatcaggtgccaatcctatattgccaatttttctcataaaagtgccttttctatcaaatatataaactccttttgtagaacggctatccaaaacaaacaattgactcttgtaaatctgcattttatctattcctcccagcagtgcgtctttttcatccagctcaattgcagtcactgatttgaaaatatccgaatacttaaattctgacactttggtactatccaaattcacaattaatacagggctgcttctatctattattttgttctcagacagacaagaaatagctatatagctcattgctatagcacaacatatatagcatatcttcattataaatatcctaatattattcatactcgtcattatgttattgatttgaatattcgtttccaacgtattttcccttcattatcagtagatttccaaataaaagatgcccttccaacaatatattcttccggcaacaatccccaataacgagaatcctgagagttaaacacccgatctcctgccataaaataatagtttgtacgaaaacgatagctagtaatacgatgatgatccaaataagctttttctcctttccattgaagtttcttctgctgttcccattcgataagatgacgataaagaaggtaattcttccggttcatcacaatgacatcattcattcgaggtatataaagtggaccaaaattacaaacgttccagtgaatagaatcgttccacggataggtttggaaagaatatcgttttcgagcattctccggtaattgttgtagacgttctttcatactgtcctgagattttatattacccaaatctttctcatagcctgccacacaataatgatagttatgaatagaaatagagtcaccgggtaatgcaacacaacgtttcacataatattttaaaatatcaaatccaatactatcccgatgttgaggataaggaaaattgaaaacaagaacatcatttcgttttatgccccccaaagcaggcaaccgatagacaacaaaacgttcctgacggaaagctgcagacaaattaaaaagtcgggcacccatcggaagtttgttcacaataatgttatcaccaggtaacaaagcaggcaccattgaatccgtaggtactttgaaggaggcaaacaagactgtttgtagtagtatccaaccaaggaacaagattgtaattccccaaatgcaccctttcatcaaacgcatcaatagtaataacagctttttcatcgacttatcattttttttacttcatctctcatttcacgaatagcagacgattgtattttcggttctttcgtcaacacaatttcgaccatttgttccaatttatcaggttttcgaaaatccggttcagcatagagttttgctaacagataatatggataaatacgtcccggtaaacgatgagtagagcgcagaaaccaatgttcagcttcttcatatctctttaacgccttatagtttttgccaatgacattaagtatcatcggatcgcaactgattcgttccgcttcttgtaatatccgattagaagcattgtattctttcaagttatgcagacaacgtccatactcaaaaagaaaacggggacggccattcagaagcggatatagtcttccatattcttctttcgctttaccatatgcctgaatactatacaacattttacattgtgaccactcccgacaagcgtcatacgcattattccgtaccaaccatacacctacactgccgatcacaaacgtaaatagaagcatcaacttatgtgaatagtccaagaagcatgcaattaaaagaagaataaatgcaatgataaaacaaggatacgtcattggataagaagaaaaagagaaaaaaagtaatgaaattaatcctccgcagataccgatacgtttctttttaattccccgatacaaacaaccacctattatcgttaacacaagtaccaaaaccggaataccacactctactgctattcgtagatattcattgaaagcatactccgggctaccagctacacgttcctcatcttcatcataactaccttttgcaaaatatttctcctgctcttgtccataagcataaacaaagttcccaataccatacgcagaaatgggcttcttaaccacagccaaactacttattttccacataaacagtcgtcctttagctgaatcagccttcaaatgatagattccaatacctcctgttatcaaaataacggaaagcaaaagtaaagcaactaccgcttttccatgatactccttccaagcttttttcaaccaatttctccatggatagtgtacactacatacaaatactcccgaaaagatggacgccagccatgccgaacggctcattcctgccggaagtacacaaacaagtaataacagcaccccaaaagataaataataccctaccgattctttccaagtacgttgcttttttatagcatttaatcgtaaccattcgtacaaacatacaggaaataccaatgccaaatagccggaatatggtccaggattataaaaagagcctgtcacagcatataatgaatgattagaagtagcgaaaccgtaaatctgacgcaatccccagactgcttcaataccacccattaaaataagcccccaaatcactgaatgatagaaaaaatgtactccttttgctgataaccctaccgctaataatacacatacagtaaatattatagaaacccacccacaccacagccattgataagaagtatccccggcaggaatataggaagaataggcacaaacggtacttagtaatccgattactcctattgaaatcaaagcgatagaagcctgtgtttttatccgcaaaaattgtattctcgtcatcttcattgatctagtaaattttatttttctgcatttccctttattttaataagtattggagatgaagtcgtattacaatatatactaatcgttttgttaaaatgcccaggatgctcagcttgataactgatatgcaatgtatcgctcttacctggtaatattggttgttttgggtaatctaccacagtacaaccacaggatgtagtcacatcattaatcaccaaaggaatactccccgtattttggatgttcagactctttgtttgcttttcttcccacaagaaagactgcatatccaaaaccatttgatctattttcagagaagtttgtcgtccttcattattattttctaaagatttattattcgaaagaattttcagatataaatctcttaccttattattataaataggattaccaacagctacaaccttattattctcatttaaaagaaaagtctgaaaatccattctctgtagaaagtggttcagtatattaagactatcttgcttatctatgcataccggattattaaataaagccatttttaaagtatggtggagctccatacccttctttggaaaaaagaaaaaaaggaactgaacagaatcagcactagttgaatcaacctgttgcataaacttcttccaatcagcgagccgcaatctacatccagtacatccagtagaatcggtatataccaaaactttgtattggtcttttatacaaaaatcaacagtgtctttaccttgaatagtaaaaactgtatgtgaaggaaatataatttctttttgttcccattcttttaataacgcagctagttgctgcttatttcccttacaggaaataaacaataatgctaaaaatcctaaaaagcaatacttcattactagaatttatttagttcatacaacaatacaagcaatagttccttcacttgtcgataaaacatacagttcccaatcgtgcactatagaatgattacccaaataacttttttattatctatagcaatcatgatatttcatttttgatcctatctctccaactctttcaacgaattgaccaataacctcacctgcggaaaaaaactgtttaaacatagaacaacctgaaatagaatatctatcataacagatatgcttatcccccactctctccacctccgtcattttctccagccaatgcttccaaattagccaacgttacatcagacaattttatatctccatgagaattatatgcagtataaccagcaaacagtacaactgcaaagaccaacattattccaaataatttctttttcatattatcgtttcatcgtttatattataattcaatgagtccactttaaaaagtggactcaataagtaaatttaaagaggaagtttataaacgtatatcttatcttcaatatccttattaacagcataaagggtatgatacttattagaaacgacaaaattgctaatcttcttatctaaagaataccgctcaactagttcaccattccatgtccatacttccagaattggctcttcttcttgtttagtcaatacatatatatatttattatcagcacatggggggtaaggataataagtaattttctcttcgttatctaacgaagagttagcatgctccaacactatttcattcaacatctcaccatgtcggttatagattctcatcatcttaatatatacataaaaagaggcaaacatctctccatcaggtttagaaacagtcaatttattatatacaaaattattatcatcgcctttatcctttttcaataaatcaaatgggtaatcgctgaattgatgagtatcctgtttcttatccagtaacgtatattcatatttatcatcttgagacaagaagcaataagaactatcagctaaaaaaaggaaacgatttagtggcatttggtttactttcaacctctgttctgagattaatttaaaagtacccgatgaatctattttcaattctttcactctatttgagggtaattcaaaaactttaaaaccctctttagattcaacaaaattcctatctaatatcaaaaagtcattaggtccctgtccttttacccccgcattaaacaaatattggcattctggtaatttccagaaagagaacaaagtatctttccgttgttcgtaagcaaccaacatatcatgaactataaataaacgtgtcacagacaacaataccggaggagttgttatactatctgccaataacaacgtgggatttggaagatcaactatttgctccttgtgagaaacacaacttacccccaaaatagataatagaaagaagaatacaatactatacttcatatcactatttattacacgtcgatgtatacttagcttccaataaccaataaagttcacattcctgacaaatccacccccatagagcaaaaccgtcatcctcaggtgcttttctccattttttataacaactatgacttgctcctcctgcttcagagttatcatcattttcatctgctaaagcttccaaattagccaacgttacatcagacaattttatatctccatgagaattatatacagtataaccagcaaacagtataactgcaaggaccaacattattccaaataatttctttttcatattatcgttttatcgtttatattataattcagtttattccgtctctatcctttcaacggcataaggcaatcacttgccactttcattttttattcttatgtttgcattggataccttcttccttatttaggctgtattcagaatggacgatgcgccttgccaaagaacagcaatcgtccattcttccttcccaaccagtttaacaattataaaattaatcaaaacagcagattccaataaccttctgtaaagatttgcttattatcataataagtaaatacctgttcttcatttcctctggtcaaatctcgaagccaatataaagcatgactaggaacattattgtatatcagtttaggttcttccgctactttaacgcccaatgatttccaaccgtctgccgagaaataaaataactcatacttatcccctacccgtacaaaattatcatcattgcgaggtgtatatctaatactccctacctgcttgggagtattcaaatccagaccaacccaacccggcttttccgaactagtaaagaaagtcaaagggtcaccgtccatggcactccttcctgacactgtccgacttcctttatatggtaaagtagacattaattcaccttgtaacttcgtttgtcccaaagtatcggcataccaagctacttccgcaatatcgccaggaaaccaatcagcagatatgtaacgaacataacgatacttcgaagaatcttttatcttgacttcattgaacatctttcttggataattcttcagttgtaacataacctttgcatcactgaaatctttccgattagcaccttcaaaacgaccatacgccatacgttggatataagaccgtatacctccttgtagaggccatttacgtgtgacactcatctgacaactgtctgctttcgggcgataatacaacaagcaaccactttctttatctatcttaaaaggaaaactggcttcttttaactttccatcctgagcgtacaaagtcatataaattagcccttcttcaatatcattaaaaatagctttcccttctttataacgcccctcgccaatcggaaaccagccacgcctattaaagatagcaacccatacagaatgtccttcttttctatcttttatcaactcacaatcaaccattatttcattggaaggaaaatacaaagatgaaacatctttcaaacaaatgttcgccaatgctattccaaactttttattttgtagaacagcatctaaacgttctttctgtaatgcataggtatgcctatatacttttccctgtctataaccaaactgttcacctctttttagctttcgcgccccaaaattaaatggaattgtatatccagttgtatcaagtactacattccaaacatgagcaacatgactcaccggagaccataaataagtatcaattccagcgggaatgcctaccgaacgtagcatataacatccgaaatctgcaatactcgtacaatcgccaagttgtagttccaacaagagttgagctgataaatgtggacctgtaagttcattctgatatttccaatgtaaactcgttgcataattacttaaacaggaggttgcctccactacatccgttccttgatataaagaatccagtacaggcttgaagcgatgatagaagtcttttttccaatgagtcaaaggttcatccttgattcgatatggaagaataaactcgcagaaattatcaaaagaaacgtactttccccaaggagtttcacgccatactttaaatgaatactctatattttcaatcaaatattcggaagttatcacttttgcatcatattccttgaacaaatttcgatagggaaagcgtttcagatattctaaatgtttatcataactatctgaaaccgcatattgttcaagcgctatatgtagcgaatccaaatcacttcctttatatgtatagtacagaggcatattttctataagatatatagccgccttcaatttaagagaatcatttttataatactctaaaactttttcaagttctgcccggttagtatcagcaaaagccaaagctgtttctaactgttctttttcagaggaggaacaagaaagcaagctaaataatatacatacacatataaacagtcgtgttttcatactttttcaatcaggtttgtattgctggagagctatctataagacaagaaagccccaagaagtcatctcaaagactgtaacctctaactatatatttaactttttcatgagtaagaggacaatctagactaccaacatcaatacaccttatttttcctcctacaacctctccatcatctgatccatcttcatccgcagctaacgcttcaatattttctagcaacaaggagctaatattagatttgtaaacacatttaccgtttgccaaatacaaactatacaatgcaacaataacagtaaacagtaatgccgtaaaaataccttttttcataatatattatatttttcaaataaactacggcaaaggtaatcaagtggggtattgaatccaaaagatacatcttacatcttcttacatctgctaataaaagtagaaataagaagacttaagatttatatctcactgattttcaattggtaactccccatagactctatttcgatggatatagaaggaaaatgtctcaagaaacctcgcaatcgatttaaaacctgatatatcctattgtcataattaccatcaactttccataatgccttaccaattgcgttaatagacaaaatatgattgtctgcctgcataaaaagttctaataacttggctgactgatttgttaaggatacattcttttccccctcgctcattattcttttctctgcatcaaaatagacatcaccacctaaatgatataatctagcagtagtagtctccacttctttcactaatacttctttctcgattattattttttctggattcattttccttcggataatagctgttatcttgtatatagtaaaaataaaaaaaatataaagcaagatgtaaactatccctgcaaactccaacacttgcgaaaaagagtattgaagataa

SEQ ID NO: 2968 - DNA, 184161 bp, Unknown
  gut microbiota DNA sequence
gagataaagagcatttccttttttatacaatatgtcaaagaacacttgatgcttactttttacacaacctccaaagagtgggaaggcatattgccggtagactgttgcatagaaaaaagtcgtccgatatagccgatagcttgttccatattttccgcccggaacagtatccagccgattactaccagaaaaaatgttgttcctatctgaatagcctccttccaggaaggaagaagttttccttctgccacaatgccacgatattttctattggaagaagtaagtaataaaggcaggaataataaagcatggaaaagtccccagcaaataaatgtccagttagctccatgccagaagccgcttacgagaaatataataaaagtattccgcacacttttccacttccctacccggcttccgcctaaaggaatataaatgtaatctctaaaccatgtcgttagcgaaatatgccattttctccaaaactccgctatattacgcgagatatacggataatcgaaattcttcattaatttaatcccgagcaacttggctgtaccgatagctatatccgaataaccggaaaaatcacagtagatttgaaaggtgaagaagacagctcctaaaaatagttgtatgcttcccaactgttggtaattgctaaaaacaatatcgaccaatcggctacaattatcggctatcaccattttcttaaataacccgtacagtatctgctgcattccgtctactgcctgtccataatcgaacgtgcgaactttcaagaactgcggcaacaagttagtagccctttcgataggacctgccactaattgaggaaagaaactgataaaagcaaaaaatgccaccatatcatgtgtcggtttcattttatgctgatatatatcaatagtatagctgagagcctgaaaagtgtaaaagctgattccaacaggaagcagaatatctaatgttacccaatccaacttaatcccgaaagtctcaaataaggacacaaagttctcagaaaagaaattaaagtacttaaatatgcataacaccaacaaattcaatgtaatattagccgcacatatccatcgttgaatcaaacgacgttcttgccgctctatcaggattccgctagcataactacacaaagtagtaaatgctattaaaattagaaaacgccagtcccaccaaccataaaagatataactactgattacaacaaatatattttgtaatttcaaacgtttaaaaataaaccagtatccgataaaaaacaatggcaagaatattacatattctattgaattgaacaacataacagtttagaaggctaatttagtgtggggattataacgtcgttataatctgttctattactcgtgggaaatgttcgtactctaaagcgtgtaccttctcggcgacatccccaggagaatctgtcggaagaacgggacaggtcgcccgaaagatcgtatctccttcatcatagtgttcattaatataatgtatagtaataccgctttctttttcaccggcagcaaccacagcctggtgaacacgatctccatacatccccttcccgccgaacttcggaagaagtgcaggatgtatatttatgattttatcaggataagcatgcaaaagtaaatccggcacgcggacaaggaatcctgccagcacaataaaatcaattcgatactcttgcaaaacagccagaatttcatctccggctatccaatcttcctttgtaaacacgttacagggcactcctagacggtgtgcacgctccaaaacataggcatcacttttgttggaaagcaccaatgacacctgagcagagtcattcttttggaaataccggataatattctcggcattagagccggaaccggaagcgaaaatagcgatgtttttcttcataactctcgatttcaatgcacaaaacagtgaaaaatgtgcaaaacattgcatttatttagtcaaatatttgcgcaaaacgataaatattcattcctttgcaccgcaaatttaaagaaataaaactaattattaattaaaaacttaaagttatgtctgaaattgcatcaagagtaaaagcgattatcgttgataaattaggcgtagaggaatcagaagttacaaccgaagcaagcttcactaacgacctgggagcagattctcttgacactgtagaacttatcatggaattcgaaaaagaattcggtatctctattcctgatgaccaagcagaaaagattggtactgtaggtgatgctgtatcttatatcgaagaacacgctaagtaattatccgatttcatcaatatggaattaaaaagagtggtagtaacaggccttggcgccattactcctgttggcaatggtgtgcccgaattttgggagaatattgtgaacggggttagtggagcagggcctattactcattttgatgcgtcgctattcaagacccaattcgcatgcgaagtgaaaaacttcgatgtaacgaaatatatcgatcgtaaagaggcaaggaaaatggatctgtacactcagtacgccattgcagttgccaaagaagcggtagcagactccggtcttgatgtagaaaaagaagacttgaacagaatcggtgttatttttggcgccggtatcggtggtatacatacatttgaagaggaagtaggcaactactacactcgtcaggaaatgggtccgaagtttaatccgttcttcatcccgaagatgatctcggatatcgctgccggacagatttctatcatgtatggcttccatggtcctaactacgcgacttgttcggcatgtgctacttctaccaatgccattgcagatgcgtttaacctgattcgtctgggcaaagcaaatgtgattgtatccggtggttcggaagcggctatcttccccgcaggtgtaggcggtttcaatgctatgcatgctctgtcaacccgcaacgacgagcccgaaaaggcttcacgtccgttcagtgcaagccgtgacggcttcatcatgggcgaaggtggcggttgcttgattctggaagaattggaacatgcgaaagcccgtggtgctaaaatctatgcagaagttgccggcgtaggcatgtctgctgatgcacatcacctgacagcttctcatccggaaggtcttggagccaaacttgtgatgatgaatgcattggaagatgcggaaatggacccgaaagaagtggattatatcaatgtacacggtacatctactccggttggtgacatttcggaagcaaaagcgattaaagaagtattcggtgatcatgcgttcgagttgaacatcagttcaacaaaatcaatgacaggtcacttgctgggtgctgctggtgcggtagaatcaattgcaagtatccttgccatcaagaacggcattgttcccccgactatcaaccatgaagaaggtgacgacgacgaaaatatcgactataaccttaatttcacgttcaataaagcacagaaacgcgaagttaatgttgccttgtccaacacattcggattcggcggtcataatgcgtgcgttatcttcaaaaaatacgctgagtaaaatcgtgttacgaaaccaaatagataagataaggctcttgttccacagggatagagagtcttatctttgtttttaccggatactcggtttctacccgcgtaacatccagctctatgagcaggctctcttacataaatcctcatctgtccgttcggacaaggggcgtccgttaaacaatgagcgtctggaatttttaggtgatgccattctcgacgctatcgtaggcgatatcgtctacaaacgttttgaagggaagcgggaaggtttcctgacaaacacacgttccaagattgtacaacgggagactttaaacaaacttgccgtagagatcggactggacaaacttattaaatattcaacccgttcttcttcccacaacagctatatgtacgggaatgctttcgaggcatttatcggagcgatctacttggaccagggatatgaacgctgcaaacagtttatggagcagcgaatcattaatcgttatattgatctggataaaatctcccgtaaagaagtaaacttcaaatcaaaactgatcgaatggagccaaaagagcaaactggaggtttcttttgaactgattgagcaattccttgatcaggacagcaatcctgttttccagacagaagtacgcattgaaggacttcctgccggaaccggaaccggatattccaagaaagaatcccaacagaatgccgcccaaatggctataaagaaagtaaaggacccgactttcatggcaaccgtcaacgaaaccaaaatgcagcaatcagcaatggcagccgaacctaaacccgaaatggatgcagactctgatatcgaattgctgaatgacaatatattggaagaaaatgagttcgacaatgagattacggcagaaccgatcgtggaatctatccaaagcaaatccccatgcgacgtccctgaatcaccagatcgtgatcttcactaaccaactttagtttcccagccacttcttccaaagggatagaagcgatagtatctccttttagtgcaaccatacgcccgaattccccgttggcaatcagttccgtcgcgtgtccgcccattcgggtagagagattacggtcataaggagtaggcgaaccaccacgttgaatataccctaatacggtttcacgggtttcaatacccgtctcatagtctatttcctgtgcaatgtattccgcagcacgtttacgaccgtccgtctgaatgccttcagctactactacaatagagtatggtttcccctttttcaatctttccaaaatagtgtttcctatgtttttaatgctataaggtatttcaggcacaagaataacatctccccctcctgccataccggaatacaaagcaatccaacccgctttatgtcccatgacttcaatcaccatcacccttttatgagaacttgcggtagaatgcaaccggtcgatagcatctgtagcaatacttacagccgagtcgaaaccaaaagagatatccgtcccccagatatcgttgtcaatggttttaggaaccgaaacgatatttacacccatggcggcaaatttggcagccgtcttttgcgttccgtttccaccgatacagacaacacaatccaatcccatttcccgaatattctgaaggatcagtgcaggtttatcgacatccgaaataacacctccttttttaaaaggcttctcgcgggaagtccccaacatcgttccaccaagattcagcaaacccgataaagatttatctgtaaaggattctacatcttttgtgagcaacccctgaaagccgctatgaatacctaccacttccataccgtagtagttaatggcagttttgcacacgccacgaatagtggcatttataccggggcaatctccccctgatgttaagattccgattctcattgtcgcattttttagtctaaaactcggagattatatgaaagccgtcaatttttaacgattatttccgtcgtaaagatagaaaaaaaagataaataagttacttttgcacgactaaacattattatgttaaagcagaaatgaatattacaaaaattattagtaagacttttgattcccgtttaaaacagatagacctatatgctactcaggctagtgagatacagcatagtgtactaaaccgcttagtacatcaggctgctcagacagaatggggaaaaaagtacgactattcctcgatccgcagctatgaagacttcagaaaacgtgttccaatccagacttatgaggaaatcaagccgtatgtagaacgtttgcgggcaggagaacagaatctgctttggccgtcggaaatacgttggttcgccaaatcttccggaacgacaaatgataaaagtaaattcctccctgtcagtaaggaagcactgcaagacattcattacagaggaggaaaagacgctgccgcactttacttccgcatcaacccagacagccatttcttttcaggaaaaggattgatcctagggggaagccatagtccgaatctcaattctaatcatagcctggtaggagatttatctgctattttgattcaaaatgtcaatccgcttatcaattttgtccgtgtgcccagcaagaaaatcgcactaatgagcgaatgggaaaccaagatagaggcgatagccaacagtactattccggtcaacgtcacaagtttatccggcgtaccgtcgtggatgttggtgcttatcaaacggatccttgaaaaaacaggcaaacagacgttggaagaagtatggccgaatctggaagttttcttccacggaggagttgcatttactccttaccgtgagcaatacaagcaagtgattcattcaccgaagatgcactatgtagagacctacaatgcttccgagggttatttcggcacacagaacgatctttcagatcctgcaatgttgctgatgatcgactacggaatcttctacgaatttgttccgttggaagaagttgacaaagagaatccacgtgcctattgccttgaggaagtggagcttaacaagaattacgcaatggtcatttcgacctcttgcggtttgtggaggtatatgattggggatacagtgaaatttaccggcaagaacccttataaatttgtcattaccggacgaaccaaacatttcatcaatgcttttggcgaggaactaatcgtagataatgcggaaaaagggctggcaaaggcttgttcggaaacaggggcgcaagtgagtgaatattctgccgcaccggtgtttatggacgaacatgccaaatgccgccaccaatggttaatagagttcgctaaaatgccggattccgttgagaagttcgcagcaatactggatacaacattaaaggaagtaaactccgactatgaggcgaaacgttggaaagatattgcattgcaacctttggaagtaatcgttgcccgaccgggactattccatgactggctggcacagagagggaagttgggaggacagcacaaagtccccagactcagcaatacacgtgaatacatagagacaatgctggcgttgaattccagccccaaaatatagagaaacttatcatatagttattacaggttttcttttttgcaaagattacttgcctgagacccgggtgtcgtgtagacggaatccgggtctcagcatggatgagacttgggttcgcacaagttattccggctgtcggatagttatcgggcttttactataatccctccccccagcagcaaatcatctttatagaatgcggcagcttgtcccggagcaatagcagtcaacggttcatgaagctgtatatgcaataagtgttccggagtaacagttaccgtaccgtgattctcctgtttgcggtaccgtatcttcacgattatatcagaacaaccgagtacacggttttcgtttatcaagttccaattatccagccacatttctgttttctctagagattgaagaggggcaagtactatctcattcttttccggaaatatatctttcacaaaaacagggcgattcagatgtatccctagcccgcgtctctgtccgatggtataaaaaggatatccttcatgccaagcaataaaatgccccgtttcatcgacaaaccgccctcgtctgactatttctgaccatttctgaccatgtgcggtaaaaagctgatcatttttatccaaccagttttttaaaaaactccgataatccattggacagaaacaaacccctaagctgtcctttttagtagcaactttccggaagccacgttcagcagccaatgcacgggcttccactttcgtgatatcccccattggcaataacattctacggagaatatcttgtttcaatccccataaaaagaacgtctgatccttgtccgaatcagtcgcagatgtgatataataggtaccttccaacttaactttccgaacgtaatgccctgtggcaatatagaatatgcccatttcatcggcaagttccgctaacaacggccatttcaaataattattgcataaggtacagggaaccggcgtacgccccgccatatattcctgcacgaaatactcaatgatctgcttattgaatacttcacgggcatcgtacgttatatgacggattcccaaatgctccgccaaactacgggcatcttccagatattcggtcgagccatttaattcataaaaacgaaaagtcaccccgatcacctcatatccggcctccagcagtctcatagcggcaacggaactatccgtaccgccactcattcctaacaatactcgtttgttttcttctatcatgctgcaaaattaaggattttcccgtatctttgtcagttaaagcccaaagagaatgagagagaaaacaactaacggacaagtcatcatcgtttatacagagcatcctgtgtttggtatactactgatcccttacatagcagagcgactggaagatggcacgttgcagttgattgaacaggcttttcacgcttctcccgaagctattgaacaaatgaatgaagcagaaagacaagccatcgacatcgcttctcactatacagagaaatatttaatgggagcctattcccgcgaaaagacagtatcacgcttcctgcataagttatctcaagatcctgagaaagtaaagaataacattcggccatttattgaaggcaaactactcgagatgcttactctcatacgggaaaacgggttatctttttatcagaaacagcccggaagcaaagtgttgtacgcccaccatgcttatcacgtacatccacatgacgccgaagtccgctttacatttcatgtcgacagcagtactttccgctatcaactgcaatgttattatgagaagcaaccattttcattggacgaccaaaaacccgttatcgcattaactgcctcaccggctactctattgttagggatgaatttatacttctttccacacatagatagtgtccggctcttacccttcaccaagaaaaaggcaattagtgcaagtgccgctcaactcgaaaagtatatcgacaatattgtcattccgattgcacgctatcacgaaatcataaccgaagggtgggatatccctgaagaaagatgtgcctgcgaagcattactgtcacttgaagatatcactcatagcgaacagttgttgcagcttggttttcgttatagagaccagctatttacatcagacaacggagcagcaatgaagaaaatcatttatcggaaagactccggtgaggtatccttcttccggcgggatattgtcgccgaaaaaaaagcgattcagcttttagaaagctccggtctgcaacgtatcggtgatatccatttcaggttatcagccggttcttctgagaaaacacttgttgagtggatcaataagcatcgggagatgttacaatcggactttcaactgaccggccatatgggaaacactccttactgcctggacgagatacatatcgagcagagctgtgacgatgaagtagtagactggtttgagttacatatcaccgttgttgtcggcaacctgcgcattcctttctcacgcttccgcaagcatatcctcgaagaaaagagagaatatctgctaccggacgggcgcatgatccttttacccgaggaatggttcagtaagtatgcgaacttgttggaaatgggagttcagacagagcagggaatacgattgaagcatacatttataggcgccgcgcaagctgccttgggaggaacaggacttaaaaagttctctggcaaaaatcagattaagaatgtttccgtccctaaagcactaaaagcaacattacgtccttaccagcagaaaggattctcatggatgatgcatctgcataaactaggattcggcggatgtctggcagacgatatgggactggggaaaactctccagacacttacgttgttacaacatatatataaatcgcccgcctcaaggaaagcagccactctcatcgtcgttcctacgtcgctgttgcacaactggcgacgggaagcgaaacgctttacaacgctttcaatgattgaatataacagtagcatcgtcgtgccccccaatcatcccgggaagttcttcggacgtttccagttgatattcacaacgtatggcatgatgcgcaacaacatcgacctgctttcttcttacaaattcgaatatatcgtactcgatgagagccaaaatattaagaacagcgaatcgctcaccttccgttctgcactccaactggaaagcaagtatcggcttgtacttacgggcacacctatcgaaaattcactgaaagatctgtgggcacaattccgtttcatccaaccggacttactgggaactgagagcgcttttcaaaaacaattcatgattccgatccgccaaggcaatacccgtgtagaagcacagttacaacaactgatatccccatttattcttcgcagaagcaaaagtgaagtggctccggaacttcccccgcttaccgaagaaacgatctattgtgacatgcccgaagaacaaaatactctttacgaacaagaaaaaaatagtttgcggaatatcctgctccaacatcctcaaagtatggataaacttcattctttcagtatcttgaacggcatcctgcggctacgccaacttgcctgtcatccgcaactcatctatccggactttaacggtgcatccggcaaagcgatacaaataatagaaatattcgacacactacggagtgaaggacataaagtactgattttctcatccttcgtcaaacatctggaagtcctcgccgaagcgtttcgcgaacggggctggaaatatgcactactgacaggagcaaccaacaaccgtccgtccgaaattgcccatttcaccgagcagaaagacgtacaagccttccttatctctctgaaagccggaggcgtaggacttaatctgacacaagccgactatgtgtttattatcgatccgtggtggaaccccgccgccgaatcgcaagccattgcccgtgcccaccgcatcggacaggacaagcaggttatcgcctatcgcttcattacccaaaacagtattgaagaaaagattctctatctgcaagatgaaaaacgaaagttagcagaaacatttgttaccgacagcgaaacattgcctgcattgagcaatgaacagtgggtggatttgctaaaataaaaactgcatctttatatggactgtcttgcaagaatacttttttactttatctttgcacgcaaaatgacactgcatgaaatacaagcttatcgtgctcgaccttgacggcacactcaccaactctaaaaaagtaattactccccgcaaccgggaaatattgatacgtgtacaagaacagggcgtccgtctggttcttgcttccggtcgtccgacttatggcattgtgccgttggcaaatgaattgcgcatgaatgagttcggcggatttatcttatcctacaacggaggggaaatcatcaattgggaaacacaggaaatgatctatgagaatgtattgccgaacgatgtcgtccccgtactctatgagtgcgcccgcagccaccagttaagcatactgacttacgacggagcagaaatcgtaaccgaaaactctcaggacccgtatgttcaaaaagaggctttcctgaataaaatggcagttcgggaaacaaacgacttcctgacagacatcacgcttccggtagctaaatgcttgattgtgggagatgccgacaagcttatccccttagaagccgaactttgtcttcggttgcaaggacgtatcaacgtattccgttcagagccttactttctcgaactagtcccgcaaggaatcgacaaagccctgtctcttgccgtattattaaaagaaataggagtagaacgcaaagaaatgatagcaataggcgacggctacaatgacttgtccatgataaagtttgcaggactaggcattgccatgggcaacgcacaggaaccggtgaagaaagcggcggactatatcactctgagcaatgaagaagacggagtggcggaagcactggaacacttttactataaatttacgtagcatcatatgctcacaattcctttttcaaccgtaccttcataacctttgattgtatgtcttatactctgtttcagcagtatgcagagtagctatcgtatatcaatcttaccattatatagctcgttgcactaaagtgaacagttctttctactaaagtgatgagatctttccactccagtacacaggcctcatcactcttgtggaaagaagcggatgtttattacataacgcagtgatgtcagcaagaggatctgcgaatatcgactacttaagttatcagaacagggccagcaacatataaccaaaggtcatcctactttacgtttatcaatatggttcatataaataagcaaatggtttcatttccaactatcatgagaacaatgatgagaaataccccccaaaaagatgcattatagccatttttaagttaacgaacgtaaaaaacgaatgagaaataccaattttgaaaggcatttctcattcgtcacatatctgattataaaggaattgcccaaaaatatgagaacaatgagaacaatattaaaaaaatccgttctaggatggggatgcaaattatagatgtatgctgtctatatactcatgatacgtacagcaagaaaagctgtaccaataagcgaacacactctttacaactatataagaaagctgcgtgaagtattgtccaaagacaaagagatctcaatcacaacacagaacaatggctatgagttacatatttcaacttgaattatcgtaatatatcaaagatttattctaattttgtggttttaaatcgaataaatagcaaacgttatggaacatcaactgaccatttacaacacgttagatagaaaaaaagagttattcgtaccgctccacgcacctcatgtaggtatgtatgtgtgcggaccgactgtttacggtgatgcgcatctgggacatgcacgcccggccattactttcgacgtactcttccgttatctcactcatctaggatataaagtacgttatgtacgcaatatcactgacgtaggtcatttggaacatgatgccgatgaaggagaagacaaaattgccaagaaagcccgtctggaagaactggaaccaatggaagtcgttcagtactatctgaaccgctaccataaagcaatggaagccctcaacgtgctctctccaagtatcgaacctcatgcttcgggccatatcatcgaacaaatccaactggtacagaagattctggacgccggatatgcttacgaaagtgaaggctccgtctatttcgatgtagccaaatataacaaggattatcactacggaaaactttccggacgcaatctggatgatgtactgaacaccacccgcgaccttgacggacaaagtgaaaagcgtaatcccgccgatttcgccctctggaaaaaggcacagccggaacatatcatgcgctggccatctccttggagcgacggtttccccggctggcatgccgaatgtaccgctatgggacgcaaatatctgggtgagcacttcgacattcacggcggaggaatggacctgattttcccgcatcatgagtgtgaaatagcacaatcagtagcctcacaaggcgacgatatggttcactactggatgcataacaacatgattaccattaacggaacgaaaatgggtaaatcgctcggcaacttcatcacattggatgagttcttcaatggcacacataagttgctgacccaagcctatactccaatgacaatccgcttcttcatcctgcaagcccactaccgcagtacggtcgatttcagcaatgaagcactgattgcttccgaaaagggattgcaacgtctgatagaagctatcgatggattgggaaaggttacccctgcatccgcaacttcagaaggtatcaatgtaaaagagctgcgtgccaaatgctacgaagccatgaatgacgacctgaatactccaattgtcatcgcacagcttttcgaaggtgcccgcatcattaataacgtcattgccggcaatgcaacgatctccgctgaagacttgaaagagctgaaagaaactttccacttgttctgctttgacattatgggattgaaagaagaaaaaggttcttccgacagtcgtgaaaatgcctatggtaaagtggtggatatgttgctggaacagcgtatgaaagcaaaagccaacaaagactgggctacttccgacgaaatccgtaacacattaacagccctcggattcgaaatcaaagatacaaaagacggttttgagtggagattgaataaataaatattaaacatcagggagataaatcccttctacagataaaaaagaccggctcattacgaaccggtctttctgtttcatagaaacatagtaactaatacccctcttaaactacaaatcttatcatctaatcacttgttttccattaatacctcaacaggttgtccgtgctggcaggttaccgtcaattgtgtatcatttccttgtcgctccaaccggacattttccattgaattctttagcgtccaacgacctttgagtagtattttcttataaataggacggctaggttctttcgtcgtatacgccttttcttttatattcaagtttgggtcacaaacactcaaacgaactcctttaccggtttctttcgcatacatcaccattgtttcagcaggaatagaagcaatcaccttatcagttaccggctgataagcctcaaaaaccgcatacgccgtaatacctgttttcttatcataaacgacatgagccgtttgatcacgttgcaggacttcatacgcaggagttttccgaaggtcgtccaagtccgctgcagaaggctgtatcaataccatgtattcataagttccgttcttcggagctttaccatgctctatccatgcagaggagaattttcctttagtgaccgcacgggttttctcatgacgtgattcttgttccgcgatctgcgaacgaactgttccgtctactacatgatagtaattgtcataaccgtcatgtaaccaatagccgtcattacccactttctgttctccgccgttgtatttcgtctggaaaagagtcgtttccgtaggataatcggcattactattcgttatgccggttcccagacaaatcatccggttgtcgaagcagaatacagatttacgggcaacaaaatcaggagtgaagttttccaaattacgctccattaacttcatagcaaacatgccattcttgccttccaaggaactgctaccggagaagttttccttggaatgagccatggtagtaccctttaacggactatccagcaactcgaagggcaaatgaatagtagtcgtacccggcaggcggttccaatcccaaccctcctgtacaaagccgcttccggtacgggaaacggggtttccttttcccatgatctgcaccgaaccataactctgataacgtccgtaacgattatcttttgtatagatttcagccccccaaacatcagtagtatatccttttagtgtcaccatccaatctgcacggcggaaaatacctgccgaaccgtaattataaacaaaaaatccttgtggagcttgtgcaggcttgatgccttctttcttaaagaaacgcgcattcggagtatccctatcacgtactaaccgtagataatctgctgccagagcatgatcgaacgtattcccccgaccggacaaatcaccggctaaagctatattggcaaatgcttccacatcatcattccccatttttccaccgaaaggatgacgtccgctgataccaattccccattcataaagattacaataattgcgcatggcaataaatgcggattttatatgctggcgggcttcttccgtcagttcaaaatccgtattgttagtaaaagcaatgaattgccctattacggccagcactccggtcgtatatgccggatagaaaccaccatggtgaaaagttgtgccatctatcttaataccaccaattgttcccggtgaatagtgtaaagaagaagaaacccaacgggagaggccctccaaagcctgcgcctgctctcttgcatccgtgaacatcatagcagagataaatctcgccattaaaagcgtatgccaagtatccagcatttcatcccgttccaaaggacacggttgacgagtctcctgcaaagcagaccagaaacgtaatgtcgacaaataagcatccctgtggggatgtttatagatctcatcccgcatcaaccatgccgtcgtatatatcttacgtatctgataaccataatgatgattggttcccataccgctaccaaaggcaaatccctggtcaatagcataatcaaacaccgtgaagtagtttttctttgatgtctcgtttcgattgcaataaacgtcatacgcaaaaccggaaagcattgtttcaatatcattccacgacatctctcctatcttcttattctgttcgtccggagctacaataggtgttcccgtaaatcccgtacctgctgccgacgggcggatatccgctcttttaaatgtctcgtaagcagcatcaacttgctttttaggggcttttttcacttccagaaaatctgtcagacgttgctcgattgttttcaggtctttcgcctgtcgagcagtcaacttggatgccaatggagtatcatacgacagttgctcccacttccataccaagcaccaatgccagaggtcacggttagccaagccattattagtcggcaactgctgatccggagtggtacgaagattcatcttcttttccgggaatatcagacggtcaagaaaaatacgtcctttgcgttggggggcaactaacctgtaagctacaatatctttgtccttcttatcgccttgcatatattcgaaagaaatccagcaagcccgccaccctgctgcttgcagatgataagcaaaccaataagacacctctcccgccttattcaggaattcaaaacgaatagaatcctgctgtggcttttcattatatatccacaaggtaatgccatactgtctctccgtttttccttttaatgataaaggaggtatctgtacattcaaagttgaaccggattggaaatcccactccaagctacttttaccctctttatagaaaagagaagaaattttcgcctctccctttccggaagtcttaaatgcttcgggtacctcactactctcaaatcctatgagttgtgcgaaagccgaagaagctgttacaaacagaaacagtagtataaaacaaatatctttcttcattgtgtcattattaaatggtcaaacagtaaccaactactgcttaataaagtattttgtccgataaaatcttctccgtataccaaggatcgttgatttctttcaacatagcacccatttcacgataaagttgtgccactatttccttgttttcttccaaaggtagattgttcaactgatacgggtctttcgcgtcattgaataaaagacttttctttaactgttttgtcttacggtcgatgtacagagccaatgtatagtccgcagtcttaatacctcgtgatgaaggaaaataagtttttaccaagccgttttcgtccttttcaccatctatattctgaatgtacaaagcaccggtaggacgaacaatttcagccttttcatcgaagaaaagaggggcaaagttacgtccctgcacttctgccggaattgaatcacccaatccgcacagtccgagcacagtaggcattatgtcaggagcggaaagcagcaagtcatctacccgcggctgaatcttatccgggaaacgaaccagaaacgggatattcattgactctgagtaaggcgaattcttcggatcatccgtacgttggctacacatcgtttcaccatgatcggaggcaaaaataacgactgtattcttatccagccccatctctttcagtgtttccagaatctgtccgaaagcacggtctaccccggtcacagaagcgaaataataacgggctgattcggctttcttcattttcaggtcaacattaggacgaatcaacagactgtctaaaggttggtttttataaagatcaaagtcctgctcttcgcaatcatccaatgaacgatacggactatgaggaggattcatccctaccatgataaaaaaaggcttctttgtatcacgcacattaccttcgtttttcaaataagatacaacttttccagattcatgcagaggtgaccattctttcggatcgtgccttttaccgtccgtatcccagtaatgcggattcttatgttcatcaaacgtgccataagaataccagtagttgaaaccatgacgacgctctttcggtgtataggcatcccacacaggacgtttggattctacatattgtcccggatgttcgggatcattcggagtgggaaaatctgcatgaagtttaccgaaataagcacaatcataaccagctttgctaaatacatcaccgatgcactccgcatcctcacgcaaagaactgatcggacgtgtagagttgcaatttaaaggcaccccgctacggttcggatacataccggtcagcaacattccccgatgagggctactcaacggacagttgctttgcgcggaggtcagaaccatagactcccgtgcaaatgcatccagattgggggtatgtacgggatctccctcaaaatttactttatcccggaatccatcctgactccagaagcccattgcctgattacggtactggtccggaaatacataaataatattgggatgctccgattgttcgactacttgcttcggagccttgcaaccctgtgccgtaaacagtgtcaggcctcccaccaaaagatttataggtttcatatatatttaagttataagatgataaataataaacgataaccttattatttcttttccaaatctcttttgcgcatcagtccttccaagaagtaatagtcggcataattcaaaggaacatcaatctcctgtccgtgagggatactgcctaccgagtgcatcaggataaagtttccatttgttccaactttagcacgataagcgggtgagcccaagctttccatgatcttatcagcagtttccttgtaatgattgcccggcagataaccgtccagttcgtaaagggcagaagccgtacaagcagcggcagaagcatcacgcggttcattcgggatgttcggagcatcataatcccagtaaggaacgagatcttccggcaggttcttattcgtaaagatgaagttatatactttttgcgcctggtcgagatacttcttatctttagtgtagcggtaacaagtagtatatccgtacaaagcccaggcctgtccgcgagcccaggcggattcgtccgcatatccctgcgctgtttgtctcttacgcacttcgcctgtttcgggatcataatccacaacatgataacaactgttgtccggacggaagtgatgagccatggtcgtatccgcatgtttcactgcaatattatagaaagtagagtcaccggaaaaagcggttgcctcgaacagtaattcgagattcatcatattgtcgataatcaccggacatttccaaccgcgcgttccttgccaacctctatcggcatcccatgactgaataacacctgcattcgggcggaaacgggtagaaagagattttgccgtttcaatgattacatctttatattctttcttgtctgccatacggtatccgttcagatagctgcagccaatcatgaagcctacatcatggtgccatttcagatgcttcacagaatcaagggcctctgtatacttttcagccaacggtaaccatttctgatctccggtcaagttataagtcagccacatactgccggggaagaaaccggaacaccagtcgtcaataggtatataagatatactaccgtctttattgatagttctcggatttaggattttacctgatttctcgataatatccgtttgaatcgtgttttgtgccactgcgttgtcgatgttgtcctggataaagtctacttcaacttttttctgtccaccgcaactcgtaaagatcagaagggatagtcctaatgcgctaagaattgttttcataatacacggattattttgttaagtgattaattatctgattgcaaaaataatgcattcaacaagaatagaccgacctaaataatccaaatgagggacaaatttggtacatttgcaaggaaatatcaaaattataaagaccatgactccacaagaattcttcaaaaatgatcttttcgccgaaaacgcaggtgtagtgctgctggaagtacgtgaagggtatagtaaagccaaattagaaataaagccggagcatcttaatgcaggcgcacggactcagggaggagctatctttacgctagcagaccttgcgcttgccgcagcagccaactcacacggtacactagccttctctctctcctccaacatcacttttctacgggcaagcggaccgggcgatacactttatgccgaagcgcacgaacgctatatcggacgaagtacaggctgttaccaagtcgacgtgacaaaccagaacggggacttaattgctacttttgaatcaagcgtattcagaaaagaacagaaagtacctttcgaaattcaaaaataaaaaatcggagagccggaagaacctttacaggcaacttccggctctccgacttttctcttgatttatttaacaatagaggtcaacgggtgacgattgccggttacactattcaagaatgcttttgccgaaccaaaattcaggaataaatccaagcggacaggaaggtgatttaaatcatcagtcacaaagaaagtaatcacctctttttcttttcctttcttgtcatactcgactaacgaaaagatcaggcaacgataagtaaccccgttctcagctttcacattttcttttccacgatagataagcgtttgctcctccactttacgtccggtagccataggaaatttaattttatcccctactttataatcactaggatcataagaacgtgcctgtgccaagatgctcaacatatcgtagatacaacggctgtcactttcttccgactcggtgacggatccgtcccggtatgtacgcttctgattggcaaaacaaagaccatccttataagaaaaccaagcctcatcaaccgtataacgttttccttcctcggcacctttgcggaaataatgcggttcgagtttttcacctattacacaagtcagcgtgtcccgcattttaaagaagaaatccgcccgcttactgcccaaagccagcagattgatacgataggcaggctccgagtggtaagtagttgcgttcgttgtcaaactggccaatccggctttcacccatacaaacttccagttaaagtacaagtcgtacatcacgtgctcaccggatttgaatgcatcgttcttagcttcgcactgggcactggcaggaagaacaaagattcccattagcaatgtcgctaatccaattataatttttcgtcgaaaattagcgacgtcgctgactattcctatctctatctttctttttcttgtcttcatccggtttttgttttttaagttcgtccagtttctgcttatctagcggaattgcgtgaatatcccatgattgcttatctaagtcccagtttgccttcggctccaagatcatattgtaataatacacttcctcaggttgttctcctttttcaaagttaccagtatcccagattccatttccattccggtcgttcaccagtcgggcacaatatttaccaggattcaaaaaataaaagtctgcataccctccgtccgttaaccttctccggcgcaccactttatcttgagcatccaacaattctacaaaagcagtagagtctgctcctgtcaccagaaaggtgatactggcatattcttccagtttacgtactttgaagccctgctttattttatcggtgaacaagccatatataccatggaatgcagtcgagtctaccgagaactcatattcattacccggttcccagtcataatacaagttgaatcttttcagattcaaagaatcttgttcaaactcaaatggtatatctttccaaagcgtatccaccttttctttcagatgaatcgccgcactatcaaaacgggcaatcggttcatcaaaagtcagagatatagaaccgtacacatccattgatgaaggtgcaccgacattcaccggcaagaatttggttggttccggctcatcttcttcatctttctttttcttttttttctttttctccggttcttccttcttatatttttgcttcgaaaccagattcaacgtatccgtacgtgataccaattgatttaatgtatccgtataaagataagttaggctgatagcaagtgtatcctgcttaaaaagcaaagagtctttcacccaataatggatcgtatcgttccgcggattcttttcgataacaaaagcatccctttcatcgaaattcaaccccttcaatgtaggtaaagtatctgcctgaccggcaaaatagaacgtaaatttctgtggaacaagccgttctgatttaatcaaatattgtgagtagttgaattccttaaaggcacggagtataagatcatccggcagataatgcatatatttcctctcaacaatcgtatcgtaagtcagcgagtccacccaagccgtgtccatacggattctttcctccatacgaggaatgaccagtgaatcgttaaaagcaatgacttcacttttttggttgaaagtaaatgtctggtctgcatccattaacccataaatacgatatttgccaggagctacgccacggatagagaagcgtccccggctatcggtacgtgccacacggtcaaatggcaattttgtaaaagccgaatcgttcaggttggaatgtaatcctaccaggattccttttatcggctccagattggaagcgtcaagcaccgttccggatacctccattgtatctatttgcgtaccggtagaaaaggtgaaggtaaagttacccaacgggttaccttcgttattatcgactatcgcatccgaaaagtcaattgtataagtggtattcgctttcaatgaatcaagcaggtttacctgtatccgctttcctgaagctttaatttcgggctgttgtacctgcggtggagaaacaacaactttttctgttgctttttccaactttataaattcgtcgaacaagagagaaacttttgtcctctgattatttaaagcgccggcagcaggtgtactaccgatgaaacgaggtggcgtttcatcataagggccaccgtccggacgtccgatactggcgcaagaatatagcatgacaaccagcgttactaccggaaatgccttgcgaacgatttgctttatcttttgattctcaaattgtaacatgctgcaaaaataagtgttcttatccaataaacaccacactttctagctaatttattaaaaaacgaaagggtagcttaaggtaataaacaattccaacgcgttttttatttctttttatcgctgatataattagttttcttacctaaagcgactagctttgttagctagtctttttctctgatttttacgagatgatatcaagaagaaggagtaaagagcaggtaaaccggtagttgatatgcagaaaacagaagttggataataaactgaataatttaacgtgagatactgtttgctggaaaagcagaaacagtatctcacgtattttatttaccagcctgtattttggcctaaattaggattcttataatattctgtctgtggtataggatacagatacatcttatcatcccagttacgtgtttcaagcaactctttcttataaacaggtgaaccattttccagagtaatcttgatgcaataaatggctttggttttatcacctatcttccaacgacggatgtcccagaaccgatggtcttcaaacgccagttccacgcgtctttcgcgacggatactttcagtaaatgcatcgccatccgttgtaacagcaggcatatcagctgcactacgtacttgattcagtgctgcacgtgcagacaatggatgatcattatccgtataatcggcacccttccaggcatccatcgcttctgcatagttcagaagaatctctgcataacggaatataatgaaatgatgaggtttctttttctcgttagaaggagtaagagaaacggtctcgttcatatacttcttcaaataatagccagtggtagtcgctccggctgttccggcaccatctttaccgccttcataagactgaatagttgaattcatccatgtatctccgttgcaaagtactgttttgtaaaaccgtgggtctctgccctcatacgggttctgccccggcgcaagctgttcccagtcaaagtcttttccattagtcagctgaaaagcatccaccagattttgggtaggtacattgccggtttctcccttttcataactgataggcagattgtttgcttcaaagtcaaaactttctccatttctacgctcaaagattaattgcggagatttcaaaacatcgtttccaccgttcttatcatacagaggatcggcattcgttttcggcagactgtaccaattctcttttatgatagcataagccgcatcgacagcagctttccacttatcagcatcctgactgggattatgtaacatactcgccgcataaagaagggcacgagatttcaatgccaacgcagtacctttagtcacacgtcccgtctccgcccaaaaatcttgatgactgacgggaagtgttttagctgcatcattacattcatcgcatatatattttatcacttcgctgaaagaactcttttccacgctattgatctcatccaacgcatacgtacgtgtcaataatggaatatctccgtatcgtttggccagttcgaacaagtagaaagcccgtaacacccgcaattcttcacgatacatagtagctttggcaatatcttcttcatacgtatcattccaacggaaacgctccagcctctcttgggaatagttttcgagaaatgaattaacggaacggatagctccataacacttcgaccacatattgtcgactgcattattgggactccaggcattattataaaagtcgtgaacactgttatcactccaaatataaacagaattatccgttgcagactctctcaaagccccgtcgagcactccgagatctccgggcaactggctataaacataagtagccaagcccttgacattgctaaagtaggaataagcctcttctctgttcaaaccagtcgattcgtccagttcgagcaagctacacccagaaacggatagtagcaaacctgtatataatatgatatattttctcatggttatctcacattttagaagttaatattcaatccgaaataaacggaagtcatatccggataattgattttcagatcctcacagttcatatatttcacatgatccagcgagaaaagattattagctctcgcatatacctgaatcttctccatcttcaccttcttcgcccaagaagaaggaaaattataataaacattcaggttacgaagtttaaagtaacttccgttctccaaccattgtgtactatttctgaaattattggcattatccagcgtggtcaaacgaggaacatttgcaatatctttcgtatcttccgtccaacggattttgtcgttcagataccagtttgaaatatttgtgttgtttctcaacggccagtacacgcttgcagtattcaacatcacgctataatgccctaccccttggaagagagcgtctaccccaaaacctttatactcaaatcctaggttgataccatagtaaatctccggtatggcagtagaatatcctatcgctttctgatcattactgtcaattactttatcaccatttaaatccctatatttgacatcccccggacgtacttccgagaatttctgtacagggctgttcttaatgtcctcctcatctctaaaataaccgatcgcttcccaaccgaaacattgtccgataggataacctttcttagacagatagccatacggttgatacccctcaccattctctatgactttacttttagcataagagaaattagcaccgatgtagtagctgaagtttttatactcttttttccacatagtagagagttctgttccttttgtttccacttttcccgcattcatctggggaatggtaactccgattgcagaagatatcaacccgcttccgtcaattaaaatattagagcgcttgtcatagaaaccatcaatagaaaaagtcaaccctttgagcaaactcatatccaaaccgatattatatttatctgccacttccaagtcgagttgctccattgccagcattccctccttcaaactgcttccggcagaggtattcccagcctgaaaataataggaaccgcttcctatccaatattgcttatccatgtcataatcatagatatcatatccggaacgcccgtaagaagcgcggagtttcaaataatcaaaagcggagattcctttcatgaaattctcgttcgagagtatccaggctgcggatatggcaggatatgcacgatacttatcgttctttcccaatacgctactgccgaaacagttagcaacaacatccaccatataacgattatcaaaattataacctacggttccgatgatgtactgacggtaacggctattattagctcccgtcagagtcattgattcctggcggaacatggcactggcagtaaaatcatgtttatcccatgtccggtgataattgactttcgcttcaaagttggcatgtatatattgattagccaatcctttgttgctgatttccaattcatcgttaggatttccgtaattcgtataaaccggttctccgtcggtacctttctcaatggtctgatacataaagcttttcttggctgtttcctgataagttgcattattatcataggcaatagcaagttcagcgctcagtccgcgagtcaatacagacaggtcttgtatcaatcgcagatctgcttgcagcattcgctgattcagcttataatagcctacgtccgccagattggctatcgggtttgttttcagcacattattactaccccagagtccattctgagtctgtacagggaatgcggcagatggagtattgaatatctgttcaaacaaagtagcctccgatgtggtagggcgtttcgtttcacgcagcataccaagcatattcagtttcaatttcgttgcatctgtgatatctacatccaaattcatgcgaagattgagaaaatactttttcatctgggaattataacgatcagtgtagtcagtgtacttggaattcaacagtcccatatcattcttatagttcaagacactgaaatagcgcagcctcttacctcccccgcggaaagtaatatccagttgatgactggtcgtatgattacgcaacgcttccttctgccaatcaacattcggataaagatcgctattacctccggccaaaaaagaagcttcatccatatccggttgcaggccatcatatctcaatgcttcattccgggcttttgcatatgtataagcatcggcaaattccggttggtttacgggcagacctaaaccaaacttatagtctaccttgatctcttttttactgtacataccgcgtttggtagttatcagcaccacgccgttggcgcctctacctccccaaagagcagtagcagcaccgtctttcaatacggatattgattctatttccgaaagattgatatattcgatcgggcgggcaaaaccgtctaccacaaataatggcgtatctccattcaaggagccacgaccacgtacatttaaacgtgatttgtcggttccccaactcgtattttgcatcacagtcagtcccggcaacaggccatatattgcattgtaaggactcgtagttgcatttttatccaattcgtccgaataaatggtagataccgcctgtgtcttccgtaactcggttgtcgtctgagttcccagatcgactgtcttatcttgtccttcattattttgagctatccctgtagtggcaaacgccaacgagaaagctacgatataaagtgatttattcataatcattcttcttattattcaacgatttgattattaccaacccggattctgaatcaatccatatttcttgtttatctcatctaccggtagaggtaacaggaaatatttgtcattccacttctcaggtttcgcatactggcgtgtttccgccattgcatgagatactttataagaaaagccgctcggctcaccggccgcttttttaataatcagacgtgatagttgtccggtaaatatatctgcgcgtttccaacgtatcaaatcgaaataacgtacttcttcataaccgaattcaatggctctttcacgtaatatcgcttcgcgcaacggttttccggccggaacatctgccgccgaaatcgcaggcatacctgcacgttccctggttttgttcagataatcataggccgtattgccaaactcgtcacgaacttccgccttattcaactcattcatcgcttcagccatattcaaataaacttcgggaagacgaattaacggacaagaatagaatttaccattcacttcgtcattaaagtttcgtatgaattttctcatcgcaaaaccattgtagctcattcgcccatctttataaggtgactgggtggttccttcaaaaatctgtactttctgggcacccttaaacttatctccattcacagcaaccgtttcatacaagcggatatcccttctaggatttccatccttatcaaagaaagggaatttattatgatcgggattatcccagtcgaattccgtcccgtccttcatctgaaacatatcgacataagttaatgtaggagaagcaactccgtagcgtacttgggcaaacggaagtttccccgtagcataagtggtaaatcttctggaagaaatcagaacctctccattatgacgattgaaatatcctgccgcaaaatcatcgcgagggttacctgtattcaccagttgataaacattcgaattctttttattagcccgcataaattccaaccctgcatccagtgctttctgccacctgtctgatgaataattaccataccaggtaaggaattgagaggaagcatcaccttccaaatagggtttgtcagcattaaacaaaggactcgccacaaactgaagcactctggactttaatgctaaagcagaggccgccgtcattcgtccgtcattatccgcatctacctgccaaggtaatacagaggcagcggcatccaataacccgatgattttctgtacggtttcttctaccgtcatgcgaggaaatttcatcgcatcttctgccgtataagcatggtctatccacggcatacccccataataacggagcatttgagaataatgataggcaataattacttgtgcttccgcttttcctatcgccttttcatccgcagtcatatctgtcactctatccacattttcaatatagatataagctctccggataccataaatcggaccgacaccaatggttctattatcaacatccaaccgatatggaagatgttccagataggcatttgttccgtctaccgttcctgtatagaacttaggtgctcctttttttgtccagtcacccaaatcggtaagcatttccagcactccatatcccagacgtccttgcataggcagataatccggcagtgaatggtaagtctccgccaatgcctgctcagcatatactttcttgttaaagacagaatctatattctgctcattacttatcggcttatccaaaaacttctctccgaacttaaggtcttcgcaccctatcaatgtcaatgcaaagagagaaagacagcccatatactttttatagtttttcattgtcaacactattagaaggttagattaatacctaaattatatatcttaatgatagggtaagaatccgcattattcggattacattcagggtccatgatgtcaaacttatcaaaggtcagcagattatagcctgtcagttttatacctaactgctggatacccagttttttcaacatcttcttatctgtaaagttatatcctattgtcacattcttcagtttcaaataggaaccgtctcgtacccaaagagaagaagaacgcatattataaactgcgtttgtctcggtaaaccgcggtgtggtagccgtaccggctgtttccggtgtccaacgtgtatctgcgtggaactgcatcaagccacgaattttaccatttccaaaaggttctctaaaagctccatccaacaacaaggaacgctgtgcggcaccagtccagttcattgtcaggaaaaagcccttataattaatgccataattcaatccgaatgtataggctggacgagtcgggtttccaataatagtctggtcgtccgaagtaatctcttcgtcaccgttcaaatcccggtatttcacatcacccggcttcacggataccccaggatcgggcaagccagccacaagtttgccgttctctccgaaatcctcctccgtataaaaaccgtccgccacatatccgaaaagagctcctaccggatttcccgtccgccacatataaggttcattaggttctacctcgtcctggaaaataatcttattctttgagtaggaaacatttgcctgaatattatactgaacctgaccgatcctgtcattccacttcacttctacttcatatccgtgatttttcactttacccatatttacggcaggcagaatcgaggaagtcagtcccgtcaataaaggtattgtcttacgattgataagaatgtccttacgttcctcgaggaaataatccaaagagatcttcagacggctcttcaagaaatgaacgtccaatccatagttctgtttcagcgcagtttcccaagtcacgttaggattacccagacgtttttccaacgcaccctggattaacgctttactgttataaccaaaattgaagccgtatttattgttattccacgcgtctactccgctcaaattcacatcataagaatccggcaggaacaagaaacggttatttccaaggttatcatttccgaccagaccaactgaagcacggaatttcagataatcaacaactttctgttgtttcataaatgcttcctccgacaggatgtaaccgatagaaccggcaggaaatgcgccgaacctcttacccggagcaaaattctcggaaccattataaccgaagttgatttctgccatataacgggatttataatcatacgtcagacgtcctacaaaaccgatgtaagcggacggtactcccacccattgagcaggatagtattttttactctgattatataagaacaatcctccgacattatgagaaccaaacttacggttatatctcagacttgcttccagataccagtctcttgctctcgaggaagtttcgtcatattgcaagctcttattttctcctttgatcttataaacaatattcttgttgaaatccggcgaatcataaccaagcgacgggtcctccaaagaagactgatagaaaggcataaattgctccacctgccctttacgtttcttagtaaaaccataactcgtattataggcgccttttatctctgctgacagtcctttagtaataaagtccaatttctggttcaacagaagatccaaattcattgtattattaatagctgttgaatagcctgtcccgtaacatttaggcaaagcactgttacccaaattaattttattatcaaaacgttcttcgggggtaactatcagcttcccgtcaattactcccgggctgctgaacggagtcgtctgattaatcaatgtccagattgaattagtcgcatcattaatcatcggttcattccggttacctacaataccaccgataccaatctttaacgtggtagtcttagtagcatcaaaatccagattggcccgataattataccttttgtatttataattattatcatatcccactccttcgaactgtttcaacaggccattctgatataagaaacctaaagatatgaagtaacgtatatcctttgttcctccggaaatattcaggttgtgttgtgtctgcacagatgtcttattcagcagatatcttctccagtcgatactgggatacataatgggatcatcattcagtctgaatcgttcaactgcataattatcaaataccaaatcattctcggtagcatttggcttgtcatttgttataatctcatttctcaaagttgcatacgtataactgtctgccatttcgagcatacgagtaggcatctgaataccaaccgaagaattcaccgagattttcgctttgccctctttaccacggcgtgtagttaccaaaattacgccatttgcacctcgaacaccgaatacagcagtggcagaagcgtctttcagtactgtcacactttctatttcattcggatccatttgataaaacgaacgttccacaccgtccaccaggatcagaggagaagaagcactttctgtcaaagaccctacaccgcgaataaacactttgggatcttcctgccccggttggccgctggtttgtacagatgagagtcccgtgatctggcctgccaacgtgttagctacactagcattaggcgaacgcaccaacgcatcattacttacggcagagatagcccctgtcaaagtctctttcttctgtgtaccataggccacaaccgtaacttcctgaagttcatttgctgtttcttttagaataatttttagttgtttacgcccgttcaacgggacctcttgaggttcataccccatgaacgagatttgcagaacagctttttgaagattgctcacttttaaatgaaaaataccattcatgtcggtgatggcaccgttagcagtgcctttttctttcacattcgcaccaattacttccaaattagattcatccaatacagttcccgttactgtattctgcgcccatactaagagcgaacaacacataagcattaacgtactgatgcaccttttgcatcttttcagcctcgtcagtttattcataataataaatttaagaattagaaataggtttattaaaaacactcgctgcaaattaagcaaatgatacagtttttaagacactgatatcatactaaaaaggtacaaaatagtacataacaagaaataataagtattaaaattaattgtattatccatagtatcaagctatcccaacaacaaaaaacatccaattcatcgtttcttattgactttacatacacgaaaaataaaacttcaaagatcaactcaccaagttcttccttcatcgcaaatctatgcataaacaatgcatctttattatacttcattttatagttcataaataaattaaaattgaaccatagatatacttattagactcattattctcctttactaatcaaattattccctatctttgactcccgaaattcaaacctaatacaaaaacccatgaagaaacaactgctattttgctgcttggccacgttaggactaaacgccatgcaagcacaaaacttcaatgagtggaaagatccggaagtgaattccgtaaaccgctcgacaatgcacactaattatttcgcctatgcatcggctgatgaagccaaagccggaatcaaagaaaactcaaagaattttatgaccctgaacgggctttggaaattcaactgggtgagaaacgcggatgcacgtccgaccgatttcttccagactaatttcaatgacaagggctgggacaatattaaggtgcccggagtatgggagttaaacggatacggagacccgatctatgtaaacgtaggatatgcatggagaagccagttcaagaacaatcccccctttgttcccgttgaaaacaatcatgtaggttcttaccggaaagaaatcattctgcccgccgactggaaagggaaagagatttttgcccatttcggttcagtaacttctaatatgtacctttgggtaaacggacgctatgtgggatacagcgaagacagcaaattggaagctgaattcaacctgacaaactatctgaaaccaggaaaaaacatcatcgctttccaagtattccgttggtgcgacggcacttatctggaagatcaggatttctttcgctactccggtgtgggacgcgactgttatctttatgcccgcgataagaaatatatccaggatattcgtgtaactcccgacctcgacagccaatataaggacgggacattgaatatctctgtagacttgaaaggtagcggcacagtggccttaaacctgacagatgcacaagggaacagtgtagctactgccgatctgaaaggttccggcaagctgaacactactttgaatatttccaatcctgccaaatggactgccgaaacacctaatctttacacactgactgccactctgaaaaacggcaataataccgtagaagtgcttcctatcaaagtaggtttccgcaagattgaactaaagggcggacaaatacttgtaaacggccagccggtactcttcaaaggagccgaccgccacgaaatggaccctgacggtggttatgtggtttcagtggaacgtatgctccaagatatcaaagtaatgaaagaacttaatatcaatgctgtacgtacctgccactatccggacgacaaccgttggtatgacctctgcgaccaatacggtctgtacgtagtagccgaggcaaatgtggaatcccacggtatgggttacggtgacaagacactcgccaaaaacccaagttacgccaaagctcatttggaacgcaacgaacgcaatgttcaacgcggttacaatcacccttctatcatcttctggtcactcggtaacgaagccggtatgggaccgaactttgaaaaatgttatacttggattaaaaacgaagacaaatcacgtgccgtacagtatgaacaggcgaggaccagcgaatttacagacattttctgtccgatgtactacggctacgatgcgtgcgtcaagtattccgaaggcaatattcagaaaccgttgattcaatgcgaatacgctcatgctatgggtaattctcaaggcggattcaaagaatactgggatatcatccgcaaatatccgaaatatcagggtggatttatatgggacttcgtagaccagtcctgccattggaaaaataaagacggagtggatatctacggctacggaggcgacttcaacaaatatgacggctcggataataacttctgcgacaacggtctgattagtcccgaccgtgtgcccaatccgcacgcttatgaagtaggctatttctatcagaacatttggacaactgttgccgatcttgctaaaggcgaaattaatattttcaacgagaatttcttccgtgacctttccgcatattatatggaatggaaattactggcaaacggagaagtggtacagacaggcattgtttcagacctgaaagtagcgcctcagcagacggttaaagtccaattaccttttgacacaaagaatatctgcccttgcaaggagctgctgctcaacgtcagttacaagcttaaagctgccgaaactctcctgcctgccggaaccaccattgcttatgaccaactaagcatccgcgattacaaagcaccggaactgaaactggaaaaccaacaaacttccaatgttgcagttatcgttcctactattcaggataacgacagaaattatctgattgttaacggtgaggacttcactctcgaatttaacaagcataacggttatctctgccgctatgacgtaaacggaatgcagctaatggaagacggcagtctcctgactcctaacttctggcgtgcaccgaccgacaatgattacggagcaggattacagaacagatatgcagcctggaagaacccggtactgaaactaacttctctgaaacatgcgattgaaaacgaacaggccgtagttcgtgccgaatatgatatgcagtcaataggtggaaaattgttcttgacttatactatcaataacttgggtgcagtgaaggtgaaccagaaaatggtagctgacaagagcaagaaagtttctgaaatgttccgtttcggtatgcagttccgtatgcctcttgcatttaacgaaattgagtattacggacgtggcccggtagaaaattattcggaccgtaatcacgccgctatgctcggcaaatatcgccagacggtagaagaacaattctatccgtacatccgtccgcaggaaaccggcacaaaaacagatatccgctggtggagactgttaaatatcggtggtaacggattgcaattcgtctcagacgctccgttctctgcttccgcactgaattacacgatcgaatctctggacgacggcgccggcaaagaccagcgtcactcaccggaagtagaaaaagccaatttcactaatttctgtattgataaagcacaaacaggacttgcatgtgtcaacagttggggagctattccattggagaaatacagacttccttaccaagattatgagttaagttttattatgactcccgtctatcataaactaaagtaaaaaacatagttaaaaaacacggtatcagagaacaagaataccgaatttaaagtacttttgcagccggaaactgattctatcaaatcagtttccggccttttttccttaaaccatccctctatacaagagaataacacacgtgcaacaaaacgcatcaatttaaaaacagataaataaaaagtatgaaaagtagaattgttttatttgcattttgcttagcccttctgtccagttgcggcaataagggcaatgacacgggaaaagtcccagaatatgcagtacaggaattacaaaaatcaactgcaaatctaacgacagcttatccggctactattaaaggtaaacaagacgtagaaattcgtccgcaggtttccggtttcatcactaaattatgtgttgatgaaggagctaccgtgcgcaaaggacaagtactgttcattgtcgatcctactcagtacgaagcagccgtacgcactgccaaagcagcagttgccacagccgaagcggcagtgagcactcaacaaatgacgtatgacaacaaaaaagagctgaacaagaaacaaatcatcagcgactatgatctggcaatggcagaaaactctctggcacaaaccaaggcacaactggcccaagctaaggcacaactgaccactgctcagcagaatttatcatttacacaagtcaagagtccgtcagacggtgtaatcaacaatattccttatcgtgtaggagcgcttgtcagcccttctatcgctacgcccatgactaccgtatccgagatcgatgaagtgtatgtatacttctccatgacagaaaaagaattactggctatgactaaatccggaagtaccatcaaagaagaaatcagcaaaataccaactatcaagctgcagctgattgatggctccacatacgccatggaaggtaaggtagacgctatcacaggcgttatcgaccagtctaccggttcggtaagtatccgtgctattttccccaacaaggaacatgtgttgcgcagtggaggtactgccaacgttctgattccttacaacatggaaaacgttatcagcatcccgcaatcggcaacagtggaaatccaggacaagaaattcgtttatgtgttacaaccggacaacacgttaaaatatacggaaatcggcattttcaacttggataacggaaaagaatatctggtcacttccggattgaatgcaggagataaaatcgtaatcgaaggtgtacaaaacctgaaagacggtcagaagattcaaccgatcacccccgcacaaaaagaagcgaactaccaacaacatttgaaagaccaacatgacggtaacctagccacagctttcaattaataatcagataatcgtatgaaattagatagatttattaaccgtccggtactatcaaccgttatttctatcctgatagtcatcttgggagctatcggattggcaacactgcctatcacgcagtatccggacatcgcacctcctaccgtatcggtaagagccacatatacgggtgcgagtgcatcgaccgtattgaactccgtaatcgctccgttggaagaacagatcaatggtgtagaaaacatgatgtatatgacctccaacgcctctaacacaggtgccggagatatttccatttacttcaaacagggaacagacccggatatggctgccgtcaacgtgcagaatcgtgtttccatggcacaaggactactgcctgccgaagtaaccaaagtcggcgtgacaacacagaaacgtcagacttctatgctggtggtattttccctttatgacgaaagcgatacatacacagaagcatttatcgagaactacgcaaaaatcaacttgattccgcaagttcaacgcgtaccgggtgtaggtgacgcctctgtaatgggacaggactactccatgcgtatctggttgcgtccggacgtaatggcgcaatacaagttggttccgggtgatgtgtccgcagcgctggcagaacagaacgtggaagctgctccgggacaattcggtgaacgcagtaaccagactttccaatatactatccgttacaaaggtcgtctgcaacagccggaagagttcgagaatatcgtcatcaagtctttgcccgacggtgaagtgcttcgcttgaacgacatcgccgaaatccagttagaccgcttgggatacaactttactaaccgtgtaaacggccataaagcagtaacctgtattgtttatcagatggcagggacaaacgcgacacaaaccatcagtgacattcaagcattactggatgaagcctcccaatcactgccggccggtttgaagataaacgtttccatgaatgccaacgacttcttgttcgcttcaattcatgaggtattgaaaacattgattgaggcattcatcctggtatttattgtagtatatatcttcttgcaggatttacgttctacattgattcctactattgccattccggtagctcttatcggtacattcttcatactgtctttagtgggattcagtttgaacttgctaacgttatgtgcgcttgtgctcgccattgcgattgtggtcgatgacgccattgtggttgtcgagggtgtacacgccaagttggaccagggatacacttccgcccgtctggcttctatcgacgcaatgaacgagttaggtggcgctatcgtatccattacgctagtcatgatggccgtgtttgttccggtaagcttcatgggtggaacggcaggaacattttaccgccagtttggtatgacaatggctattgccattggtctgtccgccttgaatgctttgacattaagccccgccttgtgtgctgttcttctgaaaccgcataaacaggaaggttccgaagatattcctccattgaaggagcgtatgaagacagcctataaaacggctcatacaacaatgatcaacagatacaccgaagctatcggaaagatgctgcatccgggaatcacactcacattcacacttgttgccatactgggtatgatcttcggccttttcaacatcaatccgataattactgccatcttcatacttcttagtattttggcattaatcggaatgagtacgaataaattcaagaacagattcaacgatacctatgaatctattttgaaacggtacaagaaacgcgtattgttcttcattcaaaagaagtggttgtctatgggactggtcgttgcttctattgtcttacttatgttcttcatgaacaccactccgacaggtatggtacccaatgaagacaccggtacattgatgggagctgtaaccttgccgccgggtacatcacaagaccactcggaagaaatcttggcacgtgtagacagtctgattgcctctgatcctgccgtagcttcacgcacattgatttccggtttcagtttcatcggtggacaaggtccatcctacggttctttcatcatcaagttgaaagactgggacgaccgttcgatgatacagaactctgacgttgtcgtaggttcattatatatgcgtgcacaaaaaatcatcaaagaagcacaggtattgttcttcgctccgccgatgattccgggttactcggcatctacggatattgaagtgaacatgcaggacaagacgggtggagacctgaacaagttcttcgatgtggtcaacgattataccgctgcgctggaagcccgtcctgaaatcaattcggcgaagacaacattcaacccgaatttcccgcaatacatgattgatattgacgcggcggcttgtaagaaagcaggcatcagcccgagtgacatccttactaccatgcaaggatattatggtggtctgtatgcatccaacttcaaccgtttcggtaagatgtatcgtgtaatgattcagtcagacccgctatcacgtaagaacctggaatccttgaaaaatatcaaggttcgcaacagtgccggcgaaatggctcctatctcacaattcatcactgttgataaagtatatggtccggatatcatcagccgtttcaacctttacacttccatgaaagtgatggtggctcctgccagcggttatacatccggtcaggcattgactgcgttggcagaagtagccggtcaaaatcttccggccggttatacttacgaattgggtggtatggcacgtgaagaggcacagagcagtggaagtgctaccggattgattttcatcctctgcttcgtattcgtttacctgttgctgagtgcacagtacgaaagttatatacttccgttggccgtattgctgtccgttccgttcggtctgttaggcagcttcctgtttgtcaacggagtgagcgctatcggtaatatctcgatgttaaagatgattctcggtacgatgtccaacaatatctatatgcagattgcgttaatcatgttgatgggtctgttggcgaaaaatgcaattctgattgtagagttcgccctcgatcgtcgtaagatgggcatgagtatcacgtgggcagccgtattaggtgccggtgcccgtctccgtcctatcttaatgacatcattggcgatggtagtcggattacttccgttgatgttcgccttcggagtaggtgctcacggtaaccgtacactaggtactgcctctatcggtggtatgttaatcggtatgatttgccagattttcattgttcctgtactgttcgtaatcttccagtacttacaagagaaggtgaaaccgatggaatgggaggatattgacaacacggatgccgtaactgagattgaacaatacgctaaataatgaaattcgatatgaagaaacagattctatatatggtgtgtgcaactgctctcctgagtagctgccacatctataagtcgtatgacagacccgaagacattactacttccgggctgtatcgtgacccgattgcggagaatgatacactggtttcggatacaaccaacttcggcaatctgccgtggagagaagtcttcaccgacccgcagttacagtctctcatcgaagcgggactgaaacaaaacactgacctcttgaccgctgcccaaaatgtaaaagcagcagaagcatctctgctgtcggcacgcctggcttatgctccgtccttgggactgtctccgcaaggaacaatcagcagctttgacaagaatgcagctaccaaaacctattcattgcccgtcactgccagctggcaagtcgacttattcgggcagttgctgaactccaaacggaatgctcaggtcactttaaagcagacgaaagcttaccgtcaggctgtacaaacgcaagttatctccaacattgccaatatgtattatacactaatgatgttggaccgtcagttggaaataaccaagtctacagccgaaatcctgaaaaagaatgccgaaacaatggaagcgatgaaagacgctgccatgtacaatatcaattcaaccggtgtagaacaaagcaaggctgcttatgcccaagtgcttgccagcattccggacatcgagcagagtatccgtgaaacggaaaatgccctgtctacatttttgggtgaagctccgcacgctatcaaacgcggtacactggaagcgcaagtacttccgacagaactttctgccggtgtacctatccagttattatccaaccgtccggacgtaaaagctgcagaaatggctttggctagttgctactataatacaaactccgcacgtgccgctttctatccgcagattactcttagcggttctgccgggtggacaaacagtgccggaagtgcgattatcaatccgggcaagttactggcttctgcagtcggttctctgacacaacctctattctatcggggacaaaacatcgctcgtctgaaagctgcaaaagcacaagaagaatcagcgaaactatccttccagcaggcactattgaatgccggaagtgaggtcagcaatgcgctaagtttataccaaaaaaccagcgaaaaggtagaatctcgccggttacaagtagaatctgctaaaaaagcttcggaagatacaaaagaattgtttaacttagggacttcaacttatctggaagtactgtcggcacagcaatcttatctgagcgcgcaaatctcacaggtttccgattgcttcgatcagatgcaggccgtagtcagcctttaccaggctctaggtggtggaagagaagaataactttaaacatatactattatgattagtccgttagcttacgtagaccccgaagcaaaacttggcaagaatgtaactgtcctgccgtttgcctacattgaaaagaatgtggaaatcggagatgactgcgtcatcatgtcttatgccagtatcctgcaaggtactaaaatgggaaaaggaaacaagatacatcagaatgctgtcctgggagcggaaccgcaagatttccactacacaggagaagaaagtagcctgattatcggtgacaacaacgatatccgcgaaaatgtggtaatcagccgtgctacctttggcggcaatgctaccaagatcggtaacggaaattacctaatggataaagtacacctctgccatgacgtacaaatcaacaataactgtgtggtaggtatcggtacgactattgcaggagaatgcacactggatgactgcgtgattctaagtggaaatgtcactctgcaccaatactgccacatcggtagctggacacttgtacagagtggttgccgtatttctaaagatgtacctccgtatgtaattatgtccggaaaccccgttgcataccatggagtgaacgcggtggttctttcacaacatcacaatacatccgaaaggatcctccgtcacatcgccaatgcatacagactgatttaccaaggtaatttcagtattcaggatgctgtacagaagattgtcgaccaggtcccgatgagtgaagaaatcgagaatatcgttaacttcgtgaaggcttcggaacgaggaatcgtgaaataagcaaagttacttttcaatattgaaagggtgacgcctaataaaaaagcgtcaccctttctgtttatagtagggcgacgctctgtgagttattatttcgtttccgtttcgtaattattcaaactccaacgtaccgaagaagtcgggacggtggaagtccgggttctctatttttatcggattccatgaaaggaagtggggggtctgcaattcgtcaccacacttgtaaaagttagcttttatctccttctcatcgagtgattcgatctgatgcttaaagaatacagcatagggaataatcaaggcaacttcccaatcagtttcttccacacgttcttcaaaaggtgtatcacccaaacttgaccagcgctgcacaagatcagtcacttccttcggagcgtgttctctaccgttgcgggcaggaccgacacctatcaggattgttccgatgcagttgcactctatattataatacaccccgtcacctgccggaatagaaaagaattccacacaggaatcagtccatacagaaccgttgtccgttccgtatctggcacgcacactcgcttctttaactttaaaatgtaacaagatagagttcttcgtgtgagcaatgcgaaagtttactttgggtttgtagggatattcagcccaattaacacattgaaccggttgaaaatctatcttttcttcatcaaataatcggggaagcgaacaagcctccacgttagccgcactaattttctttactttcatatttctattgtttggatgatacaaatatagttactttcttctaataaggttcactgaaatgaaataaaaacaacatattttgtataaatgctaattatcaactacttaaacaatattaagaaaaagataatgtttaaccctcccctctaactggagacaaagatagaaagttctattaagcggtatttaagacaggaatttccggtattcactccgaagccggttttgtatggcgataatcatatttttctattctccactgctttatacagtttttcataggtgataaaagaacgtttctgtaatgcatcatattcctctgcatgattttgtatttttatatagataagaagatgtaatataaatatatcagattcaatctgaacggtgcttccctgaacaggttaccggctttttaaacaaatacttgtaacttgacaaatgtggttagagtacatgtattcattcctttaaataccaactgcatcataccatcttaatttatacgctatttatagtcggattacaaagaatttccctacatttgttacgttaatctatgagatctctcattaatgtcctgtctactaaagaactgcaatatttcaaagaacaatttttatattaataggacaataatgtggtattataagatatagctatattatgaagaacctaaaaagaataatttttatactacttatcatccttcctctccgtgtttttgccgactatgagcattttaaactttgggatatgtcggatggtctatccaataatacagtgaaatctatcacccaagatcatttgggattcatttggttgggaacattcgacggattgtgcaaatttgacggagtcgattttaccatcttcagacatgactcccaagatagtttgtctatcatcaataactatgtggaagtcgtagcttcgttgggagatgaactttgggtaggaaccgaacggggattgaatctttattcttataaagagaataattttcgtttgtgcgaatggattcttccgacaggtgaaagacaaaagataacggaaagcatcaaaaatatcgtagtgaatcaagagagtgtctttatattgaccttttcgcatcaactattggtgcgtaaagaaggatgtgtctttgaaccgtgtgactataaaaagaatatagaatggctgtctatttcaggctataaagagggtttattgatcggacatgccaccgatggtttgtatgtcattgatcccgatgaaatgaggattcgggctcatttcccgtttgactcaaagatactgagcgactgtctgtattacagtacaaataaagatatgatttttcttggttttggtataggctatccaagtctcgcttttaggatgaacaaagagaatagccttgaaaagttggaagtcaggataccgtcaagcgtaaagacaattgtcgattataaagatgaaacattatttggaacagatggaaacgggctgatggtttttaatgaatcaggatgttccgacatttcttcgggggaaagtgatatgagtagtgatgccatttattcattgtttgtagatcggagacagaatctttggattggtacataccggggagggctgaatgcaagttcggaacattacgactggtttcagtctttctgcatacaaaataaaaaactctcgtatgatatggtaaccgctgtcgtttctcaaaaggaacggttgtatgtgggactggacggcggaggactgaatatttatgatgtaaaaaatgacaagctactgaaatatacaacgcataatagcggtatttcgggagacaatcttttgtcgttatcagtggatgatgatttcgcctggttgggaatatatggcaagggactcagccgctattcactatccggtcacacttttaagaattatgtcttgccaccggttaaagataaagagagtgcaaatagaatatggcagataaaggacgatggtgagggtaatatttggattatagccgaagacgtttattgtttcaataaaaagagcgagacattcacagtaatcgacaatctgagtaacctgaatgctttgaatattatatttgaaaacgatgtcatttggctttgtacgatgggatatgggctttataaatttgaccggaagacgacagaacctcttgaacattactttaaagaatcagaaaaaacgcccatccccggtaatatggtacggtatatgttcattgattcccagaatcaagtatggttctcgatagaatatgccggtttatataaattagaccaaagttccggggaagtcactccgtatggagttgaaagtggcctgacggatacaaatgtagtggggatgttggaagacaagtccggttatttatgggtgagtacatataatggcttgttccgctataatcctgtcaatggaaagtttattcgttttggtaaggaagataacttgacttctacccaattcaattataacgcgtgttttcaagagggtgatacaatgtattttggaagtacggaaggattgttcagtttcaaaccggaagatattaaatatgacggtgaacaggtcaatcatgtgtattttaccaatcttgaactgttgaatcatgagaataaagttgtgagtctctatggcatacaaccggaggatatacacttgtcatatgatcagaacttctttacgattcatttctcaacgccggagttgatttcccctgacaaggtacaattctcttgttatatggagaattttgaaaacggctggtctgaaatctcccatgcccgacagatatcctatactaatattccccccggagaatattatttttatgtcaaggcttccgacaatgaagggcaatggaccgataaggcatcccgcctgaagattattatcacacccccttggtggaaaaccacttgggcattgtcgctttggggcctgctaatcctgggacttatcatttttatattctggctataccgtcatgaattgaatataaaacatttggtacatttgaatgagatagagaagaaagcggctaagaatattaacgaagcaaagctaagcttttatacgaatattacgcatgaactgcgtacgcctatttttttgataacctctcctttggaggaacttctaacgagtagggagggcagagggcctgtttcggttcctaaatctttcctggtgagtatgtacaggaacgctatgaaactgaacaagctgattagccgaattatagacttccgtaaactggagtccggaaagttgaaactcgagccgcaatcactaaatctggtcactttctgtaaagacttgacggtggattatgaagctctctgccagcagaagaatattatttttcatttcttgccgtcacggacaattattcgtgtcgagtttgatcccgaaaagatggagattcttttgtccaatctcatttccaatgcttttaaatataccccggaaggagggaaaatcgtattatctatcgatgaaacggacgaaaaagtaacgctagtggttgaagacaatggcatcggcattcaaaaagaatttcaggaagttatattcgatcgctttttccagatagaaaataccgaaatattctctacgggggatggtatcgggctttcctttgtaaagcacttggtcgaactgcatgacggaacgatacgcgtggaaagtgaactgaacaaaggggctaaatttatagttgagcttcccaaaaaagaaagagtggatgaacctgtttcttcggaagaagaaatcattattgtgccgaaatctgtaaaagagaatatgcttgtcgtgacagagtcggcctcttccccggcagccccccacaccttattaataatagatgacgagagcgagatactcgatatgctggagtgcttcttaagcagtgattttaagatattaaaggcaagtaatggtatagacggactttctttggtgcaaaccacattacccgatatcgtaatctgcgatgtgatgatgcctaaaatgaatgggacggatttcctgcaattgatgaaaggagataaaaaactggcccatattcctgtcattatgttgactgccaaaacctcggaggaggaccaaatggtggcttttgattgtggcgcagatgcttatctgaccaaaccgatttcattgaaatatctccgtaaacggatcgatcaactgttggcgcgtgtagaatcggcagagatggtgaactcattgacgaaaacggaaaagaaatattccaaagaagaacagaagttcctgttgaagtgtcgggagattattgataataacctgaataattccagttttgagataatggcttttgcggaacaaatggggatgagtcattccaccttgtaccgtaaaataaaagggatgaccggactgaccgttgttgaatttataaatgaataccgcctgttcaaagccgtccaatattttaaggaaggcgagacgaatatcggtactgtatgttccaaatgcggattcaatgatgtgaaacatttccgtgatcttttcaaacgtaagatgaatatgactcccaagcaatatgtgttgagtttatagctggatcagattatctgattcatttattcaccacgaattgccccgaatcgcccaatagccgaatttcaccctaaaaaagccgaattacttcccttttaggcaatgcatcctgcttagttttgcgacaaaacgagggtgcaatgccttgaatagttaattttaaaatcagttttatggaaaaacattttttctttatttcgttaaggaagactttattcctgacagcgacatttgttttattaataggaaacacgcaaccttcctatgcaatgctaggagtagacgaggagttgcaggttatgcagaacggcatagtcaagggacgaatcgtcgacacaaacggagaagcggtgattggagccaatgtaaagttaaaaggaagcaatcaaggaactattactgatgtggatggaaacttttctttggaaaatgtatcggaagatatcctaattgtatcttatattggctttgaagagcaagaagttgccattaaagggcggaagtatgtaaaagtcatattgaaagagaattcgcagcttcttgatgaagtcgttgtagtgggatatggcgcacagaaaaaggtgaatctgactggagcagtggcgagtcttgatgtgaaacaactagagagtcgacctattaccagtgcttcgcagagcttggcaggtaagatagcaggtgtacatattgcacaatcgtccggtatggcaggtgcagacggtgcgcagatcaccattcgcggactcggtacgttgaataatacttctcctcttatcttgattgacggggttatttctccgaatatggatgtggtaaatcctgcggatatcgaaagtatctctgtcttgaaagatgctgcatcggcttctatatacggttcgcaggctgcgaatggtgttgtattggtcagtacaaagaaaggaaaaggagaagggaagtcgacttttaatgtaagtgcaggtctttcttggtctaagatgactgaccagagtaagccggacatggtgacggatccagaaacatttatgctcctgatgaatgaggcgcgaatcaactccggattagagtcagcttttccggatgaagtaattgaaagataccgtacacctaaattcagggatgcgtgttctaccgattggtttgatcagatttttcgcacggctactacccaggaatacaatatgagtgcaagcggcggaaataataagaccaaatattacttttctttaggctatatggaccagggatccatagcatccagtggtaactataaacggattactgcccgtctgaacctggatacttatgtacttcccaaattaaagatcggagcatctattggttatacttacggcgatcagcgcactccgaacggaagtgtagatgaggtctttgcgcttgacctgatgcgtgccaatcctctgaatccggcctataactcagacggtacgattgcgatgcccgataatacgactttgtcctatacgggacaggtgcaaggagagaatccattgaccaagatgctttacaatgagattcatcagaaaaacaataacatttacggtaatgctttcttgagttgggacatttttcctgaactaaaagtgtatgcatacctcaatgcaaatgtgcaattaagagattatagtgagtggaagggctgtccggaggttaaaaattggcgatatgaggaactgcttgcggaaggcgccgatatggaagatgtgattagtgacggttattatggaaacggaagtttgaagatgtcgtcagccagagattaccggattaacccgtatgttcagatggaatattccaagtcaattggccggcatcatatgagagccatggttgctgccagctatgaagcgaccaattacgactattttgatacatccagaggaaagtacatctccaattatgtgcatattctcgattcaggagatccttccacagtgcaaaatagcagcagtatgacacaatatgccattctttcccaattcggacgtgtgaactatgattttgcagacaagtatcttttcgaatttaatctgcgtcgtgacggttcttccagattcggttccaatttcaagtatggtatattcccttctttctctgtgggatgggtgttgacgcaggaaaatttcatgaagaagattcctacgattaactttctaaaactgcgtgcttcctggggacagctcggcaaccagtatagcagcgataatttcccttatattgccaagatcggttatgacggtaattatgtgtgggggaatgaggtggcaacaggcgttgttccgacttcttatggtaacccggatattcactgggagactaccaatgtgacgaatgtaggttttaatcttcatctgttcaattcggagctggtgctggaaggtgattactttatgcgtaagacaaaagacattttattcgatacgccattgccgtacgagacaggattcaaatcggtgttaaccaacctggcagaagtgcaaaacagcggttttgaattatcggctacttatcagaaaagattgaaagacttccatttctccattggtggtaatatgtcacatattcaaaataaggtcaatgccatagaccctggaatgaccggagagaccgaccgtcatatcagtggtaataaaattacgactcgcaataaaccgatgaattcctattatatgttgaaatggaccggcaagatttatcagactcaggaagaagtggataactctccccatgtgaaaggagcaggaccgggtgacttggtatttgaagatatcagcggtcctgaaggaaaaccggatggagtgattgatgccaatgaccgtcagatattgggaacggaatatccgacatggacatttggcgcaaatttatcatttgggtataaaggtataaatatcagtgccgattttcaggggattgcagatgcttatacctatggaacatgcgaatattatactccgacattccaaggttccaattttggccaatattggacgaaacgttggactccggaacatccgagtgagacagtcccgcgtttgtgggttgaaagcggtcctaatgttgactacgccaacagctatttcctgatggatagaacttatctgcgtctgaagaatctggttttgagctatgacctgccgttaaacatcatccgtacgctgaagatggagaaaatgagagtatatgtttccgcttccaatttattcacctggacgaagaaggattaccggggactggatccggaacgctccaacggtgcaggtgaacgaggtggtattccgcaagcgatgacagtgaaaatgggtattgatttaactttctaataactgaaacagtatgaaaaaaatatatgtattgcttttatccgctttctcgtttattatgttgagtgggtgtaatgattggattgaactggagccgaaagatacggtggctaatgagaatttctttaagacgaaagatgattttgaccaggctgtgaccggtttgtactccatgcttcgcccgttggacgacgaagccaaagacggagcgtattttgggaatctgtattgggaagtttgtgcagacgtatgcatgtataagaatagttggacgcagccctggtttgatatatcacggggtgaattgaaatccgtgaccgacaatgtcgcatctttatatcagaaggtgtatgcggctatttcctggtcgaatacgatcattgaacagatagaggccaagcaatcggagtttcctgaggactttgtgaattatgtaaaaggacaggcgcattttgtgagggctatatgttacatccgtctgacaagtctttgggggccggttccaatgatcgatcgtctttatcttccttccgaatcaaagttgccgagaagctcggttgatgatataacgaaccagctgattatcccagatcttaaaatagctgtcagctgcctggagatgactccttataataacaaatggggacttgccaccaaacaagcagctatggggatgagagtacgtgcttatttgtataacaaggattatgaaaatacggtggaagctgcaaaggaattgatggaacttgataaaaccttagaaaattccatgttcttggacgattataaaagcatattcgccaactcgaatgaaaataacccagaaatattgttcagcctgaagtatgtagctaacggaaccaaacagggaagtacgttcaatactccttttggaagcaaaatccccggactgccgacaggaagcatgaatggttcatgggcaactgtatctatcttgccggagtttattgattcttatccattgactgacggcaagacggtggctgaaggatctatggtatatgattctcagaataagtgggccaaccgtggtccccgattcgaaagtacgttttatattggtggttattccgtcgtgaacggtatgcctttcacctctgagtatgtgtgcggcattgatgcacagtgtgcgatagattatccgttaaatatcaacaaaggatatatgaacgaagataaaaagacagaatggttgcaggaagacgagtccgatttcattattctgcgctataccgatgtgctgttgatgtatgccgaagcgaaaacgatgctcggggatatagaccagtctgtatttgatatattggacgcagtgagagaccgtgccggaatagcacatgtggctcatacaacagacccgaaggctatgatgaaaatcatccaggatgaacggaaatgggaatttgcttttgaagggttgagatactttgacattcgtcgctgggggatagctgccgatgtgattaattcgatcacttccgacgaactgtataatttcggttcgcacaaagtctttgttgcacctgccaactatctatggcctttgccgcaggaagctactgatgccaatcctaatctgctccccaataatgagggatattaatttgaaacaagaagtaaaccagtaaataataagtaaataatgaaacatattatacatatcatagttttggctgttattacaattgtatatataagctgtgaaaaggaagattatgcccttcagcgtttgagtgctcctgcacaattgactgctagtcgcggtgatacctcagttttcctaaaatggacgaaagtggaagatgcttctttttatacattggtcagaggattaaaagtgattgcagatagtttgacggttgaatcttatgaagacgactctgctcctgatacattgactgaatatcgcatttatgctgtggacaaccaaggatggcgttcggctacttacgcggtggattcgggttatttgggaatccctgatggcattgaacctcgtgttcctgccaagttagaagcatccgatactaatattgaaggctgtttattatcctggagtgcaggacgttttgccacttcgtataaagtgtataaaaatggcacgttttataaagaggtgacaaacaaggagttcctggattatgcagcttcggtgacgggtgctgaatatactgtatattcggtcaaccacaatggtatgtcgaaaggtatttccgtgaccggcaaaaaggcttatcagtgtatcgacgattatgaaacctacgagatcggaagtgtgattgaaccttggacatttattcaagaccgtatcggatattatacagaggggaatccgcttgtaaccaatgaaaggcctttcaacggaactaaatcattaagcattaaaaaaggaaaaatagagttgatgttcgactggggcggagtgtggaatgacggttattataccataagtttcatgacttataaggcatccggcccattcaaactttattcagattttggtattgatgatacagttcagggtacaggcgaatgggtgcaatataactatcggaccggtctgctgaaagccggagataaattcaagttggtgatagattcaagagaggatgacgatattctctatgtggacaatttgtcgatagaatacgcaaaagaatagttctattttgatgatacagacatgagaatattatatcattatttcttattgaccgttttccttctattcaatgtaccggatgttggtgcatcgagacaactctttgccatacatccggtcatctacccttatccggttgagccgatggaatatcctgaatattcccggcgtccttatccggctctttcctggagtgatttcgatcatcggactcaattcgtagccgggcggaatgtcccgtcaaacgaagctgaactggctgatgttccggggttggtatatcgtcctggcgcttcattcttaaagaatcaggagtttacgggaaagttgcaatatataggaaagcatggaatgtatcttcacaacataggtgggtatggaccgggaagtcctttttatggaagttttggtgaatatatcgtgccggagtggcaaatggaacaaatcagaaagcacctgggacaccggtttaccggatttgatgtaggagaacaggatggccggtttaactttacctataaacagataatggaaccgtacattccggatcgcagaaggcagtatcttgcttcccagccttattttgaccgtgtcgctgcagatttgggaaactggtgcagttcgttgagtgtactgtggtactggcattacattctaaaagaaggatatacgattcttgcaggggcggaaacacagaataagattaccaacggacaggtgcaatatatgcatctgcgcggagcgggaaagcagtacggtatcttgtggttcggtgatgtatcggtgtttgatacatggggatataagaattactcccgagacgagaaatacgagcgtgtgaataaaggaggaagtttatcgttgtttaaacgctcttattatacacagtatatgtataatgcaacgatactcagcatggagtcgggatggtgcgaaggtcattttaccactaacaagggagaattgactcctattggtaaaatgcataccgattgtgcgaactttgtagagaagtacggacagccgggctgtatggttacacaaatcgctttactcaatgatttctattcgggttggatgccggcagaccatatcgcaggccggtttcaggtttggaacgggatggattatgaagcaggtgactttcttacggatgcaatgataagtttatttttcccgaattatgaacggagtggcttttttcatgatgaaacgggagcaatgtgtgcgactccttatggggagaatgccgatgttttacacagtgatgcacgtgtggaagtgatgaaacagtatcctgtcatggtggctgccggaaaccttttcagtggtggaatggagttggcggataaagtgaaagagtatgttcacaagggcggtacttttatagttacggcagaaaatgccgcacgtatttggccggaatggaaaatcgataaaagtagaaccgttccggctggaggaatagtcaggataggagaaaatgaacttgtagaacgggggaactttgaactttatcgggcttctttgcccgatgatgctcatgttctggcaatggttggcggagagccggtagccgttgacattcccgttgggaaggggcaaattatactttcgcttacagcttatggcctgaatgctgctcccttggaatacaacaagccacctacatggatgcaaggtggtttcaacacttttctaggcaggccatatagtttactgaatcacttccggtcgatagtggatgcagtatttaaatctgtacaattgtttgaagtgggcgagggtcttggagtgatagtgaattatctggaagaaggcaaatatcggctggcgatttataacaatacactggagagcctgcctttttcaatacggtcgaagattggaaggataaaatcaatagatgaactttcgacaggagacaaactgtttcaggctcaaggatattggccgaatgggatacggggagatatgaatggaaaagataatgattcgtatatttttggaggggatatacgtttgttcgacgtatccgttgatgaagagagagtagaattggcagagaagatacagcaggcgaaacctgtgagtcaccggctgttggtatttgacgatatcttgttcaccaaagaaacaatcagatatatgcctacctttttcgattattttagcggaatatccgttgagggcgataagttgttacaggcagacagctacgctttgaaagaacagaataagtggttctgcttgcagaaattacagattactgcggatttgcggaaaggatttgcttcaggacgctggacgttcgacagtagtctgccacagtataagcaaaccttgattgagctgaaggaaatagcagataaactctcgcttctttatggagaagatgtactgtttataccgtcaacgccgataggtttttccattccctctgaattagcaggtttaaattttcaactagtgaaaagtccaggacaaggtatgctcaagtcagctggcgatggttatgaattgcttgatacaccgagtttggattgggaaacagtttatggacttctgaaaaataagttacctgccgcacagcatatatccggtggacagcaatcgtctcaacagcatgtattgcccgataatagaaatcatattctggcgttggacagatactccaaagggattcttaaagatatagatgaaattgattgcttctataacgcattcggcggagtctgtgtgagcgcggaatacttggcaaattattcattagacgcacttcgtgaagagaagaagttacttgatgagcgtggtatatctatggtggttagtttcatagaagagataaaccatttcccgggcttgactttatgtgatgccgttcccgaatattatgagaaaagcatggattattataagaggatactggataaaatgggggaattacaaataggtgtggcattatttacgacgcatggtcgggttgagagtgacaagtatcctgcgcaaaaggtatatgttgggatgaaaaagacctttcgttatttgtcggaatatggtgagaaaaggggagttcggttactgctgactaacacacggttcaggattgcagatacagtagataaacagataaaaatgatacgcgagataggagaaagtaatatcgggatagctttgaatctcaaccatctttcggaaagtgagtccggcttgtatgtacggaaattccgtaaacagttgagggaacgattaggtgcagtgattctgggaggtcctgtttcctataaacattcggaatacttacctgtcccaaatagtgacaagtcggttcgggtagcgaatgatttggagggggtattgttaattgataaggtttaccctcttgatagagagcgtgtgtataaggactgccaatatatgggttggataaaggaatgagataacatctgtatttataatcggatttggatagaatattataataagaattggatatgaaacaagagaaattaattcttctttttttgctgtgtttattaagtgataccctgtgtgctaaagttcagacagacgaactatgccggcagagtatcaatttcaaccggaattggaagtatatgcaaggtgattacacaggcgctgaacggacggactatgatgatagtagttgggaaacaattggaatacctcattccttcagtattccttattttatgtcgaaagacttttatacaggctatggctggtacaggaagtcttttgaattaactgcgaaagatttgaaacaacagcttttcgtggagtttgacggagtatttcaggaagcggaagtctttgttaacggaaagaaggcaggtacacataccggtggttatacaggtttctattttgacatatcttcagcagtccgcatgggaaataatgtgattgccgtacgcgtaaataatatttggaaagccaatgtagcgcccagggcgggtgaacatgtgtttagcggaggtatatatcgtaatgtccggctggtgagaaagtcgcctgtacatattgactggtacggtatatttgcgacgacaccggatttggcagcgcatcaaggcaaatcctcggtagtcagggtttgcacggatatctgtaacaaaacgaataaaacgatggaattcaaactcttgacggaagtaaaagatgccgaaggccgaatacttgtttctgtggagaatgaggagaaagtggaagctaattctatgaagaagcttgaacaaatcactgaagcggtcaatcatcctaccttatggcatcctcgccatccttatctgtataaagtagtcagttcagtctatcaggggcaaatgttgatagaccgagtagaaacacctttcggatttcgttggtttgagtggactgccgacaaaggttttttcctgaacggagaacacttgtttttcaaaggagtaaatgtacatcaggatcaggcaggctggggagatgccgtgacggaagcagccatgcggcgagatatcctgttgatgaaagaggctggctttgatctcattcgtggttcgcattatcctcatgcgcctgctttttcgcaagcttgcgatgaggaaggtatgttattctggtcggaagcgcctttttggggaatcggaggtttcagaccagatggttactgggactcaagtgcttatccggtggacaagaaagatgcacaagcattcgaagcaagcgctttgcagcagttggaggagatgatacgtattcatcgtaatcatccttctatcgtggcgtggagcatgtgtaacgaagcctttttttctgcaccggaggcgatgaaaggggtacgtcgcctattaaagagaatggttgatttgactcatcagctcgatccgtcacgtcccgcagccattggaggagcgcaacgtccgttaggggatgagagaatagataagataggtgatatcggaggatacaacggagatggagcaacgcaaccggattttcagaatccgggtattccgaatgtggtatccgaatatggcagtgtgactgccgaacgtccgggggaatataatcctggatggggcgatttgcaaatgaacgatgggtggaaaggaactccatggcgcagcgggcaagcgatatggtgtggctttgatcatggaagtattgccggcagtcaattgggaaagatgggaattgtagactatttccgtattcccaaacgctcctggtattggtatcggaacgaatatacccgggtggcaccaccggaatgggcgggagaaggcgttcctgcgcaactgcgattagaagcatctcgcactgataatatccttactgacggcacggacgatgtgcaattaatggttacggtcctgaatgcagcgggaaaacctgttagtaattcccctgcagtagaactgagattagtttccggtccgggggaatttccaacgggaaatatgattcgttttgaaccggacagtgatatccgtatcatggacgggaaagcggctattgcttttcgctcctattatgcgggaacctctgtactcgaggccacctctccgggactgaaaccggcacgtatagagattgtttttcagggaaatgaggcttataaaaaagggctgactcctgaagtgagagagcgttcttatgtacgttttgtaagagagaagaaggagaaagcggtacaggagttcggtcggaacaatcctactttttccagtagccatcacgaaaatcaagtagcgggatttgctgcggacggtaatttgcaaacctattggcaggcatccaaagatgatcccgctcctttttggatattggatacggagaaagagcttgaattgaagaatattcaggttcgatttccgaaggaaagcatctatcgctatgtccttgaagtgtcgggagataaagtacattggacagtcgtgtcagacaaacaggctaataggagaaaagaatcgcatattgctatggattttcctgatgccggggttcgtgcacgctttgtacgtatccggtttgtgaagaagtcaccggcagttattgcagaggttacagtaaggggaattgtatgcgaataaaataaaattgttatagtaatcgttatatagcttatgttattgagaagaaattttatcaagagtatttgtgtgcttttgctttttgccgggccggttgcgggtgttgaacaaaagacagaaaccgttcccatgcgactatggtatgaccgtcccgcaacgaactggatgacctctgccttgcctattggtaatggagaattgggagctttgttctttggtggtgtagagtccgagcagatactctttaacgaaaagactttgtggacaggaagtactaccacccgtggggcttatcagaaatttggtgatgtatggattcattttgatgggcaggaagatgtccgggaatatcgtcgcgaactttctttggatgaagctataggcaaagtgagttatacgtcggctggaacgcattatttacgggagtatttcgccagtcgtcccgatgaggtaattgtgctcagactaagtacaccgaaagccgggaagaaacttaatttttccgtcagccttgccgacggacgtccgggcacccggcaagaagtcaccaaagatggtatcctgttccgtagaaaactggatttattatcttatgaagctcaattaaaggtcattaatgaaggtggcacattggtggcggatagcaataaactatgtgtgaatgcagccaattccgtccttattctattgacagcagcgaccaattatgatttatcttctgctacctatgtgggagaaacttccggacaactgcataagcgcctgacagaccggctcgcacgggcatctgcaaaaggttatgatcagctgaaatccactcacctgaatgattatcaatctcttttcaaccgcgtccggtttgatttgaggacagcagcaaagacagggggaaaaataggaatgaaaacagaaatcccctctgttcccacgaatgaactggtacgcctgcataaagaagctctttatttggatatgttgtattttcaatatggacgatacctgatgatcgcttcgtctcgtggaatgaatttgccgaataatctacaagggatatggaatggagataatgctccgccctgggaatgtgatattcatagcaacatcaatatacagatgaattattggcctgctgaggtctgtaatctttccgaatgtcacgaacctttcatccggtatattgccactgaagctcttcgcccgggtggtagctggcaacaattagcacgaagtgaaggactcagaggatggactgtaaacacacaaaacaatatattcggctacacggattggaatatcaaccgtcctgcgaatgcgtggtactgcatgcatctgtggaagcattatgcttacacacaagatatcaactatctgcgttctgtggcctatccggtcatgcgcagtacctgtgaatattggtttgacaggcttcaattaacggctgacggtgtactgcttgctccggcagagtggtcgcctgaacatggaccttgggaagatggagtggcatatgcccaacaactggtttggcaacttttcagcgaaaccatgcaggctgtacgtgtcctgcgaggagcaggcattccgttggatgcagattttgtaaggaagctgtcggagaagttgaaacgcttggacaatggtgtcacactaggtgcctgggggcaaatacgtgagtggcgggaagatagtcagaaacttgataccttgggaaatccccatcggcatctctcccaattgatagctctttatccgggtaatcagatatcttactataaagacgcaaaatatgcagatgcggcaaaaagaacgttagaatcacgtggagacttggggacggggtggagccgtgcctggaaaatcgctgcctgggcacgcttgcaggatggcgaacatgcttaccgtttgctaaaatctgctcttgacttttctacacttacagttattagcatggataacgaccaaggcggagtttatgaaaatctttttgattcgcatccacctttccaaatcgacggtaatttcggagctacggcaggcattgccgaaatgttactgcaaagtcatcagggatttatccacctgttgcctgccttaccttctgtttgggcaaatggcagtgtgacgggattacgtgcggaaggagactttacctttacaatggaatggaatgccggacggctaacacaatgtgccgttacttccggtcatggtggagaatgtcggatatattgccctgctgcccggtggttgaaagtcaaaaatagcaagggagaaaaaattacggtttcttctattgataaagatgtaatctccttttctactgtaaaaggggagacttataacttttccatattgaaataatagtctctgctaccctctttgtttcaccaggctttggaacaaagagggtagcagagactattttcgtttgtagtaaactacaacataggttgtaattgctttctttgtatccaaattgggcaagttaaaattcaactcaaatttaaaaaaatttgctcttgattcacctccatgattagtttttatgattaattatcatggttgttttttagggttaaaattactcttttctcaaatagaatactgatatccagtgtccttcataaaacttctgactaattttgcctctttcgaataaaaacaatatatttgccagtagtaataccttaaaaaacgaattagtgagaaaagtaatccttttatttctgctttttttaagcgtagacaccgtccgtacacaaggacagaacatcactttcagccatttgaccactgatgatggactttctcagttttctgtcaacagcatgtatattgatgaacagggaattatatggatcggtacgcgcgagggactaaaccggtataacggtaatgatatcaagagtttcaaacttaaaaagaacgacccgaacagtctgttcagtaataccgtactacgcatcaccggaaatagaaatggtaaagtgtacctgctctgtaccgatggtgtagcggaattcgatctggcgactcaaaggtttaaaacattgttgcaggggaatgtagacgctatttattttaatgagaagttatatatcggaaagagggaggaagtctttgtatacaatgaaagtacgggcaacttcgaccttttctatcatctcgcaggcaaaaacatcactctatcctgcctgcacctggataaaaacaaaaatctgtggatgggaactaccagcaatggtatatactgcctgtcggaagataaaagcctttcccggcctgtcacaaaaggcaatataaccagtatctatgaggattcttccaacgaactgtggatagggagttgggaagaaggactttaccgtgtaaaaacagacggcaacattgaaaatcttcgccataatccgatgaatacgaacagtctatgctccaattttgtcagaagttgctgcgaagataactccggggatttatggataggaacattcaacggactgaaccgatatgacagagaaacaggtaagtttcacctttacaccgccaatggaaacagtcccgacgggcttacccattcttctatctggtgcatcgtaaaagacgggcagggaacaatctggctgggaacttacttcggcggagtgaattacttcaatcctgaatatgaaatctatacccgctataaagtgggagacacggagaaagcaggtttgagcagcccgattgtaggcagaatgacggaggacaaggacggtaatttatggatttgtaccgaaggcggtggtgtaaacgtatacgaccggatcaataatacataccgttggtatcgccatgaggaagggagaaacagtatttcgcacaataatgtaaaagccatctattacgaccgtgctaacgagatcatgtggataggtacccatttgggaggattaaacaagctcgacctgcgtaccaaccgttttacagtctaccggatgaaggcgggagatccgacctcgttaccctcggatattgttcgcgacattataccgtataaggataagctggtagttgccacacagaaaggtgtctgcctgttcagtccggcaacaggtagttgtgagcagctttttcaagaaacaaaagaaggaagaggaattggcatggtggccagcctttgtatagacaatgacggtaccctatgggttgccgccaccggagagggtgtttactcttatcggttcgacactggcaagctgaccaattatccgcataaccctgccaatccgaacagtctcagcaacaacaacattaacaacatcatgcaggatagtaacggcaacctgtggttctccacttccggcagcgggcttgaccgttaccgcaaggaaagcgatgatttcgagaactttgatatgcagaaagacggtttatccagtgactgcatttacgaggtattcgaatcatcgatacaaaaaggacatctgttgttgattactaaccagggattttcagaatttgactatccgaaccagaagttctataattatggcacggaaaacggattcccgttgaccgccgtcaatgagaatgcgctgtttgtgacacacgacggagaagtgtttttgggtggtatccagggaatgatttctttctgggagaagaaactgcatttttctcccaaatcttacaacatacttctttcccgtttgctggtcaacggtaaggaagtaacccctggagatgaaactgggattctggaacagtcaatctgccatacaccggagattaaattgagggcgaaccaatcaatgttcagcattgagtacgccacttccaacttcatccccgccaacagggacgaaattctttatcgtctggaaggcttctccgacgaatggaatcatacgtatcgcaaacagacgcttatcacttatacgaatctgaatccgggcaagtacacacttgtcatcaaatcacagcgggacgggatcaaagaagccaaactgctgattatcgtccttccgtcctggtatgagacatggtgggcttatctgatttataccatcgtcactatcagcttgttgtggtatcttatccagaactataattcaagaatcaaactccgcgagtcattgaagtacgaaaagaagcatatcgaagacctggaagcactgaaccagtcgaaactccgcttttttacgaatatttcgcacgagttccgtactccgttgacactaatcgtcggacaggtggagacgttgttgcaggtacagacgttcacacccaatatatataataaggtattgggaatctacaagaacagtctccagttgcgggaactgattaccgagttactcgatttccggaagcaggaacagggacacatgaaaatcaaagtgagccggcacaacttggtgaatttcctgtatgagaattatctgctctttctcgaatacgccagcagcaagcaaatcaacttcaagttcaataaacaaaaagacgatattgaagtgtggtatgaccaaaagcagatgcagaaagtaatcaataacctgttatcgaatgcattaaagcatactaaagctgaggatactatctctatcaatgtatcgcaggaggaagactatgccataatcgaaataaaagacaccggctcgggcattgccgccgcggagattgataagatattcgaccgcttctaccagaccgaacacctcaactcgttgaataccggagccggtacaggcatcgggctggcactgacgaaaggtatcattgagcttcaccaaggcaccatccgcgtagaaagtgaaccgggcaaaggaagcagcttcattatcaccctcaaactggacaaaaagcacttcacggaggaacagatagcacaagaaagcacagaatcaacgatccggcaaacggaaacgattgttccttcagtggagataatacctgattcggaatggaaagaggaagaaaataaacggattgaaggcgccaagatgctgatagtggaagataatgaatctatcaagcagatgttggcaggtatcttcgaaacgttctatcaagtcagtaccgcttcggacggagaagaagctttggaaatgatacaaaaagagatgccgagcattatactgagcgatgtcgtcatgcctcgtatgtccggtacggaactttgtaaacggatcaagacggatttcaacacttgccatatcccggttgtgctgttgactgcacgcacagccatagagcacaatatcgaaggactgaagatcggtgcggacgattatatcaccaaaccatttaatacaaacctgctgatttcgcgttgtaataacctcgtgaactcccgcagactgctgcaagagaaattcagtaagcagccgcagacttttgcacaaatgctggctaccaatccaatggataaagagatgctcgaccgagcaatggatattatcgaacgccacttggatgatactgatttcaatgtcaacatctttgcccgtgaaatgggtatggcccgcaccaatctgttcaccaaactgaaagcggtgacgggacaaacgccgaatgactttattctgaacattcgcctgaagaaaggggctgtcatgctacggaataaccccgaactgaatattacggagatttccgaccggattggcttctcttcttcacgctactttagtaagtgtttcaaggagatttatcatgtcagcccgttggcttaccgcaagggagaagagaaagaagaaggagacggggaagaaacggacaatttgtataatggtgataataattaatttatgtattcacctaccacctccccctacgggtactcctccttcccgaaggaggagaattaaagatactgccgattcgctcttgcagccataaaacagggccttttgtgccacaagtgtgccaccctattggcacgcttgtgccaacgcactggcacaagcgtgccaaaggcttggcagggtcgtgccaatacgttggcacaaggtcagcaagataacttcgaaaaacaagcaaggttattaaggagaacaagcgtagaatcttcacacttcacatcacagagtaaagcctttcgtgtactattttgtacttcacttgtacattcctgctccttcttttcctttcaatcatttacctttgcttccaataattcatcccttaaaaatcaacttcatgagaaacgtatcacgtatacttccgctattgcccggcatcgcaatgttgtcaggatgtaataatgccgctcaaaagagtaacggacaaaacgaccagaagcctaacattatttacatattcgccgacgatcttggtatcggtgatttgagttgctacggagcaaccaaagtgagcacacccaatatcgaccgtctggccggacaaggcgtgcaattcacgaatgcttacgcaacttccgccaccagcactccttcccgttttgggctcctcacgggtatgtatccctggcgtcaaaagaacacaggtatcgctcccggcaactcggaacttatcattgatactgcctgtgtcactatggcggatatgctgaaagatgcaggatacgccaccggtgccgttggcaagtggcatttgggactgggaccgaaaggagggacagatttcaacaaacagatcactccgaatgcacaaagtatcggcttcgattatgaatttatcattccggcaaccgtagaccgtgtgccatgcgtgtttgtggagaacggccgcgtagtgggtctcgatcctaatgacccaatcaccgtcaactatgagcataaagtaggcgactggcccaccggagaagaaaatccggaactcgtaacattaaaacccagccaagggcataacaataccattatcaacggtatcccccgcatcggttggatgacaggcggcaagtccgctctctggaaagacgaggatatagccgacatcatcacccataaagcgaagaagttcatcacttcccataaagaagaacctttcttcttgtatatgggtacgcaggatgtacacgtgccacgtatcccccacccgcgttttgcaggaaaaagcggactcggcacccgtggtgacgttatcctccaactggactggaccatcggtgaaattatgaacacgttggatagcctcaacatcgccgacaataccattctggtctttaccagcgacaacggtcccgtcatcgacgacggctatcaggaccatgcctacgagcttctcaacggtcataccccaatgggaatctaccggggagggaaatacagcgcttatgaagcgggcacacgtatcccgttcattgtccgctggcctgccaaagtaaaaccgagcaagcaacagtctcttttctcacagattgatgtatacgcctcactcgcctcactgctgaatcagcctttgcgcaaaggtgcagcccccgacagccaggaacacctgaacacgttcttaggcaggagcaataccggtcgcgaatacatcgtccaacagaatcttaataatacgcttgccattgtaaaagggcagtggaaatatatcgagcccagcgatgctcccgccattgagttctggacgaaaatggaacttggcaacgaccaacagcctcagctctacgatttatcgtccgatccttcggagaaaacgaatgtggcgaaacagcatcctgacatcgtaaaagaattagctgaattattggaatctgtaaaagagaaataaatataccggaataacagaattgtatgattttataccaatcctgaatcattctatccacaggagagagcgtaaattgcatacatttgtaacagagaaacgataaagtcacattacaaccaaagtaatatactgcacaattcttctaacctttatcaacagatttatataaaaatcagactttgatcaatttacccccaaaagagagaggcccttcgagcccctctctttctttagttgatatttctcgtatcctcttatttcaatgccttcaaccaggcaggcacaaagcccaggcgtttctccagctgcgcttcgtaaagagactgcggctctaccggagttccattactttcgtccagttttacttgctcctgcacaaaattcaacggttcgccatgaaaaccgacaataacgggcggaaggaacttccaacctttaaagccgatacgccaccagtcgaatacaccggcaggagccgaattaccgcttgccgtgcgcgatctttccgaatacatattccaaatagtgaggtcatcgaggtgattgggaagttggttgtaatcacctccctgacgagactgcatgaatccacccgtacaattatcaatcagcgtagcacgcggctgcgtggcatgagactcaaagcaggcatccaatccccaatgtacccgccaaatgacagcacccatactcggttttgagactccgcaagcatgatattgtcctgccccctgctgtatgacgcctctattatctattagaggtccgttggtacgatcggtcactttgccgataaacacccgcgacgacccttgcgaccgaatggcggcatgaccacgattaccgtctatcttaatatcgtaggcggacacgttagcggaagacgtaatcgagttggcctcactaacacttataaagttcacccggcgcatccacgagtttgtcaggcgtgtcatctttatcggtttataagcaccgtcatgcgcccagtttctgtgatgctgaaaatcatcggtggcatgtcctacgaaagtcacgtcttctataccgacttcctcataatgcggatatttgtggatcgcccaaccccaacgagaatcaacttcgtgcattataggttctttaaaagtgattacattcccgctttttgccacaatttggtggaagtcctgcacctgcacacctacatttataatattctccattgttggttcgggtgcatagggagacaactcgttgcgtaccagttccgggtcattattctgtaaatacaggcatacccagtcacctttactcagcgaagccgcatcagatacttccacgctaaaagtacctttagctgcgttacccgtgatatcacagagtttcgacaacccggagttatgtttaatatcaatcattaccggcgacgaatacatggtagtaatatcatccggcaagttcggagtatccattatcagctttgttcttcctgcgccatctcccttaattacaaaatggcctgcgaatatatagatactggaacttttattatttcctttactatccaaagaatatgcttcatcaccttcctttcccaataccggcttgcccggctctattgtattgtcatcgtcattatgcaatacgtattctccttccgggaaataaatgacaatccgggcatttgcattgttgtaattcttaccgtccttacgggtcatgttattctcctgcaatatgcttatcaaggcttcacgggcagtcataccacgggtttccatacgttctttcacattgaaaactttatatcctaatgagaaagcctccggaggtgtcacttctccatgtttatatccggcatacgaataatccaacaatacattgtcatcactattcatcaggaactttttccacgcttgtgctgtgccgttattgcgggtatccagtttaagcacactcccgcttgtacgggattccaaagtgattgtattcgtctgttcatctaaaacagccgaacggtaaagagagaaatcaacagccgtttttccttccaatgacggagccggagtgtcactcaaacgttgccactgatagccattgtaagaaacttgccaacagccgtcctcccccaatgcaatttgaggagtaagaatgccttttcctgtcttgtttaaagcaggagccggattgccatgcgtatctgtcagaatgcgtgaagtaccttccaattgataattccagtaaccttctttatcaattccaagaaggggaatatctttatcgtcggcagtttgaatataaacatccgctatctgtcggttactcaattgaagtttgtaattacccttctcgtcagaggtgtagtctacaatctcggctttgccattcatcatggcctgataagccgcgatattagtattgtattgcgcagtgagttctgttaattgttccggttgctcgggaatagttgggttatttattacttcatcgtccgaacaggaagtgaaaactataacagcaaccaacatacaagttgtcgctatactatgtaaatcaagtttcatgtttttcatatttctaaagtctaataatgttataaaggcgaagaatccgttaaacccaatattagcattaatagattcttcgcctttatcaaatttaattgcagcaactattcgataactgcacctataccttgatattccggtttaagagtatattttccttcaatgtctataaaaccttcttcaaaaggagtagtagccgtagatgtttctattgtattattaaaccctgctcctggtgtagagttgaaaggtctccaagtcaaggttgttgtcatagccggagtaaacacccgattatttataaaatctttataatcaatagtttcattagcgactgcacttcctattaaggcttttactgtccccttttctccattatcataccaaatcaagttttgtttcatactccaaccttcttcaaagggaactttgacataataattatcagaatgattaaacatattgataaacgtattattattaatggatacattaccattcacatttccggtggtgagcatcatcaaggtgaaattacaataagtatcagcatccctacaataaaagatattattcttgatttcgatattcgtataagcctgagtatacaagtttaaaaagttcaaagatttaccggtattttcagacattgaaatataacaagattctatcataagatcggtaattcccactcctgctgagaaatacgagaagtttttaccacttggaatctctattttacacctatcaaaatatagttgtttaacaacctcgtttccacctaagttgaaccagtaagctctcgtcagattttcacttccttctaaaagatgtattcctttacacaacaaagcaacctcaatagcaggcgtattgtttgcagttttaacctttgaatactcatctttactttctgctatcaaaatcagatttttcaaactctttttcgataaagatacagtagcatttcttgcaataaagaaaactccttcttccgatattgtttcaccatcttgtatcaacgttgcattcgggttatcatatttattaagtactacatcaccgatcctgatatcaaatcctgcctgatattcagcccagtaactatcactggtagtttttgcctttatctgatctgttgccgaatttactccatgagtcacttctacaataatcgtacactcgctcggagttgcaggaggtgtcacagtcactgttacttccgttgttccagccacatattccgacagttttgcattccaatcagcaggggcttttactcttactaaatcaccttcagccaaatttactttcacagtaaaggaagacgcacctcctccggctaccaaccaaagatcatctgttacaccttcgggaacattaattgcacattccaatcctttcacaataggaatcagatactcctttccgccaaaagtaactttaaaattatctccgtcaacagttgcgttgctgataggattcgaacctgtatttataccttcagccagaccgttttccaatactttccaggttgaaccgttgtcataactcacataccaatactttttatctccatcggccggattgggtgcaatcttaaattcgggagtaatggtagcatcttccccattctccgcttgagcacgccagcctgtatctgtaccgccaataaaccaattaccatttgcaccgatctcaatagaaggatagttgcctccggtcactcccggagtcaaagtcaatgtttcgccattgcttaaggtcaaggtataagtatcaccattgatagagtaatcggtaatagtcttgttgccgtccaacagcacacggataatgttcatctcatcgttcaactgctgtacctgtgcctcaacattcgtcacacgatctttcaaggcatcaatgtctctttccaaatcgtctgtattacatgacacaaaagccaatgcaaacaaactgaataatatgaatgatttatagtatttcataatgatttcttcgcttaattattaattcaacttattcagcaaccgtcacctctaatgatttaatcagacgatatccttccttagagaatatctggaaataaacagtatatttgccggaagccagtccttttgttttaatcgtcagattatcggaagcgtcatcagtcaagactacctgtacaggtgtgggatctataatcactctggctacattcgtctgttttgccgtcaataccgctgaacctcccttcgctacatttacagaagtaatattcgatgaatcaccttgagaaaaagtcatatccaaccctcccaataaagggatctcggttttcgagccgtctgtaaattcaaaggtcacgatattaccgttcaccgttacatcggcaaatatacctcccggaatctctccaatattggcaatgttgtaacgcccgtctatacgttgaggttctccaccgccaacggcataacaccagtaaccgtccgcatcaatcgagatagttggagtttgtccgtcggaaccgtctacgggaacagcaggacaaggattgccttctttatctttcaattcaacggttctaccgtcaagggtatatgtccaatttccggcttcattaatgccaagtgtaggaatatctcccgcaggctgtccgccataaacaaccaattccgtaccgtcactcagtgaaagtgtatagttacccttttcatccattgtatatccggttacaagaacaagtcctttcactgcatcttggaaagatttgatgctcgtattcaaattttcgagatcatctgtcaaagcatccaaacgagcattcagatcgtcgatgtctttacgtatatcatccttatcatcacaggaggtaaaggtgatgacaggcaataagcaaactaatagtatcaatatctttttcataattcttagttttagcgttgtgcaccatattgagtgtaaccttctttgggaatgaatgtccctgtagatttgttaaaagtagccggatcagtggtatcataaagatcaacatcattacttgtaaaaccaactgaagtatcacctatcttattttggaaaacattcagagtcaatccggtttcaaaaagataagcataattgttctcggctattgttaccttagatttttccgcagatgccactcttataaggaatgccggatattcacgataagtaaaataataaatgttcttattgactgtgatatcaccaattttcgaaggataaacaatagcggaagttttcccatttgaataccctgattcaatatcaataaaggtattggaagttaatgttagtttattcacactataacttggcccttggaacaccttaaaattctccacgttagaagtggcttccggaactcctgaataatatacaatattattttcaaatcgaagttcattacagttcatattagtaaccaagtacaaattagttccagtattttcaacctttatattagtatcagtcattccaaaatagccaatactagcctcatctttcacctccggcatagcaaaacccgatccaaataataagccgcttattgtacaccggtcgattataatactagcttccttagattgaacacgtacaggataagttgctgttgctgtatactttatatttgtatttttacaaatcaaggcattaccaagataaatagacttatctatgttcaggtttattgaagtaacctcatctgaattaggaataataattagattttccacaactgaggttccttggttatatgtcaatgtcaaatcgtttgcagacacgaaataaacaccaccggctatcgccccattagtagtaatctcttgtgcttcaccatacttttcttttgtaatctccagcccgcctacaataacagcctgtccttcattatacatatccagattagaagcaagtcctttcggattcttcacttttatcttgtcaactgcccagaacaagccttcctgtacctgaacagttacatcggcagtattatccgccgcggctctcgttaacgttttattctcagcagccggagcaaagatcaacaactgataattatttcctttttcatcggcaacatccagtttgttcaaagtagctctccaaccttgcggataagtaacctgcggattctcaccttcaatcttagcaggaatcaccactctttctcctttattgataatcaggaagtcctcatcatcaaatgcaagacctgttctatcaatagcacaaaccaaagttgccacgataggaagtgtatgcacagtcccatctttaagagtcacaacaaagttgctaccgtctactttggcagattcaaagatctggtcgcctaaagaactgccaccggcaatcccctctccaccgggaacattcgcccactcaccgtcaccgaaacgtatctgccaatttccattctgtacacgaaattcgggatagccctccccattcttaccgttctctcctacggctactacgccggtagaaataccgttgatataccatttcccatcatctcctatcgtaatctccggttcgttgactgttccttccttaccgatagtcaatgtcagttgggtattatcacttaaagttatgacatatttcgcagcaaccccattctctttaacagtctccactttactgactgtcttattctgaggatcaaggatgtagccgatcacagccagattatcattcaacagtttcacctgctgctcgataagcgtcaccctatctttcaggtcgtttacatcgtctttcaggtcgtccatagtacaccccgcaaccgcaaagcccatgataacgaaaagtatatacgattttatgtacctcataatctattagtatttaaagttattctgttacattgattatcaattcacaagtcttggacgccacatgtgaataatttgcgttattcatcagaaacgtagcagtatatgtacccacctgattataagtataagagtaagactccagatccagagaaatgtcttttaccttcactcccgaatccggttcgggacattccgccagattcagataatcggaaacaagccaattatacttccaaggattattggcagccgtaccgttaatagtaaatccgccgctttttatactgctcaagttccacatgccagtcactcccgttgaaacagaaccatattcaagatctttaggcatattttccggagcctgttcttcatacttcgtcttattcttcatgttcaatggagtaaagccgaaagaacttgcataagcagtagtgacacgtccgttcttccatttggtctccacacacatattcagaatattgaatgtagactgaacaatagtagcctccggatcttccggattattagcacttattgcttctttctgatctctgttcagcactaaagccagcgtcagtttcttgccaatatattctttgaccgatttactgaaactcaaagctccggctgcactggtcacaggtgcttgcggcagttgcgcacgtgtgataagttccttccagggagtattcttctccacaagtacagaatcagcctcgaaattattcttgctcattcccgggaaaaagatcgtatttcccggattatcaggatcttcttcttccgccagatacaacacatcaaactggtctttgcatgaattggctaccccgtattgagcccaaatcgaaaacttaaagtcgcatgacacaatatcttctaccgaaatctccttccggtcacgataaatatactgatgaccgatttcgccactgaagaaagaaatgtaatcaggatcaccgtgaaagagaaactcgacaggagtccccttctttacagtcaggatgttgccttcgtaccgtacattctcattggtagccacagttacactgacatcagtcagatcccggtccaactctttttcgcatgaagcaaacaagagagttcccagagttagtattaagaatttatatgttttcatcgttgtattctcttcaaaaattattaattggattaaagcggattaccaaccggggttattgcccgtaatcagtttgttgacagctttctcggcatccggaatcgggaagtactgataagcggaagatacccggaagaaaggtgcagcctgccctccctgagtccagttgtttccactctgtgccagcactgcctgctcgttcatcttatctacaaagtctccccaacgaatcaggtcgaaacgacggagatattcaaaacaaagctccattgcacgctcatcctttataatagtaagaaagtcctcacctgaagtaatctgacctgtaagatctgagattccggcacggtcacgtacctctttcaggcattcttcggccaagggcgtcggggcaccgttatattcattctccgcttccgcaatcatcagcaacacatccgagtaacgaagtatagggaaattgatagaagtacggttcttgtccttctttgcagcaggctcatattcccggcggaacttggcacaacacaaatctttcctttccttaccggcagcaaccgcttttttgtaaacatctccaatctgctccaccttactgttatattcttcaccctcattggctccctcataattatacgatctgtctccgtaccagccggcacctttcaccagatcatacaacgccttgttttcaaaagttcttcctacaattcccaagtcagtacggtccgcaattctacgatatgtaaaaggggcaatgttccaggtgaaacgttcattatcaccattcgccacatacaaatcataaagtttcggagttgcccaaataaagccataagaatatcccgggtcagccttgcctacaacattagataaagaagaaaagtccgaacactgaagcccgatcgtatttccgatacggccttccgaacgcacgtctcccgttccgtctccggcaaactcaacttcccagatactttcattggcagtcgtattgtatttgtcggaacacatatcaataaacgggtcccagtaattagcggcaagcgtatgcccctgtgtccgcactttctggccgaaatagctggcacgctcgaaatacgacttgttttccgcatcggccggtttaccgtcgcgcttatgttcaccggcccagaataaatagacacgtgccaacataccccatgccgtcgacttggagatacgtcccggcttatagcttaactctctggcagagagcagccctccggtttcttcatcggcagcctcttccatttctttcacgataaacttataaatcacgttcttatccgtacgtgctatatccttattagtcaccgttccggacgaataggtagactccgtcttgaacggcacatctccccagcactgcaccaacgtaaagtaataaaacgcacgtaagaaacgagcttccgatttgtattgcaaacggctcttatcactcattccggggacattgtctatctgttccagaaacatattggcacgctcgatgccgttatacaaattgagccagaggttggtaaccgccgcatcactggtggtagtgttattacaaatcaatcctgtattggaaatacgtccggtagaccctccataaaactccaagtcgtcaccgcctgcaagaaccatgtaatcacctccgtagaaagttgactgtcctaagttcgaatagataccggtcaggaatgattgtgcttccgcctcattctggaaatagttttccggtacgattttatatggttccttctccaaaaagtcacatgacgctatcgtacatgtagccaacaaagaaaggaatgctatttttatctttttcatatcttctctatttttatatgatttcaactaaatactaaaacccaagattaattccgaagttgacagcataagccctcggataagcggaatagtcaagtcccggtgtcagggcactgttacggatagacacttcaggatcatagccggaatagccggatattgtccagagattctgtcctgctacgtaaacacgggcagtagagattccccatttcctaagcgctttcttcggcaaagtataacccagcgtcaatgtcttcagacgcaggaaagaaccatcttcgatcacacgtgaagatacaaccttgttggaacttgagttcttggctaccggtatattgcttgtcgggttttccggtgtccaacggtcggcataagtcgcatactggttcaggttacgtgaattgttgacgttttcaaagaacaagcggttcgcattcaacacatcatttccgtaagaccattggaagaaaatactcaaatcaaatcctttatattcaaaatcattcgtgaaaccacctgtatggataggcaagccacgtccgatcatcgtgcggtcgttcgtgtcgattataccgtcgccattcaggtctttatatttaggcatacccggctgagtgttgttctcgctggagaagtaaggaactcccggacgcaacacatacgtatcaccggacttataaaaatcttcgtatttgtaagtaccttcatacatatagccgtacatcatacccattgaatagcctttcttcgcaatgtaagtaggctgtgaattgtacgtctggtcgaaataagcggaggtcaacaaggaagtctgattctccgccaactccaataccttattcttattaaaggcaatattgaaatttgtgctccaacggaaaccgtttctatttatatttattgtattcagggtaaattccaaaccggagttacgcactttacctacattcttcattgcgctataataaccggtagaataaggcaagcttgcatcaagaagcagatcgcgggtcgttttcatgtaccagtctacattaatgccaattcgttcgtcaaagaagcccaggtcaagaccgacgttccactgttccgtcgtttcccacttcaaatctttattcgctagcgagataggtaccataccgatgctgttctgattgttctcgaacggataaactcccgaaggaagattgttcgatgccgctttcgccattttcaacaaagcataggcttcatattcacctacacggttgttaccagtcaacccccaactggtacgcaacttaccattggaaagaatggacttatattccttcatgaagtcttcttcgctgaagttccacgccagagaagccgaagggaataacccataccgattctttttggcaaacttggaagaaccgtcgacacggaaagaagccgttgcatagtactttgacatataattatagttcacacgtccgagataagacatcatagaccatgaggacttttcagagcttgtcgtacttgggataccttcgctcatgccggccatgcccaaagattcattggggatattggtggtcttgaaagaataatattcatagtcggaattctgcaaagtaataccaagcaacgaattaaagaaatgcttcttgttaatgttaacctgataggtcaatacattttcgttcaaccaggtcagacgttgctggcggactacctgtgcattcaccttatccgttgagatcgggctaccataacgggtctttgagttattaaacgtatcattgctacgggcatcgtacgtgtaaccgccggataccttcagtttcaatcccttgataaattcatattctacaaaaccgttcaactgaaggttattcgtatagttcttacgatattcgttcttcaatgacataatcgggttgaaacgatagtcattagtcggttctactgatgaatccagcgcattgtccattaaggtgctcaacggaacatccggttcggtaacagggcggtaaccccatacactataaaataagttattcataccgctggatgaatataaagaggtagagctaccggtctgaatggcacgtgcatagttggcagttacactcatattcagtttgccacggcggacaacggtattcatacgagtttggaaacgtttgtagttggagttgagcacgataccgtcctgatcgaaataagaagccgacgcattgtaacgtaccccttccgttccgcccatcaggctgacgttatggctttgctgccaagctgtgcggaaaatctcgtcctgccagtcatactgcggaacaccccggtaatcttccaccgtccactgcttgccttcatgctcaatcaggtagttcttttgggtatctgccggaaacagttcattctgcaacttcacaaactcatacgcatccagcattggaattgtattggtgacctgctgaaatccgaaacttccgtcatacttgagttgaggctttccaacctttcctttcttggtcgtgataataacgacaccgttagcaccacgggcaccataaatggcagtggccgaagcatctttcaacacttcaacggattcagcgtcggaagggttaatggtagccgcaatagcaggatcttctaccggaaacccgtcaataacatataaaggtgaattatcctgggtcagagagttgttaccacggataacgatattcatcgttccgcccggcataccctcgcccgaacttacgtttactccggcaatacgtccacccaaagtctggtcgaatgaagaagcaggcgttttcagcaaatcttccatatttactttcgccactgcaccggtcaggtctttcttcttcacctcctgatagcctacgataacgacttcgtccaatgtcttcgtatcttccttcaagatgatagacatggacttggccgtctcgaccggcaattcctgggttacataaccgataaaagagactataagaatagacttcttattaggagcattcaacgagaacttaccatcaagatctgttatcgtaccctgagtaccgcccttgatctgaatactggcacctgggaccgactccccggtttgatcaacgactgtaccccgtacaagtacttgggctactgccacagagaaagaaaataaggttaacagcatcatactgaagcctctcttccatgaaaaatttgttcggaatccggtttgcatactattagttttacatttttaattagatttgtcaatgcgcaaaattaagtactgataccctaatttacaggccaaaattattcaattatgatacaaaaacatacatataccaaagtatattcgatgtatctttgcacaaaaataacgtaatgcaagacattctacccattcacttcgctccattgcaaggctatacggatgctttttaccgtaatgcacacgctgcctgtttcggtggtatagacagttattatactccgttcgtacgactggaaaaagacggtttccggaataaagatgtccgtgagatcgctccggaaagtaatcaggtgcctcatttagttcctcaactcatagctccgtccatagaaaaggcggagacaatcttatccctttttatagaaaaaggatataaggaggcggatattaatctgggctgcccgtttccgcttctggctaaacggcacaacggttccggcattctgccttatccggacgaagtgaaaacattattgggactgactctgaaatatccgcaaatcagtttttccgtaaagatgagactgggctgggagaatcccgacgaatgcctgcaactcgctcctatattaaatgacctgccgctacgccacatcacgatgcatccccgtctgggaaaacagcaatataaaggaagtgtagacctcaatgggttcgacgctttcctgaatgtctgccaacatccgctcatatataatggcgacattaattgcccggatgacgttcaccgcatccggcaacaattccccgcattggcaggagtgatgatcggacgcggactgctcgcaaacccggcattagctttggagtataaggaaaaccgtacgctgacacccgacgagatgaaagagaaactgcatatcatgcatacttccgtctacaatcagtacaccgcacaactggaaggaggcgacgggcagcttctgaacaagatgaaaacgttttgggaatatctcgcaccgaatgcggacagaaaactaatgaaagcaatccataaaagcacaagcctcagcaaatataatcaggctatccaagccttttttagccaacgataaactgattaccagttattttgtgtaattttgcgcccgtttataaacaagcacattatgaaaaaatacattttaatctcgctttgcctgctaacggccgcaggcagcttcgcacagaacaaggatttcaagtttaaattctatgggcagatccgtaccgacttctattataatagtcgtgctaacgaagaaaccgtagacggattattttatatgtaccccaaagataaggtacgcgatgaggacggaaacgacttgaactcaacaccgaacagcaacttttataccttgtattcacgcttgggcgtagatgtggccggtccgaaactgggaaccgccaaaacttccgccaaagtagaaattgattttcgcggtacaggtacctcatactcggtaatccgcctccgccatgcttatttgaatctggattggggcaagtccgccttattgctgggacagacatggcatccgctgttcggaaatgtctcccctcagattctgaacctttccgtgggagcgcctttccaaccgttcagccgtgcgccgcaaatccgctatcgctacactgaaaagaacttccaacttacgggagctgccgtatggcagtcgcaatatctgtcgcaaggtcctgccggaaagagccaagaatacataaagaaaggctgtattcccgaaatctacatcggtgccgattataagaacggaggtttattggctggtgtaggaatcgaaatgttatcattgaagccacggacagaagctaccggagaaaacaataagaaatttcaagtagacgagcgtatcaccactctttcctatgaagctcacgttaaatataccaataaagactggtttgttggagcaaaaagtgttctgggttccaatctcacacaggcttccggtctgggcggattcggagtgaagtctgtcaacgaacgtaccggagaacaaaagtataccccgatacgcttttccagttcttggctgaacgttgtttatggacagaaatggaaaccgggcgtttttgtcggttatgctaaaaacttggggacaagtgacgaattatatgcccctgacggaaaagcacaattatatggaacaggtacaaatctcgaccaacttgtcactgccggagcagaacttacttataatgtccctcattggaaattcggtttagaatatacgctaagctctgcatggtatggttctcttaatacatccagcggtaaaatcaaagatactcatgccgtatgcaacaaccgcattgttgcagttgccatgtttatgttctaatctctcccactaatttattttaatcatatatctgccacctgtcaccgattgcagcttaacgttttggttataaacggataaggctgtgacggcaacaggtgacagcattgtgaaggcaattttgctgtcaccggagctaaaagacaacagaagtaataagattaaaagtttcgcgccttgaaacttttggtttacccatgcgaaactatagtttcatcagcttgaaactaaagtttcaaaggcttggaaccattggtttcttaccgatgaaaccaaagtttctctatggggaaactgtagtttcaagcaggtggaaccatctaaaaccgtcaatacaagaataaaatatgcagcggcttattcgcttcttacctccttaactccacttcaaaactagctccgtccttacaagtaaagcaaagtacagtctgctttttatctgctgaaaccactttacagaaaggagtctccttaatcttccaatatcctttcacagttaccgtcaccggaatctctttactttcgtcattaatccacggacgggaataaatgctgcgttccactcgttttccgtcttcatcaaaggcttcgtcactcggtccgcgatatagtgccaagtccggttgagctacggtaagcaacaacttgtcggacgattctttacgaatcatcaccagacaggaagtatccgcacgctgcaacaaatcaccgggaagtaacgtttgtggggtttcaaaaagtacataagaatataagttgtcagttaacgaccgcacaatatgagcattacggtcctgcttcaaaaccttatatcccggtttcttggcaaaggccttcatggcagattcagttgtctgcggcaacacagcgtattcatagctgccgttcttgggggctttgccatgatcgactaccaatgagacccagtcccctttcgtttctttgcccgtatcctgcaaacgggaatactgcgggaagttcttctcaaatctggcggaaacgggtacataataaccggtattcaaatgatcgatccatatcttaccttcgccacggtagtcgttccaataatcatgtcccgccttatccgttactgccaactggaaaatcgttgtttccgtcgggtaagcggcattggtattttcaatatcggagcccaggcaaacaatcattccatcgatgaaatgaaaggattttcgcgcccggtgagaaccgttatatttatcatgctcatgcagtttcattccaaaattgccgttttctctcttttgtgacaatccgccggcaaatgcttcatcggagtaaagcatttcttccatgccggagaatgtatctacattcatgactttagctttcaactgttccaacggaagatgtatggaagttacacccgggatacggttccaatcgaagccttcctgttgccagccgcttgttgcgggagtcaccatttgccccggagcagccgtcagaatctgtaaactgccatgcgccagataacggccataaaggttatgtcccaaataatgttccgccgcccaaagatagcgggagtgaccgcgggccaccgccgaccagttgccacgacgctgaacggatgcacaaccatagcccaatgacagatttccctgtgggtcaggttcggcacggaatcctttctccacaagccgttttgccatcttccgctcctgtgcattcgatactttcggcatatattccggttcctgcccatcagcggaagtgtctgaaacaagacgcaggtaagcggacgccatttccttgtcaaactccgattttccgtccggagttcccgccatagccatcactgcataatgcatcgggactaatttcccctttccatcgggatgacggccggacatcgacaacgggaagttcaacttattacaatagaaacgcatggcaagtaatgcatttttcactgtttcgtgcgccaactcggatacggcaaactctgtatgattaaagaggtagatcatatttgttgctccgtccaaaccgccgacagcataagccgggtagtgattgcggtgatgaaaaacgccgccatcgctcttgaacgacccaaacaatccgggagccggacggcaaccgtaatcaatccaacgggagaaggatttcaggtattgcagcttctccggggtatcttccatcatcaggatacttgcaatgcgaccggtagtttgcgtgttaaaggaatccatatcaattccgttgccctcaggtttgggatacacctcgttggttatcgcataccaacgcaatgtctgttcggcttccggcaactttccggcttcccgaagtacgtctttcatcaggaaataagccaggtataacccgcgaacactatatccgtaatggtgaatattcccccaacagctaccataagccactccctggtcggttatatggtcatacatcgccagaaacttctgcttcatttcttcccggatttccgactttgcagcactattattataggctacggcaatccgccgcatcaaatcaaagtaagcacgcatttctatgccgagtttagtcagcatatctttattccaattcggaataatccgttcataggcctcggcagcacgtaccatataaataggtacgcccgatacctgcccgttcttgtaagtaatctggtagaaatcatatttcttgcggatagtctccacttccttgtccgagagcttgccttttgtataattcatgtcgcggaaacgtttctccaacagttgcatttcttctttttgcttgtcgctgacaggagtcaattcgatatccggcttcaggagagagtgcttataaataaccagccagtgattttttgtttcgggattaacaaaaggtacttgcaaatcggctgtctgctgacgtgcatcaaccttcgttgcagtaatcaaatgatcgatgaaaaggcgcccttttgcatttggggcgacaatacgaagttcattcataccttcttccggtgtgccttgcatatcacgctcataacaaacccatgcggcacgccaacctttaaagttgattccgaaagggaaggaggtgcatttctttccgtctttcaaaaattcaaattcaatggttgccttctgcggttcttcattgtatatccacacgataaatgccgaaagatacaagtccttgcccgtagggtctttcttttcaaacttcagatctttcttaagctccaatacggcaccgggattaaacgcccattccatcgaatgttttccgtctttataatgtgtatcggagatagataattgagactgggtggcggaaatacattccggtacttgcggatcttcaaaagagaacatccgctcgtccgtcacgacttgcgcataaagaaatgccggacataagagagatagcagagtgaatactcctaatttcgtaaaagcttgtttcatcatggatttatggtcttagttagatttatttctattaattcggttttaaaatatcgtcaccttgaaatctgtaaacaacacatgattctgtaaaaggcgcaaaccaaaatgcccgtctccctcactgcctgtaatagaataacggaacagttcttcaccgttaacggaataagtggtcactcccttttgtacacgaatactaatctgataccattgattcggaacaagtaaatgcggggtatccgtatattctcgaagtaatggtttcactttatcatccgctactccgtagtacttgccgttataccggcggaaacgggtggtggaattatcatttcccccgtatccaacgtaaaaaagatctaatgtattatagtttttaaagacaccattacgccactcgctacgggcaaaaagattatcagtttttttaggatcattggcagcccaaaagcagtttaaatcactcaggcggtcatatttcccgcctttcatcaccatacaaatgcgatagtttatctcataatcacccgtcaggcgttgctgataccacatcgttagcccaccgggcacgattagttctactgtatccgcacgctctatcatctgcaaggcacgggattcatcttcaatcttccactgttgcacagaggtgttttcatgttgtgcatacagcatgacactattcaaaagaaaaaaagtaatcagacagcagcttgtagagaatcgtttcatcatcaatggcattagtttaaagacattcttttcggatacaaagaaacccctctttttgaaaaaagaggggttcaaattgtacaaaatatctcaaataatgtattgacagagaatttgtattaccagtatcttatcgttttttcagcatcgggttccaaataccagcctttgttgagtgtaccattattctttgcccattcgctaaacttcgggtatgcttcttcgaaagctttatgctcaacagcatgtcttgtgccggcaggaactttgatcccccagacaaaaccgttcttattgcaataggggatattttcattgatagcctcatcgccacttacaagcgctgcatcttttgcataactttctttataagcagaagtcggctgatatcctctcatgtgtatttcttttccctcatgagtataaatgaagaagttctgtctctgagtatccaggataagatctctgaacgctttaagctgagcagtcctatccgctccttccaaattatccttaccgatcaatcgaacctctgcacgcaacataggcaatccttcacgtacttttcccggcgttgtctggaacaaatcgtcattgttatcttttaaactactcaggccgtccaatgtgataaccgttccttcagtcggttttgtatctacatccaatttagcaaatcggcttacagttgctacatcactgtcccatctccaacctgaagcactaactgacacactaggttgtgcagaaagttctacgccgttccccaagtctctcattgttccctgaccacctttcaacaccagttttgcagtaatccggtcaatatacttgttatccaggttttctaatataacgcccaatctggtcgggtatgttcctcctacggcgcggacatccaaagtaagcagcaactcttctttactaccttgctttgccatttgttcttcgtcctgacattcagttacctttatgtcatattcaaaaacaacatcgttgaaatccttgtcataccaggtcgattgtttaggccagccgtcttcaaacatagcgacacccgtactgtgatagaaaagatagcctgcatccgtctcgtctgtcggtttcaccgcatcttccggaagcgaaagcttaaccgctgctatacggctagtctcataagcaaattcaccggtcggataagtttcactacgagtggcaggagataaagtaaaagcagtctttttcactgcgcccgatactgtgttgtactccatatataccttttcagtatgaatagggacattcaaggtaattgtacgcggagccccctcttttacaagtatattgcctgcgagcaggtgctctcccttttcatcagcatacactttaaccaaaggagaacttgctgccggttctgtccccgtcccttcttttccattcccaagctccgtgtcggagcaagaagaagccacgactaatgtccccacaaggacataaattaactttttaatcttcatcattattccagtttttaaattattgtttgtttttgtttcccacgaaaccatagctttcgcaagcgtaaataaggccccattagttaacttatcaaaaatatatttaacgctttatagtctttttgctcatctcactaactttttcttgccttttcaccgaagattatccggaagtctcgaaatatactccttagtgcctgttcacgggcaatggataatatatacaacttatttgttatctttgcgagtaacagaacattcaatacaacaaatataacgtatttgtttgaaatatacaagttttcaactaaatatcttgaggggaaatggatcaagtattgtacggtatagattatatagaatattatttctattggatatattataagtttattggctatcctttaattataagaatatgctcaatcgctgtaatgttctgtatcattatgtacctcttcttgttatttcatatcacatacggcatattcaagagaaggaaagaaaagaagaaatataataaggctttcgataagtactatgaagaaatgaaagccatctcgctagacccgaatgcactgccggaagaagaaatagccgacagattgaaatatgatacgagaaaacggcccagacccaacgaactgcgtatcatcacccaactgctgacagaaatcaagagtgtccatgaagatgaaattaatgaactcaattaccaaaccatacaaaccgtattccagataacccgcttcctggaacgtgaacttcaattcggttccaaaagatcaaagattcaagcattgaaattgattcagtctatcaacggatacgcttccgaggctgtattggtacgtttcctctatcaccgcgaattagagttgaggaactctgcacgatatacttatatgtggttaagccagggaaacccgttccgtttcttcgacgaagatattgccatgaagttgagacaatgggacatgatggagttgcacgctattctggagcaccgtaagaaagtgggatataataccccaagtttcatcaaatgggtgaacacgtcagctgaggagaatgttaagatattctttattaatgaaatcaggctatataatgaaaccgaaagcgcccctatcttagccaaacagattaatgcacgttccacagatatccgtggagaagccattaaaacactgggcaaattaaaatacaaggaaattgaacctaaactgatagaaatgtatcatgtacaaccggaagaggtcaaacgaaatataatcgaagctatctcagacctaaagaccgacaaagccttgggatttctttacaatgcatacgatgaagctgataactggggaacgaaacgagctatcctcaaagccctctatgcatatagcgccatgggacggaaaacattcgatcaattggagagaaaagcagattcgcatacagcgatactattcgctcataccaagcatccattaatcaatcagttaagctaaagaatatgagagatatattatttacattcttcaattatttcgtattcttttatacgagtatgctggcaatattctttgtgatgtttgccttcctctcctttatttcactgaaacggagaaaggattattacgtagaaagctatgtccggaagaccatcaaagaatctccttatacacccggaatctcggtaattgctcccgccttcaacgaggagaaaaccattatcgacaatgtaagttccatgcttgcactggagtatccgctatttgaagtaattatcgtgaatgacggaagtacggacagtacgttgcagaaaatgatagagtactatgaattggtggaagtaccctatgcttatatcgaacgaatcaaaaccaagcctttcaaaagacttttaaaatcaaccaattctcaatatagccgccttatcgttgttgacaaagaaaatggaggaaccaaagcggatgcttctaatgcaggtatcaatgcctcttcctatccttactttatctgtacggatgtggactgtatattggaaaagtatgctctttaccgttgtatctctcccattatttcctccgataaacaggttatcgccgtcagcggtacaatgctcatggccaatggatgtgaggtaaaagacggccagatcgttgtggtcagaactccccataccccgatcccgcttttccagaatctggaatatatgcgttcttacctgattggaaaaatgggctggtcggctatcaacggaatgccgaatgtttccggtggattcggactttttgaccgtgacgtggccattgccgccggaggatatgacagtacttcttttgcagaagacatggatttgattacacgtatggtaggatatatgtgtgacttctcccgcccttacaagattgtacaaattcccgacacttgctgctggacggaaggaccttctaacctggctatgctctatcgccaacgtacccgctgggcacgcggactgttccaaacgctcagtatccaccacaagatgatctttaaaaagacatataaacaaatgggtatgttgacattgccttatatgttcatcttcgagtttctggcccccatcatcgagcttacaggttttatcgtattcctctacctggccttcacgggagccgtcaactggaacacggcctggatgatctatctgacaatctacacgttctgccagttcttgtccattgtcgttatcacttacgactattacgtcggaatgctttataaaagaggatatgagtatctatggattatcatcgcctccatattggaacctattttctatcatccgatcatcactttctgctcattgagaggatatctaagttatctgaccaacagagacttcaaatggaagaaaatggaacggacaggattcaataagaaaagagaaaaggcggatgatactaacagccccgttacgcccgaaccggcaactgtttaatttagaaagaataataaagacaagatatattattaaagcaaaatataatgaacagagagtttctccataaaatcaccctattaggctgtctgcttttgctgattacctcatcagtaggtagcgacaaaggattccagacgccggagcaatatgcccagattgtacaagagcattttgcgaatgaagaatgggatgcggggaaagcattgctggacgaaggacttcagaaatatcccggtgtctccgatctggaatggctcatgggtaaatactggtttcacgaaaagaactatgacgagtcacgctatcatcttgtcaaggcaattgaggataattacaacaatgtcaatgccaagcatctgctggtggatgtagaagatattactgagaactattccagcgctatctgttacgttaacgaacttctggaagtaaacccatattggagaggcctgtggcgcaggaagatcgaactgtaccgtaaacaaaacaataacgtcgaagccgaccgcctgctgaaacgtatcaaccagatttatccgaatgacaccattctgcgaaaggattatatttacagtatggaagtaggttaccaacaaatgaaaaaagacggcaaccgaaaggaagcgatcgaaaagctgaccgaactgattaaagtatctccgcaaaatgaagaatattacctggacattattaatctgcacctgcaggaaggtaaccgggaagccgctttaggctggtcttccaatgggttggcggcaatccccggaagtcccgctctgattaccaaaagggccagtatcctcgctgaattagcgcgttatccggaaacactagtctttatacgcgagcaaatgaggaaatacggcagtccggctatacggcgtatgtacaacgacttgctaatggaagcggcgcgggcagaaaagcaacgcgacccttatgtactatatggcatggcctacgaaggcggcaacaagaacaaagaagcattagactatctgctcaatacttccgtcaccagaggatataccgatgatgcgcttttctatatcagggaagccaagaagcaatatggcaacacggacaagggaatcatgtacaaggagtatatgctttaccggcaaatgaacgaggatgatctcgcctattctactttgaagaagatgtatgagatgtatcccgacgattacgatatcacgctggccatgagtgcacagcacatgaagaaagccgagaagttaatggaactggggttatattcggaagcattgcctcacgtactgttcgtttcccaaaagcatatcgacaatgaagtgaacggtgccgcatgggaaaagacattgagttgttacatcaacatgaagcgttacaacgaggcactcgctacactggatacgatcacactccacttcccggactatgagaacggaacactgaaaagagcgtttattctggataaaatggacaaaaccgaagaagcactgcaactataccagtctgctatcgagcagagtgatgaggatatgcgtatcttctacgtcatcggttacgaggaactggcagtgccttatatcaagaagtgcatggaagcgggagccacacggaaggcttacgaagaagcggtcaaattagtgaacctgaatccttcaagtgacctcggattacggtatgccatcaattcatccggtttacttggaaagttcgatgaattcgagaaatatacggagcaaggaatcaattattatccggaagaaccgttctatcaggccaagagggctaccgtgctggaacgcggcaagagatatgaagcctcactcgaattcctgaaaccgatactcaacaagtatccgagcaacaaagagattatcggcgcattctcacaaagcagcgaataccgcgccttgcaattgacgaaagcgaaagatccgaaacaagcccttgctgtgctcgatacggccctgctttatgacagccagaacaaatctttaaaatacaccaaaggagtagtatacgaagcgaacagacaagctgactcagcctattattatcagaagttctatgaaccttcaatcatggaatatcgctcttttcaacggcacttatcgggccttagaagcatgatgctcaagaatgagatagccctgacttatctgcgtgcccgttacggggaagaagatatcatcacatccgtcgccacagccgaatatacccgcaagacgcaaaagaatacctataccggacgcttcaactatgccggacgaagcggttcggcaagcgacagcatggaagctgaagaacagacaccgggaggggttggtatccaagtacaaggcgaatggacacatcatttctcaccgaagtggagcactacagtgaatgccgcccttgctacgaaatatttcccggacatcactgccgatgttgctgtacggcattacatgaagaatgattgggaattgggagcacatataggatacagacgtgtggctgcctacaacaaacgttatgaatggaatgatgagttctttacaggcagtaacggcgaaaacggtttcatattcaccggttgggacgagtcaaagaccaatctgttcaccgtcggcgcagagctggcgaagacaattgagatcgtccgcctcaacacgaagctggatatgcatttcttcaactcaaacttctattacaacgcacaaatcggtgccaaatatttccctgccggtgacggcaagacgaatatcaacgccatggcaagtatcggatcagcaccggaaacggccgtactggactatgcgttacccggttcattctcacacaccaataccatggtgggcctgggagggcaatatatggttagtccaaacatcaccataggcttaatgggtacatggaacacctattataaccagaccaataccgtgaaaggaactactcagttcgaccggatagaaaccgtatcgacacgctataaaaacttatataacatctatgcacaaatttacatttcattctaatgggttttgtcccctattggcaggaatgatatgcatttgctaccttatatccggctgccgtatgcaggcgcgcacagatatgtttccctccaaggaaggttatctcgtcactatcggcgaagacccgaccgataaagatacacggtgggccaaatacctgtacgagcaccttaagaagcgtgctaacgacgatgaaatggtcgctttcggaatatctgagaaagagatgtggcgcatcatcatacaaatagaccctacgttgcaaaacggatttaaaatagcctgcaaaggttccgacatacgattaacagcctcggacaacaaacaaatgttatggcttcaataccaactgataaagaaaatcagcaaggaagatccccgaatagacggttccgaccttccgccagccattatccatttaaaagatacctgcggctcttttgctttcgactatcagagtatctattctcccgccggcctgaaccccgacaacacaggagtgatcgggctggacgacttcgacaacagttggggaatatgggggcataacctacggaaagtattaggagccaatacagagaaagtatacgccaccataaacggaaaggcgaatgattcgcagctctgtttttcttccggcgaaatgttccggctcattgaaagttatattaccgataatttcggtgaaaagggaaagtttcgttttgtgattgccccggatgatactccgtacgcttgcacgtgcccttcgtgcacagctatcggaaacactgaaaagaatgcgacgcctgccgtcacagagctaatcctccgtttatcccaacgatttcccaggcatttcttctttacaacttcttatctgactacgcagcaggtcacagacaaacaattgcctcccaatgcaggagtaattgtcagcgccataaacttccctctccgccggatagacggtaaagatgcaaaagaaaaggcatttgccggacaactggaacaatggaaaaatgtaacgaagaacatctatatatgggactatatcaataattttgatgattaccttactcccatgcctatattgaagatagcccggcagaggctccaattcttcaagcaacatggagcgagtggtatattctttaacggaagcggatacagttattcctcattcgatgaaatgaggacatttgtgttatcggcgcttcttattaatccggagctttctgttgacaacttaaccgcaagtttctttaatcaggaatatccggcagcaaagaagtggttgtatgactactataccgatttagaaaacggcacacagtccgggaaacggttaggcatttatgccggcatacgggaatcggaaaaagcatatcttactccggagaaatttatcaagttctatgatgaaatgaacgattttgtatccaatgccaaaggaaaggaacgtaaaaagctccatgaactccagacagctctctcttatacacgtatggaaatgggacgtgaacatagtttcgatgcttacggatatgcaaaacgaaacggaaaaagtcttcaacctattccccaagtacaggaatggctcacccagctcaaagagcacaaagcattcaccggaatggaatattacaatgaatcttccgatgaaatcggtaattatataaaggaatgggaagaatacatatttgcttccgacctaaaaaagaatctgtttttaggggttactccttcagttatcccgcaagcatacaagagccatataaagaagctgaccgacggcactcacggcttacccggaaactatcattgcggctgggtaatcattccggaagaagaatgcacaattaacctccccgtgaaaggaataaatacatccggaacgatttatatcagcttccttaaccttcccaggcatcgtttctatactccgcaacaaattgaactgttgaaagacggaataatttataagaaaattgacctggaaccggggccccctgccgaaaaaggagaaatggttaaaacaagtatcccggcagatttgaacggaacagagcaattaagtataagaattacgtgctcgaaaaagcccggagcacaaattggcatagatgaaatagcattcatcccactaaaggctgatataaatgtagcattataaaaataaattagcaactatgaataagtctatatcctatattattttattaatcgcattccctttctactttacagggtgtaaaaaggaagtgcgtcctacaagtatgaccatcaaggattcgatcaggcactattatcctatcaagcaaggtcaacaacttgaactcatgtttactataaccaacacaggagacgctccattaatcatttcagagatacaaccttcctgcggatgcatcatactcgacaaaagttcgcacatcattataccggaagacggcatccgacaattcaaagccacctacaacagtattaagaacgtaggtgaagttgtccaccgcatccgtattttcgggaatatgcttccacacggaaaagcagaactgaaatttgatgtgaatatagttcctgacgctgattacacgcgcgactacgaagaactctaccaagactttaacaccaagaatggtatcgtcagagaaatggtagatggaaaagagtcagaactaggatactatgtaggagaaccttaagagagtagtaagctttttcaaggatgtatctctttgaaagctgcattttcctcttttacttgctgaatggtctgcttcaattccccgatcggcaaatcatatccataccagcctgtataacagtccactacataccatttcccatcggcagtctgttcaaattcgacacgcaagtcgatttctgattcctcataacctgcttcgaacactttatgaaccggctcattgagagtgaacttagaaacataaataccaccttcttcctgctcaatgcgttcctccttcatcgtttcactatccagcaacggccatttttctttggtgaacggaaacgttttctcagtttctccgtcatcggccaataaagtaatcggtgtctttaatggaaacttgatacgggtatattggaatgctgcactggacgtaaacttatcaaggaatgatttaaaatcctcgccggactgtgctatctcattcttcgctttggccctggaactattaccgcaagaaatcaaagacactcccaacagcaacacactggctaacagacaacatacaaaccttttcacgttcataaatatataatattagtgattcattcccataatacaaatgctatcattcaaggcacaaagataatcacaagttcaacatcttcatacacgagagccgcgaaatagaaaaattaccgttaaacaactataaattacatatattagatgtggggatgactatctttagggggtatttactgtaactagtatcactttaaatcagacatacttatgacacacattcatccattccgtcttttcgtctttttattactatgctgtacacgagttatcacattcgcccaatccgacagttaccagacaatacccgaatctttgcggggttattggcaatacaaaacagagaacgtatccgactggaacgggcctctcattggagagaattttgtagaagctctctataccgtttttcaggtcgaacaaatggaaaagaaaaccgatggaagctatctcttccacctgcggaaccaaaatggaaataaaatggatttccgtttcacccctatcagcgaagatagtgctatcatcttctatcaaggctggaaagaacctaaacactgtgtccgcaagcaaattcccgaccacacggaaatgctcactcccactacactgcctgacatcatttacaagaaatgggtggaaggattgtccggcaatgttatatacgaatttacacgcgatggtaaatttatatatgacggaaaaacatgggatatcgtatctgccggacatttccttaataaagagtatcgtctgctcgccaaaaacggagaacggtacaaactgctttaccttagctttccttttcccaactcaatgaaggttgcagccgaattacagaataagacagtatttcccatcgcaacttcccgccctgaagtatataccatcaccggatgttgggtgaatcaggcaaccggcgaatggactattggtttctttgaaaacttcgccgtataccaatgccggttctgggactacgaatccatacaaattaaaaaggatgaaaccgtcgtcaaactaaaaaacaatacaacccgcctgactctatctctgaaacataagaacagagcttcttgcaacattgcattcggaaaagataatccacaaaaatatatcctctgtaacggcaaacatctaccggactacccgttaaccgatactacaccgttcatcgacaacgggtaccggacagacagcgtcaccctcaccggatacctgcgcaatcctccttcttcacgccctttcgacgttagcatacctgacatgattacaggcaaagaagaaaaataccagactgacatcgactcgctaggacggtttaccctgcgatttcccgtactgaacagtcataatgtctttatcgactggggacgtacgaccatctggtcggcggtagaacccggagaaacttatttcttatacgtagattatgcccaacaacaaaagttattcatgggaaagaaagcacgtgtactcaacgaacttctctcccatgaaggactgagggaatcactcgattataatgaagaacaaaaaagaagtaatctggagtgtctgcacaagacacaggaaaggcttcatcgccaactggagttccggaagaaaacactccaagaacatccgttgctttctgacaaataccgctactacaccgaacaggaactacgatacgatgcggcatctaccctgatgcaacgacgtttctcagtagaccgtaacaaacaggaacatttggaagacgaattcatgaactatatagattctgctttttacccacatccagtacatccttatactcttctcagagggtataattcattcatgagagattacattggttatatcgacgacacaactccatcatccaacagcctaaccttaacacctcaaaatatggagagactttactttgcctttgaagccgaaggtaaagtccggctatccgaagaagaaaagaacgcactacgcagtttcagcaaatatcaagaagaaattgaaaagttgcagactgccaaagccgattcagcaaccattaaggcttacaccaaggaacaggaaactgtcatcaaaccccagatagaaataatagagcaactcattgccagagacggtcttctcaatgaatatatgacaggacagatgtacgttaatgcaatcaacaacagcatggcaattatcgactcccttcaaatggataaggacctgagagagattctaaaaacaaagtgctattatgaaatgcttcaatatacccataaggaattgcccgacagccttatcagtaaatttaaaaaggaagttacgaatccttctttgcaatcttatgttttggtccagcaacagaaatatgataaagtatcacataaaaccatcgaacatccggaaagcctgatgccgaatgcccctctggaaagaataacggacggcgaacagttattccgcaaaatcattgagccatacaaagggaaagtgatttatctggatatttgggggacttggtgcggtccgtgcaaggatatgatgcaatatgcgggaaacattaagaatctatttgcaggaaaagaagtcgtgttcctttacctttgcaatcattcgacagacaagtcatggaaaaacattatcaaagagtacggtctgacaagcaaaagttcagtccattacaatttgcccgacaagcaacagtctgccattgaaaaatatcttggagtccattccttccctacctatatgttaatagataaggaaggaaacattgtaaaccgcaaagctcccagacctacaatggaaaaccaacttctaaatgcagtctataaggaactggaaaagtaagaggtacttacttcttccgcaaatattcatatccgaaacgacaatacaaacatttacgtttatcacaatattctttttgcaactgtatcagcgcctgactatccgcagcagaagctaccggtagtccggcgtcgctccaggagcgaataatatggttattctccgctttcagttcttccagaaagcgtccggcacgttcgcacattccttcattggccttgtgcaaaccatatgtatacaagaaagggacaacggtattgatgataatcaggtctttcgactgttctcctaacaatttttccctttgtggagaagtacgaccgaatatataatgattctcccaataaacagaagtacgggtggagagcaaaattctcacttccgccaatgtctccgcctccaataaacgggaaaacaacttgtcccctttctgataaagataagccagttgtgccagccggatatgaggaaaattatccgggcgaagccggagaaaacgccagagagtagcgtccattacccgaaatatctcaaacttccgttgcaaataatgaaattctttgctaagacgcaggcagtattcatccttttgttcttctttcagaaatgtatcttcaaacagtcccgccataccatagaaaagagcttctatctgaaacagatcgttccggtgcttgtccaacgcacgaaacggaagcagttccgcccatgcctcaaaagcatcaccgttcaagccaaaaccataattacgggcaagagtgatgaagaaaacatcttcccagttattgttacaatgttcgagacgtgctcctatcagtttcgccttttgttccagccgttccgtttgcaaggcagacaaccacgaatgaaccgtaagcttcggtaaagaacggaagatcggataacaagccggataacagtcggacacgcaaagttcataataatgcatttttatccgttcgggacagctcactatcatttgcggaatgacttccccgttggtacgggtcacttctccgtccgcttcacccactatatgcaggatcaccgagtcatagactttatcaccatcgtgcccgtgacggaaccaatccgaagaacgggtatggatttccacgtttcctacccataaagtattgtttatctttaatttggcattgaagaaatcaggaccggaattcggattccggagaccgggatcaataacctctaccggtaagcctttggtggtttgcaggatttcaagggagaataatttatgtttccacacgtagtggagaaggtgttccatgttaacaagacgttaatgtacactgcaaatgtaataaaaatcttatctttgcgactattattttgaatataagtcagaaaacaatgaaaatagcattgatcggttacggaaaaatgggcaaagagttagaaaaggttgccctgagtcgcggacacgaaattgtctgcattattgatatcaataaccaggaagacttcgagtcggaagcattcaaatcggctgatgttgccatagaatttacaaatccgacagtggcttacagcaactatatgaaagcctttaaagccggagtcaaactcgtatcaggcagtaccggatggatgtccgaacatggcgaagaaatcaagaagctctgtacggaaggcggaaaaacgctgttctggtcgtccaacttcagcttgggagtagccattttctctgctgtaaacaagtatctggccaagataatgaatcaattccccgcgtatgacgtcaccatgagcgaaacacaccatatccacaaactcgacgctcccagcggaactgccattacgctggcagaaggtattctagagaatatagaccgtaaggataaatgggtggaagggacatttacggcaccggacggaacaatcagcggaacaactgactgcgctccggacgaacttccgatcagttctatccgcgaaggtgaagttttcggtattcatactgttcgttatgagtctgatattgacagcatttcaatcactcacgatgccaagaaccgaggcggtttcgtactcggagctatattggccgccgaatacaccgcgcatcacgaaggtttcctgggaatgaaaaacttatttccgttcttaaacgaataaaggttctaatataaatataccactatgagacaagccacacgtgcacaatggattaaatgtgctattgctattcttctctatcttgttttcctcatctgggtgcgaagctggtggggattaatcgtcatacctttcattttcgatatctatatcacaaagaaaataccttggtcgttctggaaaaggtcaaagaatccggcagttcggagtgtcatgagctgggtagatgctattatctttgcattggtagccgtttactttgtcaatatctatatcttccaaaactaccagattccttcttcttctctagagaaatcattgctggtaggcgactttctatatgtcagcaaaatgagttacggcccccgcgtgccgaacacaccgctttctatgccgctggcgcaacatacattaccaattgtaggtactaaatcatatatcgaatggccacaatggaaatataaaagagtgccgggattcggtaatgtgaaattgaatgacatcgtagtgttcaacttccctgcaggagatacggtagccgtcaattaccaacagacgacagacttttatacattggcatacggcgaaggccaacgcatatattccaaacagatagatatggatagcctgacacgcgaacaacagcgtgccgtgtatgacttatattacgccgcaggacgcaaacagatcctaaataacccgcgaacctacggagaagtgctctggcgtccggtagaccgccgcgagaattatgtaaaacgctgtgtaggactgccgggtgacacgctccagatcgtagacggacaagtcatgattgacggcaaggcaatccagaatccggagaatctgcaattcaactatttcgtgcaaacaaccggtccatatatcccggaagaaatgttccgcgaactgggaatcagcaatgctgacaggacactaatggaagactccggttatgaaatcggactattggaaatgggactcgacagccggaatgcgcaaggaaaactgaatcctgtatatcatctcccgctgactaaaaagatgtatgacactcttctgggcaacaagaagctaatcagcaaaataatcatggaaccagaagcctatgccggacaaatgtatccgctgaatctttacaccaagtgggaccgcaacaactacgggccaatctggattccggccaagggagctaccattacgctgactccggacaacctgcctatctacgaacgttgcatcgtggcatacgaaggcaacaagctggaagtgaagtcggacggtatctatatcaacggtgaaaagaccaatgaatataccttcaaaatggattactactggatgatgggtgacaatcgtcataattctgccgactcccgttattggggctttgtacccgaagaccacgttgtgggcaaaccgatcgttgtatggctgtcgctcgataaagaccgtggctggtttgacggaaaaatccgttggaaccgcctctttaagtgggtggattaaaaaaggaagctattaagtgaacattcgtaaattcaaatggatactagtatttgccggagcaatagtcattgtgcttctgctccggggatttgcttttacgtcttgttttatcccttccaccggcatggaaaactctattttccaaggcgaacgtattctggtgaataaatggagttacggcctgcggattcctttcatgtcgatattctcctatcaccgttggcgcgagcgtccggtacgggaacaagatattgttgtgtttaacaatcctgccggcatccggcaaccggttatcgaccgccgcgagatctacatcggccgttgtatcggtgttccgggtgatactctatttatcgattcccttttttctgtgatttctcccgaggtacaattcaatccggacaagaagcggctctatgcttatccggtagacaaagagaatctgataactttactcatgcacactctttccattgacgatgacggtttaatgggtagcagtgacagtacccatgtacgcagtttcagccgttatgaatattacctgttggaacaagccataaacgggaataactggattcagcctttggcggggaagaaagacaccgagctgcgaccgcttatcgtccccggtaaagggaagttcatccgggtacatccctggaatattacactactgcgaaacaccctcgtgatgcacgaaggtaaacaggcggaaatcaagaatgacactctttatgtggacggcaaaccaacacaacactgttatttcaccaaagattattattgggtgggagccaacaacaccattaacctgactgattcgcgcttgttcggattcgttccgcaagaccatctgatcggcaaagccactcttgtctggttctccaaagaaaaagacaccggagtgtttgacggctaccgttggaatcgttttttccggacggtgaaatgatcttccgggcagcacgacaatcccgaacagtaacataaacgactctcaaaacgtataaaatgaaagaaatgaaaacagcttatttatcttcagcctaccttgctcctgtcgagtactacaccaaactattggcatacgacaagatttttatagaacagcacgaccactatatgaagcaaacctaccgtaaccgatgcacaattaccggaccggacggcgaactggctctctctatccccaccgtaaagcccgatacaccgaaatgcccaatgaaagatatccggatttccgaccacggcaactggagacacctgcattggaacgctattgagtcggcctacaacaatactcctttcttcgaatactacaaagacgatttccgtcccttctacgaaaagaaatacgagtttctgttcgatttcaacgaagaactctgccgactggtctgcgaactgatagatattcatccggttatagaacgtaccgccgaatataaaatggagtttaccgccgacgaagccgactttcgtgaaatcattcatcccaaaaaggacttccggacggccgatacagcgttcgttccgcagccttattaccaggtttttgaatccaaactggggttcctgcctaacttgagtattatagacttgctgttcaatatgggaccggaaagtttgctaatactaagcaaacattaatcatattctgtccagccactgtaaaacaaaacacaaaatatagaagagaaatcatccttcgcctcctccacatcgtataacgctgtctcacaacatttattggacatatagatccagtgtggtggatatatagatccagcgccttgggtatatatgcccaacaactcaggtattaatactctgaaaaagaggcgttagcacctgacagctaaagtattaatacttgacaatattttcactgtgagcagacagaatgcccttaactccataagaggagaaatcgtcctttccatgatacatttatgtcctctccattaaaaagctcatttttaacatctcattctcggctaaaagctttacttttgtatggtaatcataaacacgcttaatctcaaaatccccgctatgaaaaggaaatcgttactatgcctatttcttatcatatctgttgccattcacggaaatatctattttaagcatttaggcaaatcagatggtctgtcacaaatatctgtactttctatctgccaggacgaactggacagaatgtggtttggtacactcgaaggcttgaactgctacgatgggaaccaaatgaaaacctataaaccttctccggacaataaagattattttggcggtaatgaaatatcacacatagtaagtgacaaacaaggtaatctattctttacttctgatgggaaactgatccgttatgatctacataaagatcgttttttatctctaccactacgcacacaaactctattcgcacacaaccatacaatatggacagctgttaatgatagtgtcttccaatgggaccgggaacaagaaacattcagattcgtctaccaagcccctttccataaaacaatcatccgcctttatatagatgccaataacagtctctggctgggtacccgaaacggactttacagaaccgataacatccataatccttcatcccccgtctgcgtgattccaaatatcaacgtgctttcattataccgggacagccgtggaacgatgtgggtggccaccttccgcaacggcatgtacaagatagagaacggaatcagccagcaatttaccatccaaaaggaattcggtatctccagcaatgatgtgcgttgctttgtggaagacaacgagggaagtatttggctgggtaccttcaacggactgaacaagatagataccttagggcatatttcttactatcaaagaggaagcaaacccggaagtctatgccactcttctattttttcacttcacaaagaccggcaaggtactatctgggtgggtacctactatggtggtgtcaactacttcaaccccgaagtggatatctttcaccactataccgaaagtatcggcaacgaaaacggattaagctttcctttcgtcggaaacatggtggaagacaagcgtggagacgtatggatttgtaccgaaggaggtggtctgaactgtctggaacgggaaaccggacgtttcactcactacctaatggacgcaaaatcagcccacggacctttctacaacctaaaatgcattacctacgatgccgcaaacgaccaactctacataggtactcacaaacagggcggcttgtgcttcgacattccaagcaaaaaagttgtcttccactccaaagcatttggaaatacctggacaaaggtaacgttcagaaatgagaaaatctatctccttacgggagaagggatgtttgtcaaagaaggaaaagggaacttccaaaaactattccctcaaatcccggaagcaaatacagaaggaagcaattttctgatagattctcaaaactacctttggataacccattggaggagaattgtacgtatcaacatgaacaatccgcaagaaaaatatatctatcaatacggtgaaaaaggattgggaaactattatgtgcagagcatggcggaaagtcacgatggtaccctttatttcggtacctccggaagcggcatctatcggttcgacggaaaaaaagagcaatttacagcttgcacagatattgatgctgactattgctacaatatggatatcaccaccaaaggttatctggcaatcagtaacgaccatggtcttctcatttatcatccacagaccaaggagaagcagctaattgatgtggagagtttgcacctctctgctatcaacgaaggttgcggacttctgatttgccgtaacggggaaacctttgtaggtggtatagaaggcatgagttcgttcatgaactcctcgttgcagaaaatagcccccaattacaacctttatttttcttctttagtagtaaacaatcgggttatctccgtcggaacggacgatggtattctgaagagtgctttaccctttgtccgacaaatagaattgaaccacaaagagaataacttctccatcagtttttcttcgaacaattacgttaataatactgacagaaaaatatatgaatacaagttggaaggattcagcaaagagtggagcaaaaccaacggtaatactgtggtattcaccaatatcccccccggaaagtacaaactggtaatacgtgaacaacaacagagtctactcgacgaaatacatgctatcgaactccccatccttattcatcatccctggtggaacacctggtggatgtggattctttatctctgcacaatcactgtcattggctggaatattttcagtgaagcacgttccaagatgcaactccgcgcctcactggcacaagaaaaactggaaaaagagaagaatgaagaactgatacaagccaagttgcagttctttgccaatatctctcacgagtttcgtacaccgctaacactcattatcgcacaaattgaagcactgttacaagtcaatagcctctctccttttctgcgcagtcgcctgacaaaaatctacagaaacacattccagttcaaagagctgatctcagagctactggatttccggaagatggaacgtgggaaactgcatctaaacgtttgccaaatggacctcatcccctacttgagacaaattcatcaagatttcatagaccaagcgaacttacagaatatacagttcatattccatacagaaacagaaaacttgttgtgctggttcgatggacgacaattgaggaaagtcctcaccaatctactttccaatgcctttaaacatacgcccgaaaaaggaaaaatagaattgtcaatcactgataaaggagattctatttatattaaggtgatagactccggcaaaggtattcccccaaaggccctaccgttcatcttcgaccgcttctaccaggcggacgaaaacttttcttcacccggtagtggtatcggcctggctctttcaaagggtattgtagaactacaccacggtcaaatcgaagtgcaaagtgcaatagattatggaagtatcttcacagtaatactacccaaagaaaatctctttaaagatgacaacgatgtcaccttcatagaggcaacaaaagcggaatctgcaacaatactcgcaccattcacagaaacgacagaaacagaagaatgtgcagaaacaccggaacctatttccattggaaggacggacaaggactgcgtactcattgtagaggataacgaagaactgctccaactgcttaccgatctactctcgccactctaccggatagttattgcgatgaacggcaaggacggactacaaaaagcaatggaagaacgtcccgaccttatactaagcgatgtcatgatgccggaaatggacggtattgagatgtgttccaagataaaaaccgacttcgacctctgccacacccccgtagtactgctcacagccctcacttcgaacgacaaaaagttggaaggactgcaatgcggtgccgacgaatacattgggaaacctttcaacaacaaaatgctgcaagctcgcattgccaatatactgcgtaaccgaaaactgctaaaacagaaattcagccagaaaatgacaactagtgaatctcctgctgaaattgagatacaagcactagcgcttaaccctattgatgccaagtttctggaacagttagaggaaacggtcaaagcccatctctcagactcagaattcgacgtcggtgccctagccaaggaaatggctttaagccgtagcgcattctacaataaactgaaagccttgagctgtatgtctcctaacgagttcattatgaatgcccgcctgaaatacgcagcagaactgttgagaaatcatcccgagctacaaatcacggaaatagcctatcaggcaggattcagttctctacgttacttccggcattgcttcaaagcctgtttcaatcagtcaccacaagagtacagaggaaagtgaaaaatcccgttctgctattgttgctgaacgggattcactctttgataccctgagcctattgattacatgttttttaaattttattttattcttcggttgctgcccattctttggcgccttgttctttcaatttgctagtgaaagccttcgctttttccatcgctgcttcctcgtcagcaggagcagcataagcgtgtctatatcctttcaccttattccattcaccacgggtaaaatcgggaaacgtaacagcagcacaaccattgtccatagagagttcacccaactctgccaagcagcaccattctgccaaatcataaacgtccatatccaacggaagaccattctgcaagcagtaaaccaaacggctgtccataatgaaatccataccaccatggccgcctacctctttcgccatctcaccatactttttcaggataggatgttgatacttctctactaaagctaccatctcctctctcggcatgaagccatgtgaattcaagtcgtccaccttaggctgaacgccggaagccttcaactgctctgcatcaagggcgtacccttgagtaggatatttattggcaaaacccttagtacccgtcagttgataaaggcggttgtagggttgcggagtcatcacgttatgctggatttcgatgaccttaccattagcggtacgaatcaaagtagtagtgtggtcaccattacggaaactattacaaacagaatcggcattttctttcaccaagtccttacctacgaccgatttggtatccattgctactaaagtctccatacggtcaccacgatgaatattgagggcctgcgccaccggaccaagaccatgagtagcatatacatcgccacgatgacgcatattataatccaaacgccagcccaatttgtcatcctcacctttcttccaataatgcttccagaaaggagcaagattatgaatataggcaccctgcgcgcgaattacctcaccaaacactccatgttgtgccatatttaaggtattcatctcaaaccagtcataacaacagttctccaaaatcatgcagtgcttacggttcttctcactaagatcaaccagttcccaacattctttcaggttcatagccgaaggaacttcaatcgctacgtttttgccattctccaatgcgcatttcgccacaggaaaatgatgcaaccagtcggttgcaatataaaccagatcaatatcatcgcgtttacacaattcttcgtaacctttatcacccaagtaaacagccgcttttggtaaagaagcttctttcagatacttttgacacttctcagcacgctccttttcatagtcgcacagtgctacaatctgtgtgccaggaatgtaagtgaaacgtgacacagcacccggcccacgcatacctaaccctacaaatcccacacgaactacttccatcttaggaagagccagcccgatgacactctcttgtccggcaggtcgttcgggagttttcactacaattgttcctttattccactcccattccgtacccttgtcgttgacttgtacagtagatttctgcattgtacatgaaccaaacaagaggcatatgcccaatgctaaaaaatttgttattttcatacgtaattattaattaaattattcttagtaggctatctcatatttcttttactgctcatacgcaccacaacctttcctttaccaccttccaatccacattctgcctccaacatattgtaaccttcaatgggatattcacccttataggtattctttgccggataagttttaaaggtagctcctgccggagcgatgatttccatataaaaatgtttgccttcatgcgtcaagcgtacccggttctcttttacttccacttgtgccttggtggaagctatccatgagactatagactgcggactgagtaagtccacttcatccattatctctattgtgtaatcatttaacaatttgaacgtgcggaatacagaagaagcctgatctttgtatagagtagtcatatccagctttacagaaggctgcttcgcatctgtatgctcttcgcaaacaaatgcctcgccattggcatactgaatcttatggtcgatactcaacgtattatgggaaaaattgttattacggaaatacttccaacgttgtccgtcaggacgtccgtcccaaaatcccggtagggcataatcatcagctcccagatcctctgtccaacaaaccccattgctttcaacaatgaatgtacctccatccaaatgttgatgcgcttgacgaggttctccacccttggctatcaaaaatagagaacctttcttatttctattcccattgaaaactattatatcattaattgtgttgtggtatatttctaaagcaggtattttctccacttttttaggtgaagcattgtcaaaccaaggaagtgacagaaagaaaagctgatgtagaagtaaattatcctgcatggtcaattttaacttttcccgataccattcagccacttcaggttggttatacatacggctgaataagaaaaatgccggagaattttgagcatcagcccccgcattaccgaaattaaaaagacgaccggacggagtaagtgtccgtttttgataaagcgccgtgcgctccaagccgggtagttgtgctatacctccctttccattgtcattatcagccaccgcctttaggtagagagttaaataactggtagtatatccccaataagcagggccctcatagcatacgccatccggagcaaaatgtttcaggcagttgggcatatacttggcagcattatcaagaatgacagcggcctctttcggataatcttctgcaatacccaaagcggccagcaccataccagtgttacataccacgttccaattggtttctcgtttcgcccaacttcccaagctacccttttcgtattcacgcaacacacgaacaatggcacgttcgtacaaacatttctttaccaagtctttagtcgaaataggcagcgcatcatacaaccagtcataagcaatagctacggcagttgccatttccgcagtatccaaatagtgaggtggatcccagtcgggatagttacacacccacaataaagcctcgttggcggcatccaagtatttccgctcaccgtagagacggtaagctaatgcaagcgtacccaagcggttcacataggatcgggatgtccacaatatattaccatatttatcctttaaataaggtttctgcggagtaatcgccaatgtatccgctttcgctttcaagaactctgccaactcaccggcaagctgattgttttgtatcaactgcttcacagcagcttcttctgcaccagtgaacagcaagcgagggtgattggaaagaaagcgttgctgaccatacatattgcaaacaaaaagcaacatgaatacaacaacagtgcatctgcccatatttgcaatcgaattaaaaaatagatttctcatattgaaagaattaaatgcaactcccgtgaattgtttttatgtcatacaaaaactaatctgtcaattttgtcacatccatactcggtttcggatagtttttagaagcaatgtagtgctttgtttcctcaatcatcttgggagtgacctcaaaatcatagttaccataatcgcctacgtgaaattttccggtctgaaagaacccccacgcatcgaaaaagtccgtaagatctgttttcaggaaatcacagcaaagcttaatatattcatacatattatgaatagatgcattacctgcccctttatgaggttggttacgtaaatgctccatcaggtcggcatagaaatccttataaccaatcttatcggcatagatttgaatttgccagaagggtatcaacttatggaaaggatccttcacacacatgataaactgcttttctggcgcattaagtactttactaaaagcaacctcataaatatgacgcttactcaaacggctggaatcacccaaactcatagtaccatacatggagaaaagattattactcacttctgtcattcctccccaagtaagccaaggacgcatctgcatcacgtgtcctatctcatgatgaataccccagttagttgtcacttccggacctatcgctgccttcatagtgccatctgtaccctcaaaagctacaccgtcaccatcgcgaaacataaaatagttaaagttgacacgcgccagaatacgcttctttggtatacgattatatttcgtggcacccgagaaatcgtattgtacctgcattaccttgtcataattctcagccagttccttgcctttgccataagtcaacttttttaattgctccacagggtatgctagttgaatatatttccccttcacatccataacagggctgaccgcattatctaatagacggttccagtcttcgttactctgtacagtagcgtcaaagtacccatttaccttcccagttacaaagtgaatggtaactgccggtgcagtgtcggggtcatccgcgaaatagtctacatacacattaccggctttcttcacattgattacgttcacaccttcgtgtaacagtatctcttgttttttcagtccccagccttcggggtcttttgtcggttgatagcctagagtaggttgacgcatccagtctggaatgagcagtcctacggtgcgtccgtgaaggtcacccaccaatactacattttctccagcttccaaatagaccccggtaatgttttcgtaacgactgtatccgttggtgagtttgagttgttgctccagtaccttatttgagggtataggcttataactctgtaacaagtaggccgagttataatcacctctctgcattttctcggccaattgcttcattagctgggattccatgcctttcaaatgtttgtctttaaagttcttagacagagatgatgctgtccaatcagtaaagttagtaaggtccttgtttacttgataggtggagtaagagggtgtttgcgcgtagagtacccccgccaaactacaaaaggcagccactgtccacttgcgaagttgtttcatatttataacgtaataaagattaatttatatgcaaagataaataaaagaccgcctattctaacaggttgtgctaaaataagcagccttcatttcaaatagcaactctattttatttaatagaagcggctatacgactgccgtcatattgtacggccatcaacttatatccattttcccaagcagtattcatcttataggatttcttagtaccttcaaatacgcaaataagtttattgtcggcattgagcacttcgaaagctactacattttgccagttattaacggtaatagtagaagtggtgattccttcatcgttggtttcttcttgatgtgaagctataccggctataacattcttcttatccttgaagatatctacggtgttatctacaatatattctacagcatctgtacatttaggtaatcccaaggcaacgatacgatttcttacattggctatctctgtttcagtgatggtgaattgtttgttggtataatcaccaatcatcatatcgatgggtgataagaatccccacttctcaaagaaaccagtcaagtccataccagccgatacgcaactgttataaacaaattcgagttggcacaaaccatcggttgtcggattagctgtggtacgtactttctcatagatgtctgcatagaaacctccgtgatcggtccgtttcatcggagtgtttcctttcacttcgccaaagtagagttccaattgccagaacggaactaatttgttgaatacatcgctttcggcattatgtgccttttgacctgccataatgctattgaaagccgacacataacgatcctgaacagtcaaacgtgacggctcgttgtagaccttagtttgtacataaatggcagtaatgttgtttgttacctctgtcatgccatgccatttcaatcccggacgagtttgatgaatatgtcccaattcgtgtgcaggtccccaacaattggccgccatttgggtctcatcagccagataattcaaactactttcaatgtaggctgtatgataatcggtagcatacataaatgagccactattataatggacatggaaataactacgattatgaaacatacgatcatacttttccaatcccaagaactcttgctgacgataaatcatatcatcataaaggttaatcaggttatctacatccttagtataattcaagaaactgcgcgtagtaaacgtaagatgcacatatttacctatcacatcaaagtgagtatctacactattattgagtaactctttccaacgtcctttcagttttggattttgactatcgtaatatccatttaccttacccgatgcaaaatgcagagtgatttcaggggcattttcataatcatctttgtgatacatcacatacacaagtcctttctctttaatgctaatagtattaacaccgtttacaatggtatattccgttcctccaaatccatcttgtcctggtttgtcgagattctgtacacggatattcactttatccaatccattcaaatcggccattactaccaagttctctccggcaggaacaaagattcctgttggattatcaagtaaactatatttagctgttttattaacagcagcatcgatatcaggatgcggataagccttatagttggcaatacggaactcacgttggtactcattattatacataaaccaagccaaagtcttgtaaaatgaactcttacaattcaaaatatcctcttcggtgacggtaggcttcaagtcagtgcaagcgatatcagtaaacagttcatcatatttgaaagcattgggatctttttggaagaactgcatttcttgacaccgcaatggtttgctcatattatagcaagtactgatagtaaattttacctttgtcacattgctttgggaagcattgaagtctgcacgtgtagagttggcgttatcaaatgtcccttcgtatactttcacatattctgcactacgtgttttattaacatcggtcaacacttcaatcttcacatctttaaaacgattagcagaataggtacaatgataaatgatgtagtccaaatctaccggttcatcaaaagtatattcaatatactgaggatataccaatcctattggagctttccaattcgcttgccattcggtagtcaaatcattatcgaaagttgcatcataatttccaccgggcacaccaccatcaccttccgcactgttgggaaacagttgaatatcgttgccctcttcaggtgcaacaggttcgtaaacatccagtcctttttgcaccacattaataacggttggctccaagtcggacatttcatcactatcggcaaacacaatttcacccatacgttttgctcccttgttactctctattttaaagaggtattgtttggtaacagtttcctgcggagcacgggtatcaggttgagtctcttttattatccaatcggggagggtaataatatagtctacattcgaagttacttccaccaatactttatctccggcagcatcgatattcatgttctgaggagataccaaaatagcttgttggtaacctaactgcgctacacgtacagtatctgtttgagaaaatgcctttacatagaattcacctctacgcacatatttgtcttcactcaaaataacacttacaatcaaattgtcatcttcattacgagtcacactacaccagccttgtagttctttgctcaattctacagtccattcttcgttacaacgaacctccagtatccgttctccactgttttggtcaaagttcacattgtagctgtctaagagcaaaaacggagtgagcggtatatcaaaattataatcgtcacagccagttaatatagtcatcccaaagaacaccattataacccaaccagctattttttttaataaattactcttcatagtatattttctttctgtattagatactttatttgccttccccctcatccctaatagacatgagagagaaagctttttctttaattatagtaagggttttgcacaatatgcgggcatttgttaatttcctgataaggaattggcattagatattgtcccttatggaaatttcgcggtaatggaagatccatcggagtaaaatcttccaccttagtagcattagtattcagtccgcgatcgggcattccacaatgttgctctgctattttccaacgacgaatatcgaagaatttatgaccttctaaatataactcgttcatacgttctgcacgtacaatctctcgcatcccctcttgagtgttttggtaaccaggattagtagaatacttatcccaagcctcatctacactaggaataccggcacgttcgcgtactttatccaaatatactttagcttcggataaacgatccaactcaactaaagcttcagcatagtttaaataaagctctgcaagacggaataacggaaatggatattctattacattccattcagcggacggtacaacaccctttttatttccaaatccagaaatagaatactcctgatcggtacgattaccacgaccatgaggatcatctctcaacaaatggattctgatagcacgcttagccggatcagcactaatttcttcattgttatatttaccaaattcaaaatatccattatgataggtagtccacgcataaaatcggggctcacgatcggtgcaaagacgcattaccttatcactactaggagtaaaattagcatatttcacaagatcctcataattgtttccatcacaattttccggagcactaatatattcataacgttcgtcatagtcgaacgttttatccttatttattggaagcccgtttttagtgtaaaatgcttcaatggtttgcaaagtaggacagttagtcatactgataccagcaaacttaccaccgagcgtctgacgaggcggacagcgacgctgtattccataatagtcatcattacgtgtgtcagcccaaataatttccggattattccctgtctgattgtcgatattggtatatctcaatcttcgttgtgctttattgggaagtcccggtttagcatcacttggttcaccggcatccgcatcgtgatagagatggaatttagctttttccacttcatcaattgcatactttgtttgggtagcacttatttcccattttgcttgacttttctcttgagctattaactgacgtccatctaacggactacggaaatcggcatacatttctgtgtttccattatagagcggtgaagcagcatagaggtaaactctggatttcaatgctaatgctgcaagacgtgtggcacgaccataatcttttccactccatgtagtaggtagtccgccttcagacattgcttcatccaatttttcgttaataaaggccactacttcgtctatactactacgttcgggaaaaccactaatgggtgtttctaaatctataacactgcgaataatcatggtcggaccatacgaacgcatagacaagaaatgataataagctatcaaaaaattagactctgccaaatattgttttttcatttcgtctgttacatattcgttggacacttgtttcaagctttcttggaacatgtagcattgatgaataccattccaaatagtagaccatgtattactagtaaatcccaaactgacaggactataataaccgtatttgaaagtggtaaacaattctttggtaacagctgtgagttcttccgcaagccaataactgttaccgaaagttctgttagccggtaaatagccataacaagaatagagatatcctcttaccgcaccttccgtcttccaagtatccgattcttgtgcacgttcatcggggacaatgtctagataatcgcaagaactaagttgccccatcattcccaatacgattaaaaattttgctatctttttcatatagaattcttatttattattaaaggttacttgaataccaaaattgatgatacgttgagtggggtacttcataccactaccgctccccatttcaggatcccaataatcgaaaggggaaaatgtcaacagattctgtccgcttaagtagaagcgccagcctttgaaagtataacccacttcggcatttttcagtttcaaaaacgaaccattacgtaaccaataggttgagttttgtgtattattgccattgttttccaatgtcaaacgcggatatttggcatcaatattttggttttcagtagtccagtggtcatcggctatgtatttaaacaagccgcggatacgtgcctcaccaaaaggatggataccactcatcaaaattgaagtcttagctactccttgaaagaagaaagagaaatcccatttcttgaatttgatagaaggaccaaaaccatatactatttccgggtcttgcggattgcccacataacgtcggtcattgccatcaatcacattatcatattcaccacggtagttaggaagattatgataccaaatatccccaggttgtggagtgtatcccaaagctttttgatcggggttattatggatggtcttttcatcggggaataatccgttgtcaatatagagcaaatattgccctaatgaatgccctaccgatgacaagttaggatattcttggaaaggaggctcatctcgttccaaaatggtattgtgcgcataggtgaatgttcccttgaaagagagaaaaagatctttgttcacctgtttgttataatctatcgacaaatccatacctatatttttcatcttacctaagttagcatataccgttgctccgctcaaacccaagaaatcggggattgtactacctcgactcaagaagatgtctctacgagtctctttgaatgcttcgactgtcagattaaaactattataaagttgaagatcaatacctacatttatcttttctcctatttcccatcccaaatttggattaaagaaacgagaccatttaggtcccttgtaagttaccctgtttccaccgacacctgtagtgtatccaggactaccacccaaatcaatatcttcaagataagtaaatcgtccggctccggtattatcattacctaccaatccccacgatccacgcagttttaagttggaaatcacaggacgaatattatcccaaaatttctcatttgatatgttatatcctacagcgatagatgggaagaaaccatagcggttacctgatgcaaagttttccgaaccattgtaaccaaagttagcttcagccatatagcgaccatcgtaagcatacgacacacgtccggcaataccctgtttgcgctcaggcagtgaggaaaaaaggtcagtcacattatttgtattgtactgctgacgattaaacaaaaacatggcattcacatcgtgtacaccgccaaaggtatgtttatagtctaaagtagcttgcagatagagtttacggttaccgctatgcgagcccgaggttttaatagcagtaccacgttcattgcccgttctacgaagagtatattcaccggtttcgtcattttgagaagcgacctcaaaagcattatagtcactcacacgagtggcattactgcttgaattgtttttgtaagagaataatccattgaatgtcaatccttttataaacatacccaaatcctgctgcaacttaaaattggcagtaataatactggtatggtttgttttgtatccggtcacgtagtcagctacaggattcatatatccaccggtagcaaatgggcccccacttttatccccccacataatatcttcggtatcatatccataaccagcaggaaaagaaacaggatagtctacaggattgtgttccatagtagatgcaaataaagaacttgtactagcattcggtcctttccaatctttaatagaggcattcaaacccaatgacagtttagtagtaggagtcgcttgtacattcaagttattaataaaatcgtagttggttacattgatgttattattatagctgaaaccatatttctcgctcaacgagttcaagttaccatcgctgtgtttcacacccacactcataaagtagtccatttttttgttacctccacgaatattgaagttggcacgctgggcaaaagcattttttttgaacatctcatcataccaatctacattaggataaagatagggattgagtccggcacgtgttccttctatcttttccctactatagggagtagcagccgaagtggggcgagcggctccttcattataagcttccatataggttacaccatcagccatttcaggaactttggttagcgaggtcaaggctccctctaagcgaaagttaataataggcttgtcaagatctttaccacttttggtagtaataatcattacaccattggcgccgcgtgtaccatatagcgcagtagcagtagcatctttcaagatagagaaactctcgatagcttcagcatcgagtgaattcaattcagtactgctgatttccacaccatccaaaataataagtgcaccagttgcgccactaaaggtagatttaccgcgaatccagaaactggccccatcggcacccggttcaccactacgttgtacagcaatgacacccgaaagacgtccggcaaatgaagtagacaaactagaagaaggtacctttaattcagcaggtctcacctgtgtcacagcaccaaccaaactttctttcttttgtcctacgccaaaagcagtcacaaccacttcatccaatgattcagtagcttcactcaactcaactgtataagtcttcaaatgacttatactgatttctttgctctcataccccaaataagaaatgataagcacatctccttttgatgctttcaaaataaattcaccatcaagattagtagtagtaccaacagtagttccctttactttgacagctgcaccaataactggttcactcgtttttccatccaaaacaacacctcggatttcgcccgttttttgttgtgctcccatagaattaactaaaatcacctcatttccatttactccatttgcgaatgaagaattcgaaatgaaacaaagacctaaagtcaacaaaggaagcgcactaagaattatgccacttttctttttcataataataaagagttttttgttttcataataaaagttttattttagataaagggttaattatttaccggcacaaaagtgaataattccattcaaataaagaggatatttcatctatttcaggtactgaatttgtcttctccatgaaaaaaatctattttaacacaacagagagaggattaacgatttctttcctaaaaaagcttcttaccggacaaaacgttaaaaacaaaagtgaaaacacaaactccccttcgaatggacggaatatccccctacctattttatataggaataactttgcagcataaaaacatctaacatataatatctaataacatgattaaatttataaagaagaatccggcaatcccccaaagatggattgtacttactgcattggcatattcactaactgccgcacaagctcaaacgccccaagcagaaaaagcatttatcaaagagaatatggaattcgccaccaaacaatatagtttgatgatgcaaacccctgcacaaggaaaaaatggaaaagctatcatgccacacagtatgcgcaaagacggtactcccagcaaaggaagtatttacctttggacagcaggctttttccctggtacattatggtatctatcaaactacacaggtgacaaagctttgcaagactctgccttagtttatacacatcaaatggaacccgcaaagaccttcacagacaatcatgatattggattcatgatgtattgcagctatggtaatgccaatcgcttcgcaccaaaagacgaatatgaggacatattagtagaatcggcacgttcactctgtacacgtttccgccctcaagcaaaagtcattcaatcatggaatggatttcgcagttggcacggtgacaaagtatatgattttcctgttatcatcgacaatatgatgaatctagaactattattccatgcctccaaagtgacgggtgatgaaagttttcgtaaagtggctatttcacatgcagaacaagtaatgcaccatcaagtacgtaaggactacagttgcttccacatcatatattatgataaaaaaacaggcaagcccatcaaaggagagacttctcagggatattccgataattcagcctggtcacgtggacaagcttggggaatctatggatttaccatgtgttaccgtgagacgaaagacaaacgcttcttgaaaactgcagaaaagatggcagacttctaccttgatcatcccaaccttccttccgacaaggttgcctggtgggactttaacgcctttcaagaaggttacacacccggtatccgttccaacgcctgtaaaatggtaaataactaccgcgacgcttccgccgcagcctgcgtagcttcggcattactggaactgagtacttatagcaaaggtagcaaaagtaagaaatatctggaaagtgccaaacaaattctacatgcactaggtagtaccaactaccgtgccgagctaggtaagaatgcaaactttatactgatgcatagtgtaggtgccgtacctcacaattcagaaatagatgtgccgctaacgtatgccgactactatttcatcgaagctttacatcgttataaccgaatgctggacggaaaaagtccactataaataaaaggaaaaaacatgaaaagaaagaattatctaatctgtttactaacggctataatactactgccaataggagtacaagccaaagacaagaaaaaaggaaagaagaatattcccatgacggaaattcaaaccactggcacccaagatcgagccatatgggtaaagctactttggaaaatatcatatcctgtcatccataacctcgcagaaggaacactacaccagaatatgcccattgagacccgtagcggtgaaacagcaggctacaaagacatgacacatctggaagctgtaggccgcacactcgccggggttgccccttggctagcactccccgatgatgatacagaagaaggtaaactacgcaagcagatgcgtgaagaagtactgaaaggattaaaaaatgcagtagatcctgcatcacccgacttactgaacttcaccaaacacgctcaacctatcgtagatgccgcctatctggtacatgccttcctccgtgcccccaaagctttatgggaaccattggatgaagttacaaaagaacgctatattaaatccttccaatccttacgtgatcgtactggtgcttacaacaactggttactcttcaccggactaacagaatcatttctgttgggaaaaggtgtacaatacgaccagttccgtattcgtgtaagtaaaaataaggtaaaagaatggtatgtaggcgatggctggtatagtgatggtccatcattcagtatggataattataacgcctacgtgatgcattctatgatggtagctatgctggaaaatcttttacctaaacgttgggcaagtcagaaggagctagacgaagctatgaaccgcatgatacgccactctgaattttgtgaacgtatgatagctcccgatggcacatatcccgctttcggacgttcggttacttatcgtaccgctgcattccaatcgttagcagacgtagctctacgcaaaaaattgccctcacacgtttctcccgcccaagtacgttgcgccctgactgccgtacaccgaaatatgtatgagggaaatcagaacttcgataaggatggttggttagtgctcggcttcaacggtcatcagccagaatgtgctgatggttatacctccactggcagcctttatatggcaaccttaagttttctacctctcggtcttcccgctgatgatccgttttggacagatgcatacgcagattggactagcaaaaaagcttggaaaggaggacatctacacaaagattacaaagtggaatactaaaacagggttatcaaatggtccagaaaccaacctttataacttagcaaggcatgaaaatttgtatataaacaataaaaatgttgtgattaaataaccaattaccatcctcctgtattatcctctagtataacggtatagagttaatacaaggggatggatccaaatggtttaatccgtataccactatcttttactgcatagcaatctcacaatactacctgtaaatcagcgttgacaaatattcctcagcaaacatctcattggcgacttccaacaaagtctctgcagtcaaagcctctatacgtttaaagacaagctcggatgattcatacttatggtaatgcaggaaagttttcgccatgcccaacgcattattctcaaaattatcggaggccaccccaatttgtccgatcaactgcttcttggctgccgccaactgagaagaagtcattttcacatcccgcattcgtttcagttccttataggtcaatttcaaacaagtatccatatcttcaatatccgtcccgaagtagatgcagaaagcacctgtatcggtataagaagtcagattggattcgacattataaaccaatcccctgcgttcacgaagagaaacattcagtttgctgttcattccaggaccgccgaggatattattcagcagatagagtgcggtacgtttgtcgtcgtatgcattatatccacggctaccaatcattacatgtgcctgatgtgtgtctttagttaccgttaaatgttcaggaatataaagaggcggaggcgtacggcggttctcaatttccacagcaggaatatccgacatatatttttctgccagacggataattttcttgaaatcatattgtccttgaacgaaaaacaccatattccccggctgatagaaccgacgggtaaaggacaggacatcctccgtgcgaaaactcctcagaagttccggtttccccaggatgtttcttcccagcggatgattacggaatatcatatcttcgaaatcatcgaagatcaattcggaaggattgtcttcataggactggatttcgtcaataatcacttctgtttccttttcaatctcatgttgcggaaaagtagaatggaatacaatatcccccagtagctcaagcgcacgttccagatgttctgtcaggaaggcggaatagacaaccgtttcttctttattcgtataagcattgaggtcaccgcctacattctccattcggttgagaatatgccaagctttccgtttcaccgttcccttaaaaataagatgttctacaaaatgagccattccctgttcatttgccgcttcatcacgggtgccggcatcaatcgcaaaaccacaataagctacttttgaaagcgtcggttcatggataatacgcaggccattaggtaatgtatattcgttgcaatgcattgttttctacttccttattgaattaatgccacaaaaatacaataaaacttattgctgtttatagaaaattgcagatatttgtggactataacagttacaacgtatatggaaaagataggaattttctgttctgcctctgaaaacattgacaaaatgtacttcgaaagtgctcgccgaataggcgaatggataggacagacaggcaaaacgttgatttacggaggagccaacctcggacttatggaatgcgtagcacgcaccgtaaaagaaaacgggggtaaggtcattggagtagtcccgaccaaactggaagaaaatggtagagtaagctctctactggacgaggtgattcatacccgcaacctgagcgaccgcaaagatataatgacggaaaagtcggatgtattggtggcactgcctggaggcgtaggcacactcgacgaagttttccacgttatagctgccgcttctattggctaccaccacaaaaaagttatcttctataacgaatatggtttctacaacgagctgctgaaagcactcaaaaccttggaagaaaaaggctttgcccgccaacctttctcaacctattacgaaatagcaaacactccggatgaactaaaagaaaaaataaactgatcatatgatagactccattaaacaacttttgcaacaggaagcacaggctgtgctcaatatccctgtaacagacgcttatgagaaagcagtacaacttattgttgaacagatacatcagaagaagggaaaactagtaacttccggtatggggaaagccggacaaattgcgatgaacattgctaccactttctgttctacgggtattccctctgtatttctgcaccctagcgaagcacaacatggtgacttgggtatcctgcagaaaaatgatttgctcctgcttatctccaactccggcaagacgcgtgaaatcgtcgaacttacccaacttgctcacaatctggacccggaactgaagtttatcgttatcacgggaaatccagatagtccgttggcgcacgaatcggatgtttgcctaagtaccggtaaacctgccgaagtttgtacgctgggtatgactcctactacttcgactactgccatgactgttatcggcgatattctggtagtacagaccatgaaggaaaccggattcaccattgccgaatattcgaaacgccaccacggaggttatctgggagaaaaatcaagatcactatgcgaaaagtaatcggtatcggagaaacaatcctcgacatcatctttcgaggcgaccagccttccgcagccgtaccgggaggctctgtattcaacggcatcgtatccttaggccggatgggagcaaacgtcggtttcatcagcgaaaccggtaacgaccgcgtgggaaacattatcctgcaattcatgcgtgacaacaatatcccgaccgaccatgtgaatgtattccctgacgggaaatcaccggtatctctggcttttctcaatgagcaaagtgatgccgaatatatcttctacaaggattaccccaaacaacgtctcgatgtcctgttccccaaactggaagaagacgacattgtcatgataggctcctactacgccttgaatccggtattgcgggaaaagattctcgaactgctcgaccaggcgcgcgagaaaaaagctattatctactatgaccccaacttccgttcttcacacaaaaacgaagcgatgaaactcgctcccaccattatcgagaatttggaatatgcggatattgtacgaggctcattggaggactttttctatatgtacggcatgcaggacgcggacaagatatacaaggataaaatcaaattttactgtcctcggtttatctgtactgcgggaggggaaaaagtatcactccgtacaaatttagttaataaagattatccgatagaaccattggaagctgtcagtaccattggagcaggtgacaacttcaatgccgggctgatctacggattacttaaatacgacgtcagatatcgtgatttgaacaacctgaacgaagcaacctgggataaggttatccagtgcggaaaagactttgccgcagaagtctgccggagtttcagcaactccgtatccgtagaatttgcggaaagctataaataatacccgcgaaatagaatagcggtacaatattttattaactgataaatgatagttgattcaactatattgactatctttgcacccgaaataaaagatatacagagatttaatgaagacatttgaagagcttggcgtttctccggagatacgtagagcaattgaagaaatgggatacgagaatcccatgccggtacaagaggaagtgattccgtaccttttaggagaaaataatgatgtagtagctcttgcacagacaggaacaggtaaaacagccgcattcggcctgcccttgctccaacagattgacgtaaagaacagaattccacaatcgcttatcctctgccctactcgtgagctttgtctccagatagcaggagatttgaacgattattccaaatacattgacgggctgaaagtactcccggtatacggtggttcttctattgacagtcagatacgcagcctgaaacgcggtgtacatatcatcgtggccactcccggacgtttattggacttaatggagcgcaagaccgtatccttgtccactattcgcaacgtggtaatggacgaagcggacgaaatgctgaatatgggatttacggatagtatcaatgctattcttgccgatgttccccaagaacgtaatacgttgcttttctctgcaacaatgagcccggaaattgcgcgtatctcaaagaactatctgcgcaacgctaaagaaatcactatcggccgcaagaatgaaagtaccagcaacgtaaagcacgttgcctataccgttcatgctaaagataagtatgaagcactgaagcgtatcgtagactattatccgcaaatttacggtatcattttctgccgcacacgtaaggaaacacaggaaattgcagataaactgatgcaggaaggttataatgccgactcattgcacggtgaattgtcacaggcacaacgtgacgccgtgatgcagaaattccgtatccgtaacctgcaactgctcgttgctacggacgtagctgcccgcgggctggacgtggacgacctgacacacgtcatcaattacggattgccggatgatacggaaagctatactcaccgtagcggacgtacaggacgtgccggcaagacaggtacttctatcgccattatcaacctgcgtgagaaagggaaaatgcgtgaaattgaacgtatcatcggcaagaagtttattcccggagaaatgccgacggcagcaggaatttgccagaaacagttacttaaagtaattgacgacctcgagaaagtaaaagtaaacgaagaggagatttctgaattcatgcccgatatttaccgtaagctagaatggttaagtaaggaagacttgattaaacgaatggtttctcacgaatttaaccgctttgccgaatattaccgcaaccgcgcagagatagaagtaccgaccgatagccgtggcgaacgtaccggaagaggtgaccgaaaagaaggtggtttcgaaaaaagaagccggaaagctgctccgggcttcaaccgtttattcattaacttgggcaaaacggacagtttcttccccagtgacctcatcggcttgctgaatagcaatacacgtggacgcattgaattaggacgtatcgacttaatgcagaacttctctttctttgaagttcccgaaaaagaggctatcaatgtcgtaaaagccctaagccgtgcgaaatggaacggacggaaagtcgtagtagaagtatctagtgaagaaggcggaaaaggacatgaaaacggttcaagtgaacgcaaaggcggaaaacgattcggcaaaggagaagatcgtactccacgctacgacaataaagatagaaaaacaaaagatgcttctaccaaaggtccaaaatccggcaaaaaagaaaaaccgagtcgtgcagaacgaggctattcggatgctcgcggtccaaaaaagaaagacgactggcaggaattctttaaagacaaagaaccagacttcagtgaagaagggtgggcacgcagaaaaccaaagaaataaaaactttcaaagcaaaaaccatagaattccccttttgagggaatggttccttctttaaaaaagttgtaccaaaaacgtttacataaccttttataaggtgagttcaatataaacttaagattatgcttcccttcctttggaaaggaaggagaagcatgagaatgaagttatatcaaactcaccttatttttaattcttttatcagatttcccgctttcccgtatttctcgataataaagagcatataacgcacatccacaccgatacatcgttgtaaatcgggttcaaatacaatatcactgctcatggcttcccaattgccgtcaaacgccagaccgagcaactctcccttaccgttgaacatggcactgccggagtttcctcctgttatatcattgttggagataaagcagacattcatatctccctgttcgttggcatacctgccgaagtcgcgggaagataataaagacaagagttccggctgcacggcaaagtcaatgtctccggcatgctcttttaccttctcaaagatacctttcactgttgtataatagccgtaagtagccccgtcgaaaggagaataaccactgaccgtcccgaaactaagccgcatggtcgaattggcgtcgggatagaaattacggtcggcatacatacggcgcatggcatcattgaataagcgctctccctgttcgatctgctcggaagcttcggaaatactctggttcatctcataatatttcacaatcaggtcaagactcaaagatacggcagggtcttcaatcagattatacgtcgtatcccgttccaggaagcgtttcaaacctttaggcgaggttatattggatgttgcatacaaggagtctacataggcttggatattcccgttatagagcgtgtcgatcttatcgtacatagcgggaagatacttcttgtccactttcgtttgatactctttcagcatggcggcaaagacttccttgtcaatggcagtatccaggttgtcatacttttccaacagcttcttcatacggcttaccacttgcttttcttccgcctcaaagtcgaagttcagaatttcaagcgcaagctgaaccaattcaggaccattgataaatgcttcaccgaaataagccaaggcacggtttatctcacgacgattgccataattcagctccagggaagagaataaacgaataagtttctccctttcttcgggatgcgcctgaatccattcgcgcagtgcagcctcggcagcacgtttcttttccagcactttcaggtgttggatcgctttattggttccgatactattcttccagtaattagagctttcatcgtactttgaggcatacttgatacggatgtccggacgacggtccatttcccgcttccagatagcctgtttcactccacgcacgtcaatcatagcctgattgatgccgttcatcatctcctcgatgccatacgaagagagataacgctccgtactccccggataaccgagcgtcatacagaaagagccttccttatatccttccaaagagacaggagctacatattcgggatgatagggcacattgtccggagaataatccgccggaccgttctgagtgttcgcatagatacggaatacgctgaaatcgcccgtatgacgcggccacatccagttgtccgtatcccacccgaacttaccgacagaggaagggggagcaaataccaggcggacatcattataatcacggtaaacagacagccagaactcatttcccgcatagtaggcgtcaacaatacccgtcaacgtggagtccttttccgatacttccatcccgattacattcatcacagaatcgactgccacccgccgctcggattccgtcttggcgtgtttggcggcagacaatacccgcttggtcacattttccgtacgaagcaggaaacggacatataactcgggattcggcagttcttcttcgaggctacgggccacaaaaccgtctttcagataatcatgttctaccgaagaatgttgctggatactactgaaaccgcaatgatgattggtgaacaccaacccgtcttccgatacgactactcccgaacaaaagccgccgaaactgacaacggcatccgccagacacggcttcttcggattatataatttatttacaggcatctgcaaaccaagttctctcattacccggtctgtttgcttattcttcttaagatttcccaatagccacattccctcatcggcaaaagcattcgacaagcaaagagcaaggacaataactgcggtcagtctgaatttcatgctattatttttagattctttattcggtaatcaacctcaactttttcgcccctacccgggctttcagccactcgctgattttctctttctccgtattcgtcggatgtttggcaaacttcatgacagccagcgtcaccgtatccgttttcatcgaatctacccgtacttcgagcgagtgagcaatggaaagcgtagtgatagaaggataaagcaccttcagttccggcaccagtgtacgactcatttcatcatacgatttatattgttggagagttgtctccagttgagttattttgactttctgttcctgaagccgttgttcgctgttcttgtagaagtcttccattaccatggcacggatagaagacacatccaccgcttcgttgttcataccctgcaatactatcagcttggtatcttcaagtttatactctttcagtttactgcgggctatggagatcgaagcgtccggcacttccgagccgatcaggacaacacggacttccttatgttcatagctgacctttttatcaagcacttgcgtattctcgaatcccaactgttcgttgataaaccggttggccgccgcttcatagaaagtacttttgataatgccgaatgtcagataaacagccgggcacatcgtcagaatcacaatcaggatgatatatttacgcaccgtcttttcacggtttttatcaacgaactctttccgctggaaatgcatcacacgcacaccgataaaagttgcgaggctaatgaatacggaatttatgaagtagaggtaaaaggctcccagaaaatagatcagattaccggaagccagcccgtaacctgccgtacaaagcggcggcatcaatgccgtagcgatagcgacacccggaatcacgttccctttttctttcgtagaaagagccaccacacctgccagaccaccgaaaagtgcgatgaatacgtcataaattgtcggcgatgtgcgggccagcaactctgactgcgaaccggcaataggcgccagaaggaagaagattgtcgccgtcgtcacactgaaagcggtcgtaataagaaaactctttaaagaacgtttcatcagttcgaagtcgttcaagccgacagaaagccctactcccatgataggccccatcaacggagaaatcaacatggcaccgatgatcacggcggtagagttcacattcaagccaagtgacgccatgaaaatggcaaagataagaatccacaggttcgcccccttgaactccacacctttacggatagaatcgactgttgccagttcattatccttatcctttctcaaatccagatattcgcctaaaaaggactttatggcgaatttattacgttcatctgtcttcataagttatttcttctttataaatcgattaataacaggtagctgacttaacggcaaatctttcttgacgatgtatgctacaaacaacaataaaagcacagtacggaaagccagacggagcacaagatcagaaatcggcacttgttcgccaatcacatacagtaccgcagcaagcaggatataaagtcccagacttttcaagtcatactgaatcggatacttcttctgtcccatccaataggacaacagcataatcaccccatatccggcaacagaagcccacgcagaagcaatataaccatacacaggcacaaacacaatgttcatcaccacaataatagcacatcctatcagtgagaaataagccccccaacgtgtttcatccgtcagtttataccaaaaggaaagattgaaatagattcccttacatatttctgcaagcatcacaacagccactactcccagcccttcccaatatcctcttgccaccagatagcgcaacaaatccaaatagaacatcacggcaaggaaagccaacaatgagaagatgaggaaatatttcattgcagccgcatacattttacgattgtccccttctctgttttttccaaaaacaaagggttcgtatgcataacggaaagcctgcgtaaacatagccattaccatagcaatcttactggtagccgcataaatgcccaactggaccagtccttcctgacgatcctcgaaaagaaacggataaatcatcttatccaccgtctgattcagaataccgaccagccccagaatcaacaccgggaaagaatatactaccattcgttttagcagtgccttgtccaacttataagcaaagcctctcaattcaggaataaagaagaacatctgcactgccgaaataatcagattactgatgaaaatataacctaccagataatccggatcataaaaccaggaaaccgttgccggaaaatgaacattcagccacggacagagcaacagaaagaacagattcaagccaattccaccgataatggaaagcaatttaatagccgcaaacttaatcggtcttttcttataacgtaagtaggcgaaaggaatgcactggaaagaatccaaagccaccaccatagccatcatcgctataaactcgggatgattgccataatccagcagattggcgatcggttgcaggaacagtagacagagaaggacgaaaatcatggataccccgcctactgaaagcaaagagtttgcatacactttcatcggatcttcccctgatttattggcaaagcggaagaaacccgtttccataccgaacgtgagcagtacgagcatcaaagctgtaaatgcatagacatttgatactactccatagcctccggaagaagccggtaaaactgctgtgtacaacggtaccagcatataattgaggaatcgaccgacaatactactcaatccataaatcgcagtatcttttgctaatgatttcagtccagccatgttctattttatcagattaatgatattataatactaccttcaccaaaattgattaaaagtcggtagtatctccattctcctccttcgggaaggaggagtacccgtagggggaggtggtaggattttctctcctttttttcacaacctcccgaatctcctccacaatccgcgtaggattctcaaatacgactctattctcaaaacgtattacccaaatatttttctcattgacgagaaaacgtgcacgattatcagcataatccatagcttccgtagtagaatgcacttcaccgtccaactctatccccagccggaattgcgggcaataaaagtctaaaatataaggaccgacactatgctgccgacgaaacttaagtccatctatttgctgccctttgattaatttccagagagtggcttcggcagaagtactcatatttcttaaatcttttcgaacggattttagttcgggcttattcattatatcgtgcatagataattgttttatgtattcacctaccacctccccctacgggtactcctccttcccgaaggaggagaatggagatactaccgactttttactttaatcaattccggtgaaatggtaccgcccactatcagtcgttaaacaatgttttctgactgttataaaggcttcttcccaaatgtttgtaggcaagttcggtcacctcacgtccgcgaggagtacgcttcatgaatccttcttttatcaggaagggttcgtaaacttcctcaatcgtccccgcatcttcccccaaagccgtagcaatggtagtgattcccacaggaccgcccttaaacttgtctataatcgtacaaagtatcttgttgtctatctcatccagaccgtacttgtcaatattcaatgcctccagtgcaaactgggctatttccgtgtcaatagaaccggaacccttcacctgtgcaaagtcgcgcacccggcggagcaaggcattggcaatacgcggcgtcccacggctgcgggaagcaatctctcctgccgcacgcaacgagcaaggcacatccaatatggaagcggaacgacggataatgttactcaagatatcatcatcatagtattccagatgcagattgattccgaaacgtgcacggagcggtgccgtcagcagaccgctgcgtgttgttgcgccaaccagcgtgaaaggattcagatctatctggatgctacgtgccgaaggccctttatcaatcatgatatcaatgcgatagtcttccatggcagaataaagatattcttccaccacgggcgacaagcgatgaatttcatcaataaagagtacatcattcggttcgagactggtcagcacacctgccaaatctcccggtttatcgagcaccggaccggaggttaccttaaagccgactcccaactcgttggcaatgatatttgaaagcgttgtttttcccaatccgggaggtccgtgcagcaggacatggtcgagtgcttcgccacgcaagcgtgccgccttcacaaagatgcgaaggttttccaccaccttatcctgtccgctaaagtcctcaaaactcaacggccggagtgcattctcaaaatcccgttcccttgaagtaagctgatgttcgcgtatgttaaaatcttcctgttccatttatttcttgaaagtaggagacaaagatagagatttacattcattttcagtacaagaaaaacgaataaaaactccgggcacgctctgaatggcagctatcggaaggctatttataaagatttaagagaatataggaccaaccttgtgccaacgtattggcacagccatgccaccctgttggcactatcgtgccactgcgatggcacagttgtgccagcggggaagcactgtctgtgcaacgaagtcttcatctatgacgtgtcgggagacaaccttttatcctgttattagtttatttgaaacgtaataactacttttgcatcatctatatacacgctatcaactatggttttaaattacatctggataggattctttgtcgtcgcctttattatcgcccttataaaagtaattttcctgggagatacggagatatttacgactatcatgaactctacattcgattcgtcaaagacagctttcgaaatctcgttgggacttacgggagtattggccctctggctgggtatcatgaaagtcggagagaacagcggactgattaatgctctggcacgtttcctgagtccggtactctgccgattgtttccggatatacctaaaggacatccggtgttaggttctatctttatgaatatgtccgccaatatgctcggactggacaatgccgccaccccgttgggactaaaagcgatgaaagaattgcaagagttgaatccgaaaaaagataccgcttccaatccgatgattatgtttctggtgattaatacttccggcctcatcatcatcccgatcagtatcatggtttaccgggcacaaatgggagctgcccagcctacggatgtatttattcctattctgttaagtaccttcatttccactctgatcggggtcatagcagtcagtatcgcccagaagataaacctgatcaataagcccattctgattttaatgggtatcatctgtcttttcttctccggtttgatttacctgttcctaagtgtttctcgggaagatatgggcacttactctaccctgatagcgaatattcttctgttcagtgtcattatcctgtttattttaacgggtgtcagaaagaagattaacgtatatgattctttcgtggaaggagccaaggaagggtttacgacagctgtgcgcattattccttatctggttgcttttctggtaggcattgcggtattccgtacttcgggagccatggattttctggtgggaggtatcggatacgtagtaggactatgcggagtcgacacaagctttgtgggagcactgcccactgcattgatgaaatcgcttagcggcagcggtgccaacgggttgatgattgatacaatgaaggaactggggccggattcgtttgtaggacgcatgagttgcgtggtacgcggggcgtcggataccacattctatatccttgccgtttacttcggcagcgtaggtatcaccaagacccgcaacgccgtcacctgtggcctgatagccgacttctcgggtatcatagccgctatcttaatcagttatttatttttcttttaaatcataacattcaattatggctgtaacttatcaaacagaaggcatcaaaatgcctgaaatcaagaaacgcgagactacggaatggatcaaagccgtagctgcttcctatggaaaaagactcggtgaaatcgcttatattttctgttccgatgaaaaaattctggaagtaaaccgccaatatctgcaacacgactactacacggacatcattactttcgactattgtgagggcgaccgcctgtccggagacttgttcatcagcttggatacggtacgcaccaatgcagaacaattcggcgcttcttatgacaatgaactccaccgtgtcattattcacgggatacttcatctttgcggtataaacgataaaggccccggagaacgggaaattatggaagcggcggaaaataaggcgttggcaatgctacactaaataccagactttctcaatcatcctctataaatgaaaaaacgccctatcgtaatcactacgacagggcattttcattagccttcgctaattaacattaaattatttaagagagagatttattacttcttgtcgggagccacttccgaagtgactaacttcttgatagacttggtattcagatacaggaaagccaaccgtggaggtccgtcctgcgcaaccaattccaatgaatcaggtgttatgtaacctatacgttcacgtgtcttatacacttccacctttccatcttctcctttgctaaacccttcaacgattaaatagccatctttatcaatcttccaagtcttcaaatccaaagagggaatattgacggcagagcatttcccaccttttttaaactcaaatcctttcagttcaccggtagactgataggtataaggattgcaccatttacctataatttgtttctccaccttcttctgtccatagctgctgaatgcaaagcaagacagagccataactgtcattaatagtttcttcatttcatttatttttctagtaaatcatatttttggtcaatgccacgttccctcagatgaataccctctttcatccaacgcggttcttttgttcctttcaggtaatagtcgaagaattgcatcatccggatagtccagtccttctgggcagcctgattactaaggaaatgtccttcacctttgtagttgagatgccatgccggacgctgtaaacggcgcatagccaaatacaaggcacgcccctgttcataagccacggcctcatctttgtcattatgccagatcagtaacggcgtatgtatcttatcggcctctatgatagcggagtttgccagatatttgtccttggcttcccacaaattctttcccatacggctttgccattcttcgtacatgaaataacgcggtaaaccgcttccaccacgaatgcccaaataaccggtcaccatatcagtgataggagcaccaatattagcacaagtaaatagatcagttttagtcaccagataactggtttggaatcccgaccagctatgtccttgcagacctatctttcccggatgtgctatcccctgctctatcaaatatttggttccgcttactacggcatcataacaactctgtccaggtgttcctatagtgaaatgcacatccggcatgaatacgatatatccgttgctgacgaaatacatcacatcacccattgcgctgctcaacatcggagcatgataagtattcaatccacctgaatgcgtttcatagaattgtaccagtacgggatattctttttgaggatcataatcttccggcagataaagtattcccttattgggtttattctcatagtttgtccattccaccaactttgcagttccccatttgtattcactttgctgaggattaacattcgttatacggatcggatcggagaaatcggctttgctccaccacagatcacggaattctgacatattctgacgattccagatgcaatacttctgattatccgagaaacgatgaatcgcatagatataaggaccttccgcaagcttcttcaaacgacctttcatgtcaagcgaataaatgccttcatccatcgtattctcatcccacacactgactacaaccgtctcgtccggtttgaaaacttccttatcaatattgctggtcattttacggatagatctcttatttttgcggccatatcccttggtgaaacattccggctgacgttctccggttaaatctatcttccaccagtcataagcatcgtaaatcagtacattattaccatcagcagtccaacctgcaatgccataggcaggcgcaggattcggtttatcataagtttcctcgaataccggataaccaatagctgttgaaatatcggtaaccttacccgttgttccgtcaaacttattccatacctgtgcaacaggatcatacatcacagcccatttaccgttcattgaccacttcggtcttgtccgatagctacgtcctaccaattgcttttttcctgtatgcacattcacagaatagatatcaaacggcacttcattaagccattctttctgcatacgatagggagtttcgtccgtataaagcacataatgtatttcttctgcacggtccggttccaacaaatcagcatgaccgggagctacttccatcaattttccggaagcaatatcatagatatattttgaatattgaggacggaaataacgaccacgagtctgcaacgtaggaacttcatattcatcccaagtccacagctccagttcgaaactcttatccggctttacttcctcttcttttttatctttatttactttctcctgataaggtctgagttccattgtcaggaacttctgactgtgcgacagagtggcccgcgcaagttccattcctgccggtagaatcacctctttacggtcgaagaccaaatcgcaggtattcttctttaaagagaaattataccatagcgaatccttaatactgaattctcctgtcatcagttttgtatccaaactgaaagaaacaggttctttctttacagcactctgatagatagtctgatagggtcccgtcaatgggccataacacaatgcgtttccttttgcctgcctgcgtacaaaaatgatagaacgtccttcattgtacaaggtataataaccaatactgtcaatctgaaaagcagtaccgattttcagatggcgaaccaccaaacgattaaaagacgggacatgattgaccgtatctttcggaacgtttgtcactgagactgaataaggagttccatttaccggccggaaagattccttatatttccattctttcttgatacctgaaggaagttccatcaggatcgtcttcatatttcctgtagagtcagccttctgataagaaagagcttgatccaaattataaaactcaatgttttccacatcatccagcagaatctccttgcgggtacgtgtatcaaacagatgtacagtttttgcgtcggtgttttcaggattgtactccataggtgcaatccggtaggtaacccaacgtcctgtcggggagatatccggcgattcaacacgcttccacgacatgcaggcttcaatgtcaaccggcttcttctgtgtttgagcatcgacactcgggacaaaaccggctaacactcccactattaatccgattcccattattgtctgcttcattttatcttctcctttcatcttttatcatatctttattcaaatcaatatcacagtctgccgagttatcatgtaacaacagacgtgcaaaatgacgccacattttatgctcaaaaaagttctcggactcaccgaagaatccatgagtacatttaggtaacacaaacatatcaaagtccttgtccgctttaatcaatgcatctaccagacgtaaagtattggccggattcacagtctggtctatggcaccggtaaacagcagcaatccatgtttgtaattcttcgccaactcctgattcggacgcacacgtacactataatcatacgttttgctctctactcccaaactgtctttagtcgttgtcaccttctcatctacaccataatgaatctccacgaaacctttattgtaaatacgattgtcatggttgccggccgatgagacagcagccgaataaaagtccggataagtgcaaatagcggcagccgacataaatccgccgcctgaatgaccgtaaatacctaccttggtagcatctataaagggataacgggcagccagttgttcgatagcatatttatcatccgccagcggataatcgcgcatattattgtatccataggtatgataagcctttccacgcattggagtaccccctctgtggcctacggtaattacaatgaatcccagttgagccaaacgggtgttataaacatcatttattgtgaaacgagtcggcacgtactcgaagaacggccccggataaacatttgaaataatagggtaaactttcgtcgaatcaaaatcggcgggcttccacatcacaccataaaggtcggttactccgtcggcagcttttactttaaaacgttccggagctttccagcccatttcatagacaggttgcaagtccggtttctccaatgtcatgattaccttcccattccggttgcgaaccacgtttaccggctcctgcgacacggtagaatatgaatctaccagatagcgacaggagggagagatactgacttcgtgtgacgcattctccggcgtcaacagacggagtgcattcggacgatccaaatgagcttcataaagaatatagtaataagggtcaattcccttctcccgtccataaccatagaaatacatcttgcgtccgacagtatcaatttgcgcaaccgggccggctacccaagtaccgtctgtcagttgattcttcaggtttcctgttgctgtatcatacagataataatgtccccaaccgttacgttcggaacggaacaggatttcttttccgtcattcaggaaagaaacattacgcatctgataatcgagatacggcttgttttcttcatgaatcaccacacgcacttttccggtctctacatccacttcgcaaatatccgactggttccatgtacggttatagcgttggaagtacaaacgttttccgtcttttgacgcatacaatacatcaatatactgatccggccaacgattgatatccaccttcttaacttcccgcttgtctatatctcccaacagtaattcatattgagtcacatttttatcaccggccaattcagctttataagtgatcagttcaggagaaggcttggataaagaattaataacccacaagtcacggactttccggttgtcttcacggacagcgtagaaacggtggcttcccggaatccagtgagccgattcggctccgaaacggccttccatcttgccttcgtcttcacggttgaatgtataatccggcataccgtccgtcgtcaattgaaccgggattgtatcctgtccctttttcgggtttccaacgaaatacaagttatccttactggcataaagaaaatacaagctatccggagaatatttcatccaatacgggtcgccggttttatacgtcggcttctcatcgagttgcttcaattcttttgtatggatattgtatgtataaagtccgcggtcaaaatcaatacgaatggtttcgttgtccttcataaatgtgaaagacaaatgcggatctgccgaagaataggctttcttggtatatactgcaattttgctcaataactcatccgtatcaaacaacaatcgtttctccttcttcttcggattaacataataatatttctttccttcacgtgttgtaaaagagtaataaaagcaatccgtatcgttgataaacgtcggtctgacttctgtagaatacttatctataggattttgctccaacaaacggaacttttccgctaactgataattcgctttttgttgcgcaccggcaaggttgcatgatactaatgcaaccaccaggcacaaatatctaaagagagagtttttcataaaatcttatctattgtcttatttactacggttaatatctccccaatagtctgcacgggtatcacctagcaaatgtttggcaaagaaacggtacattttcttctcaaaatactcatcggcagagccatatccatgaccggctccgggaatgacaagcatatcgaaatccttaccggcctcaatcaaagcctgagccatacggtatgtatgtgcaggattcacgttcttatccatatctccggttacaagcatcaagtgtcctttcagattcttggctatctctgcattcgactttactctaaacttgtattcatattctttggtctcgttacccagactgtctttcaccaccttctctacttctcttacaccattgtaacattctccccaaccacggttatagatactattatcatggtttccggaacaagaaacggcagccttataaaagtccggataagtgcagatagcagccgcagccataaatccgccaccggaatgtccgtagataccaactttcttaccgtcaataaacgagtggcgctgagccaactgctcaatagcatacttatcatcttccaacggataatcacgcatattgccgtaaccgtaacggtgatatgcctttccacgcatcggagtatctcccctatggcctacagtgattacaataaagccaagctgcgccatacgggtacaatagctatcatccaacgtaaagttagtaggaacgaacccgaagtatggtcccggataaacaaccgaaataatcggatatttcttttccggatcaaaattagacggcttccacatcactccatacaaatccgtaacattatcggcagctttcaccacaaaattttccggcttcttccaaccggcggcatatacctgacttaaatcaggctttgccaactccataatcaccttgccggtattgtccttcaataatatcttcggttccatatcgactcttgagaatgtatcaataaagtagcgcctagacttcaaaaagattacccggtgctgcccgtcttctttagtgagtagagttgctccctcacgatccatattggacttatacaaacgatagtaaaacggattgatcttcgggtcatctccatatccataaaaataaaccgtacgttgcagcgtatcaatagcggcaatatgtccgcttacccacggtcctgaagatatcgcatttttcaggttcccttgaccgtcgtaatgataatagtgtccccaccctgtacgttcggaacgaaatagaatatcttttccatcattcagaacttccacgctacgcgcatgcggatcacgataaggcttatccacctcatgaatcagttctttgacctccaaggtagaggtattgaccgaacacacgtctacctcatcccatgtacgtttggtacgttcaaaaaagacatacttgctatccgacgttacactaaaaggcatcacatactggtcattccacttttgtatcttcgcttttctcgcagtccgttctacaatatcaatgattacaagttcattctgggttacatatttatctcccggaaattcatacttatatttcttcaactccggcttgtccgaaatcgaattaatcacccaaaagtcacgcaatttccgattatcatcaagcacaatatatgcatgccggctatcaggacaccaacgagcattagaaggaacttcaccattctcccccgcatcatcctcacgagcatacgaaaaatcagggactccgtccgtagtcaattgcacttccgtagtatctactcccaatgccttgttgcccttcacatacaagttatggtctttcgcatacagtatgtacttcttatccggagaaaaattcatccatgaatatatcggctcggcatctctgtcatctgcctttttctcctccacctctttcaatttgcgggtaattcgattgtaatcatactttttcgacctgtaactgaatacaaatgacttttgatcttttgcgaactttaattctgacaaatccaaccttaccggattcacaacctcatgagttaaaccggaaagcagcatagccatttcctcgttatcgaagagtaactccttctttccctccttggggttgacataatagtagtgtttacctgccgaagtcgtaaaatcaaaccaaaaattatccgtatcattgatttcatgcggataaagggacatactattattagacagttttccccctaatgtaaatttatggaacttctccgccaactcataattggcttgtaccgtatcatgctcggcaggaacttgtccccatccttgcaatgcaagagtaaaagacaagctgccggcaataaaaagttgttttaataccataatggttatttattatcaaaaaaacgcttttaaagctcttctagaacgcaaatgacatataatcatcaccacttcccagtttataaaggacatctacaattttatcaaacttcttgttttcttccgaagtggtttcattcggaaattgttgtttaagagagaccgacgtacacgtcccattctccgatttttcttcaacaacactatatataaagaaacttccgtcttccagagcaactcctaactgcccatcgtaaggatacttttgtttatataagttagtagttacatccatacccgacaatgtcttaacagccgcaggtaacggttcccccaacggcattaattcacctctatattccacatctccataagcatcccaaccgtattgataataataaagctgatttccgtcggcaatcaccacataacgtctgtttccaaagttagccataccacgataatcattgataacgcccaaagaagcctcataataccagccctccatacagctaacagatctactataagcctccagcccgaagtaacgtaattcatacgctgaagtagcctcatctttcaacaaaaccgtccaaaatggatcagctaccgtaaaatcatttctatcatcgtacggagcaggtaatgcatctaccaccgtcttctctatatttgaaaaatgatcttcatcactcggatcagtgatattatacacattaccacttgaagaactagacatctcagtaatagctgaactctcacctacattacccatatccaggatgcctaccaatgaattatcctctttcgtcaatgcaaggatcatattcgtattatagctattgaatttataagcttggaacaaacgactgaatcgggtttggttatttaatcctatggacaaataggtgcccgcatgaaaatccgccgcatccgctttctgttcccaataaatcaatccgttcttatccaataatgctttacacgaataagtcatagctgcttctaccggagagaaatcagcaggaatatccccacgaaattcctcatctgtgtacacttcgcgttccaatgtattaccattaagttccacccagtgatcttgcttcaccaccagttcgtcatatgtgctgattccatacatatgattataatctatataaccaatattattcatcaatcctttaggatttgaacccaaattggggacaacgttacgcttcactatatgataaaccaacgaatcgcgagtaaaggtttctccattatacgttacctgataatgttgcgttgtaggtacgataaaatgaagtacggaacgtccgttttcatctgacaaaattgtccatccacgttgatacatagacatcacattaataattgtggactttccgaactgaacccccgacttattgtctctcactgcaaatgtcacttgatactgaccactcttgtcggccttaaatgtataagtggcactagtttcatttgcctgtaactgcttgtttatataccattcatagctgacatcaggcgttatactatcaatcgtaaatttgaatgtaggcgccaataccaattcatctccctctatcaagttatattcagaattgatattctcaaaattgaaatcaccaccttgtagccaatttatctgcttgtagttataattgttgtcgtcatccaaacaacctgacacgactccggcaaaaatagccatcactacatatattcctaattttctcatactttgcaattttataattatcctgccacttccacagtaatcacatttccatgctcatctttcacccaatcttccttatttttcccttcgttcatctgcttcagggtattcttcagtctcaacgaatatttacgcaatacttgcttattctttccgtcgaacaccatatcatcttttttcaactcgtccaaaaacatctgatacttcttttccgagtattcacccaaataaaaccaatcgaccgaatttcccgggttttcttccgtcccagcatcgttcaccaaccaccagtcgggcttaaacaaacgatcggtgacagaaatgagagcacgcgaatacaaataatcaccctgtttcacagcatttgcttctacgacctgcaatgccaataccttcgtttctgtcttcaatatcggatcattcttcagtgtcacataaatagtatccgtaagcaatccctttcttatcttacaatctgcaggcaatacatacaaattagccggcaaggtagtacgttcagcatctgcacttacattaaaatgtaaatcttcattctgcatctgcccgtaaacagaaacctctatcggtatctcagcatcctcaccttcattatacattttaaaagatacggtagtggtatcttttgtcatatcgttagcaaatctcaaataggctgtatcgttactgctgaccaacaatcccttctcctcacatgaagtgagtatcaaacctgcggtgccagccaacactccccatatagtatattttatcttcattttcgtttctattaaatagttgttctgaaaatattcctttacttttaaatatttgattccgaatcaggtttcggcaacaccatattttcatcagtcggcaaaacatcgctatcataaaaagagctggcgggcatcaaccgattcaagcgtttatacatataaaatatctgcccttcacccaaaaactcacgacgggcatcgtttaccaacaaatttataaactccgatttgtttgtcacattatcgaacttctttgatattcctctccccttcttcactaattccaaataaccttgcgcttctttgggattagtatcaaaaatcgcctcagcagcaatataatatacctcagacatacgtatcatagggagcgtcctgttacttatttttccttcatccttattttctgtctgcttgtaatatttcaacgtacgataataatatccataatatttctcttccaattgataattaaaccgccagtcactgtctatttcatccccatacaaatctttcgcaacatcactatcaaggcacaaataagattcttgactgtcaccatcggtagcatgatttatttcctgatcccattccactaattccttgggggaataaagcccaaaaataatatcattatacatcttcatatttccattcctgaaaccggttgaattggttgatgctttaaaataaccagttttactttcttcatcaatgattttcttggcttccgcataagcttccgcattttttcccgcatacaaataaacacgagccagttctgccgttaccgcataataattcagacgatagcctctactcccagcaaacagtttttctgaaactgctgcaatatgaaatctatagtttgcacgcatatcagaatcttcatctacatctttcagaattcgttgtgcttccttcaaatcagtaataatctgctccaaacaatagctaaccgtttgatgatcattaagatagctaggataagtattgacataaggaataaaagtacgtttatcctctttgaaaccaacagaagaaggagacggagcataaatacgaagtaaatcaaattgtataaatgcacgcaatccaatagcttctcccaaaatcatctgacgttcaccgtcaagcccgtaaaagatgctgggatcggctttggctgcttgctgagctaattcattacaattggcaaccacattccaagcagcattccacatagcatcagtaacaggaactaattcggtatttttaaactcaagacttgctatctttctcattgctgttccaccacctatgctcggaaattgatctatataatacgactgagcccaggcatctaaaatcccccaagtaagattactgccatacaaatcgaaagtagccattttccggtaaataccattcgtcgctgtacggaaaccatcaccggaagagaacaaatattcctcctttatctcgtcggaaggataaagatcgagccaatctgagcacgaagaaagtgtcaaggctgcaaatgcaaaagaaataaacgtagtatatattttttgtatcataatggtatacttagaattgtgctttaatagagaaatcgaccgtccatgacttcggatagcttaagcctcgctcctgacggatagaattccagttaataaaatcgcgtgtacttgcttccaatcggagcatattcatccccaaatatttctttatccactcccgattaaaatcatagctcaaagtcaatgcactcaagcgcagataagccttgtcctgaacgaagcgtgaagtcggcatggtgacattatcagcgtttttaatatctttaaactgagcaatatctcccggttgtttccatctgtcggtcaacacacgcaagtctacattttgatattgtattctggcgttttctacccgatccaccaaagtctggttatactcctgtccgccccattcgtattggaaagccgcaaacaagctccatgctttataggcaagattaaacccaacagaaccgttgaatttaggttctgtattaccaacaaccacttcctgagtggcattccaagtatcggacacgctaccatcacgattcaggaatatttccttacccgtagtgggatcaatacccaaagacttcacagcccaaatggaagtaagtgactgtccttcctcatattgagatataggtactgcatattgaggctcatatccattataattcatatcaactattcctttctgatagaaatccttcacacgctgattgtaggcacgttgtgaatctgatattttcacaatcttatttttgttatgcgccatattcccccataaggctaccaaccaatcacgattacggaatacttcgccacgtacctgcaactcgaatccctgattcaacacttctcccatattatctttataactagagaaaccggaagtttgagacaaactgacgtcgttcactaaatcgatggttttatcatgataataatccgcatccactgtcaagcgccgattcaggaactgcatttcaatacctacattaaatttatcagtcttttcccaagtcaagtcgttatttcctaaagctttcagcactgctccaaaaccagttgcataccattcatcgaaaagcgcttcatacatggttgttgcggcgtaagatgggaaactagccttacctgtccgaccatacgatgcgcgtaccttcaatttattgactatctcgtttcctttcaagaactcataattatgaatgttcactcccaaacctccggagaagaacggtgcccaacgttgattggacccaaaatcagatgaaccatcaaaacgtacggagaaatcagccagataaatatcattccatgtatagtttccggtagcccacgtactgaccatgcgtgaagtaccttcggtacgcgacggcttttcatatatctcggccgcataattcggtgaatggaattgtccgttcgggaacccacggtaatgagcgtttgtcgcatctgatactccggaagacgcctcccacgccacagacaaattcaaattatgtttattgaaagaacgtgtataatataaagctgcatttgcattccaatccaagttgtttccattgtctacataaagatcacccaaattatgtccaccctcattaggagaagcggttgttttagaagacagcggatcgacaaaccgctctccactagaatatttacggttcacgctaaattgacctctgacggtccagtaatcagtcagataccaattcagactcaaattattggatacttcatcataagcactccaagtataattaccaagggttgcttcgtatagcgggtttttagcctgccgtttaccactgtcttgcgagaattttaaattttctttcaatgtcccgtcatcattataaggggtatcatacggctgcagaatggtataatcactaaaagaaccataaggcgactcttttgatttggaatgagtaaacgatacagtgttcttcacttgcaaagacttcatacgataatccaaagagaaaccaacgctataacgatcacgtccggaacctttcatcacaccattggccccattgtaagaagcatctaccccccaacgcaaattctgcgtacctccctctacaaagagactgtgcttatggtcgaacgcgtttcgcagaggtagcaccatccaatcggtatccacgccacgttgaacttctgcgaattttctgttgtagtcaacaatctgattttccatattactattctcaaaaagtccggcaagacgttccatttccagtttctgcgaagcgtttgccaaactataatcgcgcaaatcgggcatttccaatgtaccggtgaaattgtaagaaacacgaacttcgcccggtttcggagcaacagtagtaattaccactacaccgttagcggcacgcgaaccgtaaatagccgtagcagcagcatctttaaggatagtcatactctctatacggctaggatccaagtcatataccttttcaatgctaacctcaaatccatccataataaatgtaggaagattcggattattctccagattcgatttagacagctgattcttgtccaaatctctgacacctacccccgaacgtccgcgaatatacatttcaggcaacgcattaggatcggagccaaactgcgtattagtcatcaagcggaaagaaggatcaaacgactgcatggcgtcaagtacattcgtctgtgacaccttgcgcaattcatcacctgttatttgcgtagaactacccgtaaagctggatttacgaacattactgtatcccgtaacgactacatcctccaatgttttcacatcgtccaccatagttatttcaagcatcttcttacgggtagcatccacctgaagtgtttgttttttcattccgataaaagagacctccaaagtcactttgtcatttttcacatccagcgtaaactcaccttcaatgtttgttgaagtacctgtacgagtacctttcacaataatactggctccgggaatcggttctctattcgaatcaacaaccataccgcggatacggttttcccgtttttccgcctgcattttgcgaatcaccacaatgccgtccttcaccacataatcaaatccctgaggattaagaatcaacttaagtgcgatctcccatttctcatttttcgcatcaatcgacaccggaggcactcctttaaacatttgtgaattatacaacatattcacacctgtttgtttcttcactgcatccaaaacagtctcgatagagacattgtgcagtttcaaagttaccgttttgtcttgtgacggtaaagcccatgcactaaacgtgcagcacattgccactagaaaacatagcagccatcgtttttctctcataaattaatgattaaacttttgtgtacctaatattctaactattctatattattccaattcttctaccttatcatatatcaatatgttccttccactgattttataagtcagatctcctgtcagttccagtgcatccaggaatgaatttattgttccatagcgtttcaaactaccactataagtaatgtcacgcaaatggggagtctcataataaacctgtatgtcgtaccaacgttcgaatgtctgcattatctctcctaaagggcggttattaaagacatacctcccgtctacccaaccgacatattcatccagatctaccatacgtttttccgaaccgttggcagaaaccacagcctgctcccccggcgaaagaataatagttccgatgcttgatgaagagaactgtacttttccgtgtaccaacgttgtgtaaacagacgcatcggtataagcattgatattgaaggcagtaccaagcacagttacctctccaagatgagtctgcacgatgaacggccgtgtttcgtcttttacgacatcaaaataggcctcgccttccaatgccacaactctccgcttacctgcaaaacgtaccggataagttaacttggagccggcattcaaatgaacagtagttccatccgccaggattacggtattttcacccccacgcggtataaccaactcattggatttaaccggtttttcttcggtactttcttcctcatgttgtgttgtaacggttggttgataagacagtactcctttcttatattttacttgaacgccatctactaccacattcacttcttttttatccacatcaataatgctaccgtcaggtaacgttaactgcgcctgttgtgtacccggctgaataagaactctcttctcctctactgccgaatagaaattcgacatatagaatgaaaggccgacagccagaactatgacagccacagcagcataccaccaaacccgggaaatagaaggcttacgttccttcttctccattcgtccgattttctgaaggaaagattgataagctttctttgatgaataatctttatattctccaaacgcagccttcaatgtttcaccattctgcaactgctcatacactttctttaagtccgggcattccgccaatcgtttttcaagctctttccgttctgcttcattcgcttctcccaaaagaaactttctcattaaagcagcatcttgatatatattttcgaacttattcatcttattatctattttttaattaaattgcaatttcatccttgctttattataactatacataactcatagaaaagggtgacaaaaagatgatctttttttggagaaggaatatccaacgagggattttaaagagaaagatatagcattatgctatcaaaatgaagaaatacggtcacatttaacaaagaaaacaaatcttaatcaatcaataaaaagacaaagaagtatcaaattgactttatttctttttagaaaaataaacagagaattatagaatgaatagagtctcccagcttttcacgaagaaatttatagctacggctcttttgagttttaacggtattgatacttatttccagacgttccgctatttcttcccaagtatacccttcgattctcaacagaatgatccggcgttgctcaggcggaagttcttcaatatggaaatacaactgacggatgatctcttctttcactgtcaatgcataaatcatatcctcgtcttgccgacattcttcagcaagggaacttagaatactgtcatgaatctgattattgcgtatatataataaggtattattataacaggcacgataaagataattggtaagctctttaatatcagagaaggtacgcttaccctcccatacggaaataaagacttcctgtaccaaatcttcaactgcatcgggaattggcaatatcttggaaacataaacacatagagcagcataaaaacgatcgtagaaatcgccccacgtcttttcatccttccggttaactcctgctactatggtgtcaattctatcactcatattgtcactctactcatcaaaaaagaatacagaattcgtagaaatcgctataaccacttactatatcgatatttacgaatgcaaatatattgtttttttcaaaaacacagactttaagtagcctacaaaatagaaaataaaaacgttctttctctatataaaaaacacaatatcatctatcacctatcaccggcatcaagcaaaccgtttattcatcgtactttccgacggtgataggttgtttcttaacctatcacccaacctatcacctatcaccagccattttcaaacaaattagtatataaaaccagccggtatccacctactaaaaaatatatcccttagacagggccaacagattataccttggcagcaggtgtttcacgccgagaaacaaatagtttcaagtaatggaaaccaaagtttcaaggcttagaaactctagtttcgcaccgttggaactaaagtttcaagccggagaaactactgtttcccttgcagaaacttaaatgctccaataggaacaactccatgcttatagcatacagcgatataggggtacaaaaaaagagcgaattattccgctccaccattaaagaatccccataaatgggattcttctttttcatcattcatttactcgtttcctgaaaactactttttactaatacctagtcaaaacaacctttttcctaaaaactaatcttaaaatccaataccttaattttataaactaatatcctttaatattaccttgttctaatacctaaaatcttagtagtttcacaactacgctgcaaaggtatagctgttttagaaaacaacaatagttagtatgctaaaaaacatattttcccctatttttttgatttatatcaagaaaacaaggaacgattaggtgtaataaggacattcattattcaaatgcatggaatcacggacagatcttctcttttcacttctatttcatcagaggaaccgcccatttttctacttacaaaaagacagcaaataaaagattaaatatgcaaaattctagcattccgttcccaaaagcaagtacaaagcaataaataagagataagattgtagacattctgtatatttaaactccaaaattacggcgatttttcgaaccattccggacactccccccgaattttcggaagcaaaaacaactgaaagatacaagtctcgcaacttttccgtaactttgcagcgtttgataataaataagataggaatggattttaagtacgacgttatcgtaatcggtgccggacatgcaggctgtgaagcagcagccgcagcagcaaatttaggttccaagacttgtctcatcacaatggacatgaacaagattggacagatgagttgcaacccggccgtaggaggaatcgccaaaggacaaatagtacgtgagatagatgcactgggtggacaaatgggattggtgacagatgaaacagctattcagttccgaatcttaaaccgttcaaaaggccccgctatgtggagtcctcgtgcccaatgcgaccgcgccaagtttatctggtcatggcgcgagagactggaaaacacccccaaccttcatatttggcaagataccgtatgcgaacttctcgttgaaaacggagaggtgacaggactcgtcaccgtctggggagttactttcaaagcaaagtgcatcgtactgactgcgggaactttcctcaacggactgatgcacgtaggccgccaccaactgccgggtggaagaatggccgaaccggcttcctatcaactgaccgaatctatcgcccgccatgggattacttacggaagaatgaagaccggaactccggtacgtatcgacgcacgcagcgtgcacttcgaccaaatggaaacgcaagacggagaatgtgacttccacaagttctctttcatgaatacaagtacacgtcatttgaaacaactccaatgctggacatgctatacaaatgaagaagtacatcggattttacgtgatggattgccggactctccccttttcaacggacaaattcaaagtatcggcccgcgctattgccccagcatagagaccaaaattgtgactttccccgacaaagaccagcatcagcttttcctcgaaccggaaggagaaacgacccaggaattatacctcaacggattctcttcttcgcttccaatggatatacagattgctgccttgaaaaagattcccgctttcaaagacttggttatttatcgtccgggatatgcaattgaatatgactacttcgatccgacacaattaaaacatacgctggaatcgaaagttattaaaaacttgttctttgccggacaagtaaacggaaccaccggctacgaagaggccggaggacaaggagcaatagccggaatcaatgcacacattaattgccatggtggagaagaatttacgttggcacgcgatgaagcatatatcggcgtattaatcgacgatttagttaccaagggagttgacgaaccttaccggatgtttacttcacgcgcagaatacaggattctgctccgtatggacgatgcagacatgagacttaccgaacgggcatacaaactcggattagccaaggaagaccgttatcggttgatgaaaagcaagaaggaagctgtggaacagattatttccttcgcacgaaactattcgatgaaaccggcactaattaatgatgcgctcgaaaagataggaacaactcccctacgtcaaggttgcaaattaattgaaatattgaaccgtccgcaggtgacgatagagaacatagccgaacacgttccggcatttcaacgggaactggaaaaagcaacaagtgccaaccaagaccgtaaagaagaaattttggaagctgccgaaatcttaatcaaatatcaaggttatattgacagagagcgaatgatagcagaaaagctggcacgcctggaaagtataaagataaaaggtaagtttgactattcttctatccagtccctatccaccgaagctcgccaaaagctgactaaaatagatccggaaaccattgcccaagcgagccggattccgggagtatcgccaagcgacatcaacgtgttgctggtactttcgggccggtaagcggcaacgtttcacgtgaaacaaagcatttaaagaaacgagataaatcaatgattatgagcaaagaaacgctaattaaaagtatccgggaaattcccgactttccgattccgggaatcctgttttacgatgtaaccacattgttcaaagatccgtggtgcttgcaagaattatcggacgttatgtacgagatgtataaggataaaggtatcaccaaagttgtaggtatagaatcaagaggattcatcatgggaccgattctggctacccgactcaatgctggcttcatccctatccgtaaacccggaaaacttcccgcagaaactattgaagaaagctatgacaaagaatacgggaaagacacagtgcagattcacaaagatgcattggatgaaaacgatgtagtgctgctgcatgacgacttactagcaacgggcggaacaatgaaagcagcctgtgaactggtgaagaaattgaaaccgaagaaagtatatatcaactttatcatcgaactgaaagacctcaacggaaaatcagtattcggagatgatgtagaagtagaatccgtattgactttataaaggatttgtttatatttgcagggcgtagtgatactacgccctttttcattttagctatttcatccctaaagattatgaatacagaagcggaaaacaaaaccaataaatacttgaaaggaatcgtggcaaaccttcctgaaaagccgggaatctaccagtacctgaatgcggaaggaacgattatatacgttggaaaggctaaaaacctgaagaaaagggtatactcttatttcagcaaagaacacgagccgggaaagacacgggtattggtaagcaagatagctgatatacggtatatcgtggtgaacacagaggaagatgcactgctattggaaaataatctgatcaagaaatataagccgcgttataacgtcttattaaaggatgacaagacttacccttcgatctgtgtacagaacgaatattttcccaggatattcagaacccggaagattatcagaaacggctcatcttattatggtccgtacagccatatcccctcgatgtatgcagtgctggacttgataaagcatttatatccgttacgtacctgttctttaaacctcactccggagaacatacgggccgggaagttcaatgtatgcctcgaatatcatataaagaactgtgcaggaccctgcatcgggcttcagtcacaagaagaatatctaaaaaacatcgatgaaatcaaagagattctaaaagggaatacgcaggaaattagccgtatgctattggagaagatgcagactttggccggtgaaatgaagtttgaggaagcacagaagattaaagagaaatatcttttgatagagaactaccgttccaaatcagaagtggtaagcgccgtactacataatatagatgtcttttcgatcgaggaggatgacagcaattccgcatttatcaattatctgcatatcacaaacggagcaatcaaccaggcatttactttcgaatataaaaagaagttgaatgaatccaaggaggaattgctgacgctcggcattatcgaaatgagggaacgttataaaagccggtcacgagagattatcgtccccttcgaacttgacctggaattaaataatgtcgttttcaccgttccccaacggggtgataagaagaaattgctggatctttctatcctgaacgtgaagcaatacaaggccgaccgcatgaaacaggcggagaaactgaatcctgaacagagaagtatgcgcctgatgaaagaaatacagcaagaactgcatttggagagaccgcccttgcagattgaatgttttgataactcgaacatacagggatcggacgcagtggcagcttgcgtggtattcaaaaaggccaaaccttcgaaaaaagattaccggaaatacaatataaagacagtagtggggcctgatgattatgcttcgatgaaagaagtcgtaaaaaggcgttatcagcgcgcaatagaagaaagttcgccgttgcccgacctgatcattaccgacggtgggaaagggcaaatggaggtcgtcagagaggtcattgaggacgaactagggttgaatatccctattgccggattggctaaagacaatcgccaccgcacgtctgaattgctattcgggtttcctccgcaaactatcgggatcaaacaacacactcccctgttccggttgctgacacaaatacaggatgaagtacaccgctttgcgattagttttcatcgcgacaaacgtagcaaaagacaggttgcatctgcattggatagcatcaaaggcatcggggaaaagactaaaacagctcttttgaaagaatttaagagtgtaaagcggataaaagaggcgtcgctagaggacatcagcgctattattggggaagcgaaggccaagacggtgaaggaaggattgaataatgaataacagaggctaaaattagaaggtttcaagaggcagtaacacgttcttcttcgataatattttcctcccaatacatcgttttctctttcgaaattcgtaaatttgcctttcataatcacgaaatagaataaatagcaatgcgaatagttatacaacgggtaagccatgcatcagtgaccattgagggacactgcaaatcagctatcggaaaaggaatgctgatattagtcggcattgaggaagccgatgggcaggaagacattgactggctctgcaagaagatagtaaatctgcgcattttcgacgatgagaatggcgtaatgaacaaatccatactggaagacggaggagaaattctggttatcagccagttcactttacatgcttccaccaaaaaagggaaccgtccttcttatatcaaagctgcaaagccggaaatatcggtcccactctatgagaagttctgcaaagatttgactgccgcattgggcaaagaaatcggtacgggtaccttcggtgcagacatgaaagttgaacttttgaacgacggacctgttactatatgcatggatacgaaaaacaaagaataacgtaaacaacttataataaaagaactatgaccctggaagaagctcaaaaacaggtagaccaatgggtaaagacatacggcgtccgctatttcagcgaattgaccaatatggcagtactgacggaagaagtcggagaactggcccgcgtcatggcccgcaaatacggtgaccaatccttcaaagaaggtgagaaagacaatatcgaagaagaaatagcagacgttctgtgggtgctcctatgcatcgccaaccagacaggcgtagacgtcactgccgcccttcaaaagagtatggaaaagaaaacgaaacgagatagcaaaagacatatcaataacccaaaactgaacgatcatggaggagaataattcactgtccaacaagtacgatgccgctctggcgaagtataatacacatctgagcgatgcagatattcaggctcgcgtagctgacctgattgaaaagaaagtgccggagaacaacacggaagaagtcaagaaattcctgttcacgtgcattgacctgactacactgaacagtacggatagcgatgaaagcgttatgcgatttactgaaaaagtaaaccagttcgatgatgaatttcctgacttgaaaaatgtagctgcgatctgcgtgtatcccaactttgcagctatcgtcaagaatacgctggaggtagacggagtgaatatcgcctgtgtatcaggaggattcccttcttctcaaacatttaccgaagtaaaagtagcggaaactgcactggccattgcagacggcgcagacgaaatagatattgtaatctccataggcaagttcctgagtggcgactacgaagcaatgtgtgaggaaatacaggagttgaaggaagtctgtaaggaacgccacctcaaggtaatcctcgaaacgggtgcactaaagagcgcttccaacatcaaaaaagcctctatcctatccatgtattcaggtgcggatttcatcaaaacatcgaccggaaaacagcagcctgcagctactccggaagctgcttatgtgatgtgtgaagctatcaaggaatactatcagaagacaggaaacaagattggcttcaaaccggcaggaggaatcaatacagtcaatgacgcaattatttattacactattgtgaaagaagtattgggtgaagaatggctggacaaccggttattccgcttgggaacaagccgcctggcaaatctcctactctctgatatcaagggagaagaaataaaattcttctaggaaaggctacataagcaatcaaatatgccttaccgcacggctctccgcaaaacgagaaccgatgcggtattttttatttaagaaaaactaaagatagttatcaagcaatccgcaaaaatcattatctttgtctcagatttggctgtggatatctagctaaataattgaaccagagaacgtttcatttattaccaaattcctggaattcggcaaaattcaaagttatgaatggtaataagcaaacgggtctcacgcactttcatgtatatactgttgttatatagcgaacggagcgtgggactgttgcttgtgtataattcataacggcttgccgaagcctcaggaaaatatatagcaacagtccccacgctttttcagtgaactttaatcataagagtataaaaatggaagcacacattcaagccttaagaataaaccgcaatccgctaaatctagtcctcgggacgaaaagaaagctagggttgcgcattggctatatggaagctgcgttaaaaggtttttatctcaactcaatagaaacaggagttcacccgcaaaagttaacccgactgctgtctgaagaatttcactgcgttgacaccgaatcaaccaacggactattacaattcctgactaatgaaggagacagggttccctatcagatcatgctcccctacctgctctcgtcagacaatatcaacgaatttgaaacaatcatacataaacgctttttcggagtggaacgtttcgtccggcagggaaacaatttatacagattcgtaaaatatacagaggaaagaagagacccgattatatggataaatgacttggaaagaggaattgacgcatgggatatggggatgttggtcaacctggcacgtgcggcttatgaaatcggatatatcaccaaaggacaagcatgggaacatattgagcaggcaggaatactatgctccgaaatactccgttcgccggaagaaatagacaagagtttcctcctcgggcgagcaatgcaatcagagaaaatagaagattgggaccgtttattatcgtgctatttacttttgaacaaacatcgataaccgctatttttcgcgatctacaacgtaatccagataagaccggagagccacgcagatagcagaatccggcagagaggccaacagcccaaaggctttttgcttatatgcgttcatcgtccggacagcatattcaataccaccgttttccttggtaaatgcgatcagacgagctatttcatcgagagtagccgtaccctctttcactttgagagcaatttcagtagcctgattgtcattcgctctattaagtgcatacaagacagggagtgtcagtttgccttcaagcatatcgttccctgtcggcttaccgatttccttgctgtcgaaatagtcgaaaatatcatccttaatctgaaaacagataccgatatattcacccaacaagcgggctaatttcacttcttcctcactcactcctaccgagtaagccgccgccgccgtacaggcagcgaatagggccgcagttttcttacgaatcacatcgaaataaactgtctccgaaaagctatgattacttacatttgagagctggagcaactcgccgtcggcaagatcctgccccaatgaagataccagccggataatctgatgactgttcgtcagctcggcatgcaccaggcttgttgccagaagataatcccccgtcagtacggctaccttattattaaagatagcattcaccgagagttgcccacggcgttcggtactttcgtccactacgtcgtcatgcaccaaactggcattatgaagaagttccagagataccgccgcatgaagagtggcaggagacacgacgccataaaggcgtgctaccaacaagacgagaataggacgcatcatctttccactgcgctggcgtatatgagctactacgctatcaagcagtgtattcgaactggaaagagaactatcataaagttctttgaaagcctcaagttcgctttcaatcggtgttctgataatagagatgctgtccattcatgcacaatttgagcacaaaagtaataataaaacgcttaatacggtatttttttgtacttttaccatgaaaaattaataaaatctatggagtcagacaataaattatttcttttagacgcttatgcactgatataccgggcttattatgcctttattaagaatccccgaatcaactcaaaaggattcaacacttcagctattctagggtttgtcaataccctcgaagaagtattgaagaaggagaatcccactcatataggagtggctttcgacccggccggccctaccttccgccacgaggctttcgaacaatataaagcacagcgtgaagaaactccggaagcaattcgtctttccgtacctattataaaagaaatcatccgtgcctaccgtatccctattctggaagtggcaggctacgaggctgacgacgtgataggaacactcgctaccgaagccggacgccaagggattattacttatatgatgaccccggacaaagattacggacaattagtaagcgacaaggtattcatgtaccgccccaaacatacgggaggttttgaagtaatgggtgtcgatgaggtgaaagccaaattcgatattcagtcaccggcacaagtcatcgatatgctcggcctaatgggagattcttcggacaatatccccggctgccccggagtaggagaaaagacagctcaaaaactgatagccgaattcggaagcattgagaatcttctggaacataccgaccaactcaagggagcactgaaaacaaaagtggaaacgaaccgggaaatgattactttctcaaaattcctcgcgactatcaaaatcgacgtgcctatccaactcgatatggattcgctcgttcgtgagcaggcagacgaagattcgctccgacagattttcgaggaactggaattccggacactgatcgatcgcgttctgaaaaaagagaatgccggaaacggaataacaactccaaccggaaacaaaacggcagcagaaaaaagtaacctcgcccctctcccactttttcccgaggaaggcgaagccgtgcaaggcgatttatttgcgaattttacgggcaacgagccgggcgaagctaaaaattcaaatctagcgacgttagaaacgctcaattgtgactaccaacttattgatacagaagagaaaagaacaaaaattattcaaaagttacttacatcaaaaattctttcgctagatacggaaactaccggaaccgaaccaatggacgccgaattggtcggaatgagtttttccattgccgaaaatgaagctttttatgtcccggtccccgccgatcaggaagaagcgttaaaaatcgtcaatgagttccgcccggtatttgaaaatgaaaactcattgaaggtcggacagaatatcaagtatgatatgatcgttcttcaaaattatggagtgcaagtaaaaggcccgttgttcgatacaatgatcgcccattatgttcttcaacctgaactccgtcacggaatggattatcttgccgaaatctatctacgttatcagacaatccatattgatgaactgattggtccgaaagggaagaaccagaaaaatatgcgcgacctcgccccgaaagacgtttatcgttacgcctgcgaagatgcggacgtaaccctgaaactgaaaaacgttctggaaaaggaattaaaagagaatgacgccgagcggctgttctatgatatagaaatgccgcttgttccggtactggttaatatcgaacgcaacggtgtgctgctggatacggaagcgctgaaacaatcttccgcccactttacggcacaaatggagaatatcgaaaaggaaatttacgagctggcaggtgaaacgttcaatattgcttcaccgaagcaagtcggtgaggtgctgtttgataaattaagaattgtagagaaggcaaaaaagactaaaaccgggcaatacgtcacttcggaagaggtgctcgaaagccttcgccacaaacatcctgtggtagaaaagatattagaacaccggggactgaaaaagttattgggaacatacatcgatgcactcccccaactcatcaatccgcgtacaggacgggtacatacttctttcaaccaaaccgttaccgccacgggacgtcttagttcaagcaatccgaacctacaaaatatcccgatccgcgacgagaacggaaaagaaatccgcaaagcattcatccccgatgaaggctgccttttcttctctgcggactactcacagattgaattgcgcatcatggcgcatctgagcgaggataagaacatgatcgacgctttcctcagcaaccatgacatccacgctgccaccgccgcaaagatttataagattgacttgcaagatgtaggctccgatatgcgtcgcaaagccaaaactgccaatttcggcattatctatggtatatccgtattcggcctcgccgaacggatgaacgtagaacggaaagaagccaaagaacttatcgacggctatttcgaaacctatccgggagtgaaggcttatatggataaaagtatccgggttgcacaagaaaaaggctatgtggagactattttccaccggaaacgcttcttgccggacatcaactcacgaaacgccgttgtacgcggatatgcggaacggaatgccattaacgcacctatccagggaagtgcggcagatattatcaaggtggctatggcacgtatctatcaacgtttccaaacggaaggaatacaagccaaaatgatcctgcaagtacatgacgaattgaacttcagtgttcccgttgaagaaaaagaacgtgtagaagaaattgttatcgaagaaatggaacacgcataccgtatgcatgtacctctgaaagctgattgcgggtggggcaagaactggctcgaagctcactaacattatttaactcgctatccgaaagctagaaaaaagatttctttttaaacgaagtgattcgttctatatccggcagattgactgccggatatttttttgtcactaatcttggcaaaaagcaaactactgccagcacccacacttgacaatttgataatatttcactcccaaaaatgcataaatatcaaattaatatgtaagtttgcagcgtaaaactgatacatcagtagacaaatgaaagtataacttaaaactaaaatagccatgaaagcaaaagtatccttaaaaatgttcgttttatccgctgctcttcttattgcatctttcaccgcttccgcacgtaacaacgacggtcagttgatttacaatccgatagaagaaaatggcatgacagtaggccagaccgtttacaaaatggacggaaatacacttgccaactatatgaagtacaattataagtacgacgacaataaacgcatgaccgaaagcgaagccctcaaatgggacagcaacaaggacgaatgggtaaagaatttgcgtatcaactatatttatgaaggcaagaccgtcactaccaattactataaatggaacgctaaaaagcgtgcttatgtactggtacccgagatgactgtaacaatggataatacaaatatgtaacaaaaactctctctcattctaatattctaacaaaagagaacgccgctcctgatgaagaagaggcgttttcactttatataaccgtaggctgtatcacaagacataaaaccgttcctgcaattctttcagatagcttctggaaatgaccagatcacctttatcgtggaaaggcggataaagttggcaacactttccatcgatcatagccagataatttacattcacaatggccgactggctgatttgcacgaaagcctgcgaataactgacgatatcctccgctttcgtgttccgtttcaggttcaaccgggtttgattaaacagaaccacctgccattgacgtttatctttcaaatattcaaaaaatccgatttcttccagccgtaagagcttgaatcctgtcaccgtgctaatcataaacattccctgttgcggcatcagagctataatagaagaagcaaaagagggaggcgccactacagcagaacgcaccgctttccgataacggtctatgacaactttcaagtcttccgcgctaaaaggtttcaacaagaaatcaaaagccgactcacgcaaagcctgaagcagatatttatcataggacgtatagaacacaaccttcatatcccacaatacatcatcctttatctcacttagcaaattaagccccaatatatccggaagctccacatcaagaaagagtaaatccggatgtaactccataatcatctttttcccttttgcaccactgcttgcaattccctttatctcaaattcacgataaggctccagttcacggcgcaaagcgtcacttgcagaacgttcgtcatcaatgatgaccactttgtacttttcttctgtatccatcataaatcataagaaaaacgaaacgggatatataccgaaactaatgtaccggtctgtccactgtttctattggttatttcaaaacgtattttgtcactcttgtttttcgtattcagcagttgaatggtctgatacaacaccttcagtccggtacccgttccccgtgttgccgaagttacgtgcggaagatacccgcggccgttatcacaaatcgtaatacagataccattcttttcatgagagacatgtatcgtcaactccttttcaccatctttcccaaccagtccatgcttgattgcattctcaaccgggatttgtataatcatcgaaggaatcatcacacgacttgcatccagtccttcttccactgtaaccgttgccgtaaaatcttcgccgacgcgtcctctttcgagattaatatacgaacgtacaaaatccagctcgtcttgtaaggaaacacttagtttttccgtcagttcaagactgcgtcggagatatttaaccagctccaacaggttattcttcacatcttccgaccccgtgaactgattaatctcacgtcccaatacattgaaagtgaaatggggggaaatccggctccgcaggttctccatgcggacacggttgatttgccggaaaaagcgttcacgaagaaattctcttttcttccgcatataccagatgataccgcctgttcctgcaactagcagcacacaaacaagtacccatatataaacgctcaacttcaaagctttcacttcacctgcctgccgttgaatctgcatttctttccgcaatacaatagtgtcctgacgatagcgcatatccagttctgcgacacgtgtctgtacccgttcgctacggatagaatcatccagacgacagtcacgcttcaaatattcataagcacggcggtagtcgccggcacgctcgaagtaatgctggagatattggttgcgtattgtcagcatattggcatcaagatgtcccacaggagcggtacgttctatcattttatgagccagcgccatatttcctttctgtaacgccagttcaatcatttgagtttcgatatagtatacagccgagttatgctgaatttccgaaaagaaacgataactctcgtccaggcatatctgtgctgaatccaagttattggtcaacaagtataattctcccaggtttactttgataaagttctgttcaaacaccatttgggggtgggcggagactaaggcattggctctgcgcatatagttcaatgcttcctgataattcttcctgtaataataatgatttccgcgattgttgagataggtccaacgttctcccacattcatttcgtcaaagaattttcctgccagttcataataatggttagacaaatcgaagtcgcgcaagtccatgtaagtttgtcccaaaccgtaatagacagggaatttcgtatgttcggacaatctcagagaatcgcagagaaacaaggcgcggcggtaataagaggcagtgtgcgccaagtcactgcgatgcaggcaggcgtcagccatattgatacaaatgtcgggaagaaggtgcaggcgctttcctttcagacgatatgcatacgccttttgataatcaagtatggcagaatcgggacggttcaactgcatccaaacgtttccttcaacattataaacatcggccaggacatcgttccagcgaggacactcggaaacattgcgggagaattgcttaacctgtcgattataataaagtatggagtcaaaatcagaagaaacaaagaaggttttaccataaagggcgagcagacgataatacacttgtgagtcttgcacttgcaccagcgcgtcacgtacctgcgaacgggaataaagtacattggagaaaagagaatcctgaacgcggacttcgagagaatcgacaagttcctgctcacaaaaaggcttatggcgatgcctgtcagcacacccgcaatacaacaatatcaaaagcccgaacaagccaaacagcttcatagtagtcctcccattcatcaaccccttattcatgtcatgttttgaatgtgacaaaaatacattatttatcctgaatcccaaccaattttattatttttttaatacctttgtccccatataaatatgagcaactgacctaatgagtccactgaacttcacccacattttgacacaggcagtcgatgagctatcggaaagcgaatcttacaaaggactgtttcatcaacacaaagatggcgaaccactgccctctgctaaagtcttgtatgaaattatcgagctttcacgctctatcttatttcccggatattacggaaattccactatcaacagccggacaatcaattaccacatcggtgtaaatattgagaagttatttgatttgcttaccgagcaaatccttgccggattgtgttttggaaccagtatagaaggaagatgtaatgcctgctccgattccaagagagaagaagcagcccgccttgccgccaagtttatcagcaaattgcctgtcatgcgcagagtgctggctaccgacgtagaagccgcctataacggcgaccctgccgccgaaagttatggcgaagttattttctgctatcccgctatcaaggccatcagtaactaccgcatcgcgcatgagctactggaactgggtgtccccctgattccgcgtatcattacggaaatggcgcacagcgaaacaggtattgatattcatccggccgccaagattggcagtcacttcacgatcgaccacggcacaggtgtggtaatcggcgcaacgagtatcatcggaaacaacgtcaaactctatcagggcgtcactctgggagccaagagtttcccgctggatgcggatggaaagcctatcaaaggcatcccgcgccacccgatactggaagacaatgtaatcgtttattccaacgccactatcctgggaagaatcactatcggacgcgatgcaaccgtaggcggtaatatctgggtgacggagaacgtccccgcaggagcaagaatcgtacaaaccaaagcaaaaaaataaaaccaaataactatatatgagcgaacaattcgagatgattgccaagaccttccagggactggaggagatacttgcagaagagttgacaacactaggagccaacgacattcaaataggccgccgaatggtgtcattcacaggggataagcgtatgatgtataaggctaatttctgcctccgtactgctatccgtattcttaaaccgatcaagaactttacggcaaaggatgctgacgaagtttacaatgaaatacaggcaattccttgggaggaatatctcgacgtaaacaagacatttgcaatagatgcagtagtattcagcgaagaattccgccattcgaagtttgtttcgtacaaggtgaaagatgcaatcgtggattatttccgtgaaaagacaggcaaacgcccgtctgtacgcatcagcaatccggacgtattgttgaatatccatatcgcacaaacgacctgcaccttgtctttggactcgtccggtgaatcacttcaccggcgcggttaccgccaggaagccgtagaagctccgttgaacgaggtattggctgccggtatgattctgatgaccggctggcggggagaatgtgacttgattgatccgatgtgcggttcgggtactattccagtggaagctgcattgatagcaagaaacatcgctccgggcgtattccgtaagggatttgcatttgagaaatgggtggatttcgatgcggatatgttcgacgagctttacaatgacgacagtcaggagcgtgaatttacacataaaatttacggatacgacaacaatccgaaagcgaacgaaatagcaactcataacataaaggcagcgggggtatcgaaagatgtcgtactgaaactgcaaccgttccagcaattcgaacagccgaaagagaagtctgtcatcatcaccaaccctccttatggagagcgtatttccaccaatgatttgctcggactataccaaatgattggcgagcgcctgaaacacgcgtttgtaggaaacgaggcatgggttctctcctaccgggaagagtgtttcgaccagattggtttgaaagccagccaaaaggttcctttgttcaacgggccactggaatgtgaattccgcaaatatgaaatctttgacggaaaatacaaggagttcaagagtcaggaagaagcaggagaagaaaagaaagagacggaaggagaacaagcgtctaagttcagggaaagaaaagaatataaacctcgtcgggaaggagaattcaaaccccgtagagaaagtgagttcaggccgcgccgggaaggtgactccagacctcgcagagaaggagaattcaagccgcgccgggaagaaggagaattcaagcgggaaggaaacagagagagaaaaccgcagggagaattccgtagccgaagagacccgaaagctccgagagagttcaaaggaaatcgggaaccgaggattccgaagaaggaagaggagtaaacaagcgttaatagttaattgcacattcacaagaaattagcaacaaaaagcaatttaatggattattcaatgcttttgccaagttgggtgctgctattcggataaagagcacttctttggacagagtaaaaataaaaggatttaaaaacaaataataaagaaaagagcaatgagtaaagttggaaaaagagccttccttttgttgttggcaatcccaattgtaatcaatgttatggcacaagaaaccaagaaaccgacactggaagacctgattccgggcggtgaaagttatcgttatgcagaaaacctgtacgggctgcaatggtggggcgacgagtgtattaaacccggcatcgacaccatctattctatccagccgcaaacaggcaaagaaacaatgctcatcacccgtgagcaaatcaacaaagcgcttgcagaagacaaggcaggaaagttatcccatttgtattccgtacgtttcccatgggcggaaaagccgcaaatgttactgaacatagccggaaaatacatcgtatatgatttcaagaacaaccggattgtcagcagtcgcaagcctaaagccaaagcggaaaacgaagactactgcaccgctaatggaaatgtagcctatacaatcggcaacaatctatacgtaaacgaacaggcggtgacgaacgagcccgaaggcatcgtctgcggccagtccgtacaccgcaatgagttcggtatcaacaaaggtacattctggagcccgaaaggtaatctgctcgccttctaccgtatggatgaaagtatggtgactcaatacccgcttgtagacattaccgcacgtgtgggcgaagtgaacaatgtccgctatccaatggcaggaatgaccagccaccaagtgaaggtaggtatctacaaccccgcaacgggcaaaagcatttacctggatgcaggcgaccctaccgaccgctactttacgaacatcagttgggcaccggacgagaagagcctctacctgattgaagtaaaccgcgaccagaaccatgccaaactttgccaatacaacgcagaaacaggcaagctgacaaaggtgctctacgaagaaactcacccgaaatacgtagagccgcaaaacccgattatattcttgccgtgggataccagcaaattcatttatcagagccagcgcgatggatacaatcacctctatttgtttgataccaaagcaagcatttacggtgaccttcaggaaggaaccggcggcgcccaatatcgcgaatcagtgaaggtaaaacagttgactaaaggcaactggctggtaaaaaacatattaggcttcaacgctaagcggaaagaagttatcttcaccgccatagagggcttgagaagcggtcatttcgcagtaaacgtgaacaacggaaagatgagccgtccgttcgatagcagtaaagagagtgaacacaacggagtgctcaacgcttccgggacgttccttatcgaccgttattccactaaagaccagccccgcatcatcaatctggtagatacaaagaacttcaaagaaaccgtaaacctgctgactgccaaagacccgtatgaaggttatcaaatgccaagtattgaaaccgggacaatcaaagcggccgacggcacaaccgaccttcactaccgcctgatgaagccggcaaactttgacccgaacaagaaatatccaaccattatttacgtctacggaggtcctcatgcccaatgtgtcaccggaggctggcagaatggcgcacgtggctgggacacgtatatggccaacaaaggctatatcatgtttacgatcgacaatcgtggcagcagtaaccgcggactggagtttgagaacgccaccttccgtcgcctcggcattgaagaaggcaaagaccaggtaaaaggtgtcgaattcctgaaatccctcccttacgtagacggcggacgcatcggcgtgcacggctggagctttggagggcacatgaccactgccttgttgctccgttacccggaaatattcaaagtaggcgtagccggtggccctgtcatcgactggggatattatgaagtgatgtacggcgaacgctatatggacacaccggaaaccaatcctgaaggttacaaggaatgcaacctgaaaaacctcgcgggtcagttgaaaggtcatctgctgattatccatgacgaccatgacgacacttgcgtgcctcaacacaccttgtcgttcatgaaagcttgtgtagacgcccgcacctaccccgacctgttcatctacccgtgccacaagcacaacgtatcaggtcgcgaccgtgtacatctgcacgaaaaaatcacccggtactttgagcagaacctgtaaaaagcggctgcttatccatacctaatcaaacgtataacagtataacttataacagtataaagatgaagattttattactaggctcgggcggccgcgaacatgcactggcatggaaaattgcccaaagtccgaaagttgagaagttgtatattgctccgggaaatgccggaacaactgccgtaggcgaaaatgtcaacatcaaggctactgattttgaagctatcagcgctttcgccctgaaggaagacatcgccatggtcgtagtaggtcccgaagatccgttggtaaaaggaatctacgactacttccagaaccgccccgaacttaaacacatcgctgttatcggtccctccgcacagggagctgaactggaaggaagcaaggaatttgcaaaaggcttcatgatgcgtcacaacatcccgacagcccgttacaaaagtatcacttccgcaactattgaagaaggtttggccttcctcgaaacattggaagctccttatgtactgaaagccgacggcctctgtgccggaaaaggcgtactgattctccccacgctggacgaagccaaaaaggaactgaaagaaatgctcggcggtatgttcggctctgcatcggcaacagttgtcattgaagagttcctgagcggtatcgagtgttccgtatttgtcctgaccgatggtgaaaactataaagtcctccccgtagcaaaagactacaaacgtatcggtgaaggcgacaaaggtctgaatacagggggcatgggtagcgtaacccctgttccgtttgccgacgaagtgttcatggagaaagtacgcacccgcatcatcgagccgacaatcaacggcctgaaagaagagaatatcgtctacaaaggtttcatcttcctcggattaatcaatgtgaaaggtgagccaatggtgatcgaatacaacgtccgtatgggcgacccggaaacagaaagcgtcatgctccgcattcagagcgatctcgtggaactgctggagggcactgccgcaggcaacctgaacgaaaagacactcgttatggacccgcgttcggcaggttgtgtgattctcgtcagcggcggttacccggaagcttatgagaaaggattcccgatcagcggactggaacaggctgccgctacggaaagtatcattttccatgccggaacagctatgaaagacggccaagtagttacaaacggaggacgcgttatcgctgtctgctcctatggagctactaaagaagaagcgttggcacagagctacaaagtagcggacatgattgacttcgacaagaagtacttccgccgcgacatcggcttcgacctataactgccggcgtaatgccgaagcaaggcttccattcgacggcattgtttcaaatgagaggcgatgtttattctagagaagagacgatgtcaacgctagataagaatcaccttggtaaagccacgctagaggcaaatctatctccattctcctccttcgggaaggaggagtacccgtagggggaggtggtaggtgaatacataagtctatta

SEQ ID NO: 2969 - DNA, 35966 bp, Unknown
  gut microbiota DNA sequence
accccgggtacctcgcggtacaacggttttcaagaccgccgcaatcgaccactctgccacctctccaaaacttcttttcagaagtgctttttgttaaaagcggtgcaaaggtacgaagatattttaaacatgcaagagttttcacgaaaaaaacaatcgaaggtttccaaaagatagcaatatccaggtattttatgttgaaaagcataaaatagggcatatttatgccgattatatgaaaaatgattgtaactttgtgcgctctaaagaaaaggataactacaacctctaattttatcatttatggaattaaacaagatctttaaagacggtctttggagcaacgaaatcaacgtcagagatttcgtaagtcataacatcactccgtactacggagacgcttctttccttgaaggacctaccgaacgtacaaaagccgtatggaaccgttgccttgaagcactggcagaagaaagaaaaaacaacggtgtccgctcgcttgataacgctactgtatctaccatttcatcacacaaggccggatatatcgacaaagaaaacgaactaatcgtcggtctgcaaacagacgagcttctgaaacgtgctatcaagcctttcggaggtatcaacgtagtaagcaaggcttgccacgaaaacggcgtggaagtggacgaccgtgtgaaagatatcttcacccactaccgcaagacacacaacgatggagtgttcgacgtatataccgaagaaatccgttcgttccgttctctgggattcctcaccggactgcccgacaactacgctcgcggacgtatcatcggtgactaccgccgtatggctctctacggtatcgaccgactgattgaagctaaaaaagaagatctgcgcaacctcaccggaccgatgactgacgcccgtatccgcttgcgcgaagaggtggcagaacaaatcaaagccttgaaagagatgaaagtaatgggtgaatactatggactcgatttgagccgtcccgcatataccgcccaagaagctgttcaatgggtatacatggcttatcttgctgccgtaaaagagcaagacggtgctgcaatgtcactgggtaacgtttcttcttttcttgacatctacatggaatatgaattgagcaagggaacgatcaccgaatctttcgcacaggaactaattgaccagtttgttatcaaactacgcatggtacgccatctgcgtatgcaatcatacaacgatatctttgccggtgatcctacttgggtaaccgaatctttgggcggacgcttcaacgacggacgtaccaaagtgacaaagacttcttttcgtttcctgcaaaccttgtacaacctcggcccttcaccagaaccaaacttgaccgtactgtggagtcccgaactgccggaaggattcaaagagttctgtgctaaagtatctatcgacacttcttctattcagtacgaaaatgacgacctgatgcgtgaagtacgtcaatctgacgactacggaatcgcctgctgtgtatcttaccaagagataggcaagcaaatccagttcttcggtgcacgctgtaatctggcaaaagctctgttgcttgctatcaacggtggacgttgcgaaaacacaggtacagtcatggtgaagaatattcccgtactgaccagcgacacactgaaatttgaagaagtaatggacaactacaagaaggttctgatcgaaattgcccgcgtttataacgaagcgatgaacatcatccactatatgcacgataagtattactacgaaaaggctcaaatggcactcgtagatactaacccgcgcattaaccttgcctacggcgtagccggactttctattgcgctcgattcattgtcagctatcaaatacgcaaaggttaccgcccgccgcaacgatataggtctgacagaaggtttcgacattgaaggcgaattcccttgtttcggaaacgataacgacaaggtagaccaccttggcgttgacctcgtatatttcttcagcgaagaattgaagaaactcccggtttacaagaatgcccgtcctaccctctccctgctgaccatcacttccaacgtgatgtacggaaagaagacaggtgctactccggacggacgtgccaaaggcgttgccttcgctccgggtgctaacccgatgcacggacgagataagaacggtgctatcgcttctttgagttccgtagcaaaacttcgttaccgcgactcacaagacggtatcagtaacaccttctctatcgttccgaaatcattgggagctaccgaagaagaccgcgttgaaaatctcgttacaatgatggacggttacttcaccaaaggcgctcaccacctgaacgtaaatgttctgaaccgcgagatgctttatgatgcgatggaacatcccgagaaatatccgcagcttacaatccgtgtttccggctatgctgtaaacttcgtgaagttgagtcgtgaacaccaactggaagtaatcagccgtagcttccacgaacgtatgtaatcttatctactcttatatgacaataaacgtacattcatacgaaagtatgggaacattcgacgggccgggtttacggctcgtcgtttttcttcaaggttgcaatttccgctgcctgtattgcgccaatcccgacacgatagccggaaaaggaggtacacctactccaccggaagaaatcatccgcatggcaatgagtcaacgtccctttttcggaaaacgcggcggtatcactttctccggtggagaacctacgttccaggcaaaagcgcttgtcccgttggttcgcgaactgaaagagaaagggattcatgtatgtatagacagcaacggcggtctttggaatgaagacgtagagaaacttttccaactaacagacctcgtattgctggatattaaagaattcaatcctgcccgccaccagatgctgaccggaagaagcaacgagcagacaatccgcacggcaacctggttggaagagaacggaaaacctttctggctccgctatgtgctagtacccggatacagcgattttgaagaagacatccgacaattgggagaagctctcggaaagtataagatgattcaacgggtggagatccttccttatcatactctgggcgtacacaagtacgaagcaatggaacaggaatacaagctgaaagacgtaaaagaaaatacccccgaacaacttgaaaaagctacggaggtattcaaaaagtatttcactacggtagtagtcaattaatacgctttttcatccattcaatagatttacggttggtttcctcaaaacgccaatgagcggaaacaggagttaccacaatcgttttcggggctgtaattacattcaacgcggccgtcaccgtggtaggcggacaagtgttgtcattatagccatacgaataaaatcccggtactttaatcttttgagccaaattagccacatcataataagccagtgtccgacaggcaatgtcaatagatactggcatttttttcgttcggaagcagacaaaagtctcggccaccctccggcacgtccatgaagaaatcccgtcatatcacataatgcgggatagaatgaatgcagaaagaaatgcaatacgttcgtcaaaagcaacagtcacaaaactcagcgtcccatcttaacttccgcccgaactacgcttatctttccactggtcggacccacccgaataataaagacgacttagcgagagtaacccaagcaatatccaccaatgtcgacaagtttatagaaaagtttttcattaatatgtaaatcggatacctgcctgtatattgaaattaaacggattttccttgcggatagtctgtacgctcgaaccatcatcaaagaaataagcaacaccgggttccatgtagatacctatacgtttcgtcgcatttaactgtacgccgactgcaccagatacggagaattgtaaaggtttaacagtttccttctcggagcctagttttccatacacacatttttctatcataccgcccccggaaacgtagagagtgaccagttttttatccaaaaagttccagttggcacgcaacggaatgccgacataatgtagtttctgctccacttcctgattgccatccaccagttttacatccgaagaaagcagtgtataggtcaatccactttcaacagaaaaccctttacccaagcttttacgaacagacactcccacagaaataggctgatgatgcttaatgtcaatcacctgctttgcctggcgcagataaggtataccgtcttcaaacaccaatgtcttatcttccggtatattcatcaagccgttagaaacagcagccatacttactcgagacagatattgggtacctccccctacctccgtcgaagcacctccggaatttccgacggcaaaccccattgaccaagttcccttttgagaagatttcttttctgtcgggatatgatatttatctctactcgaaggacggcgaggtctgttgtttctaggttcttccgtttccaacgcttgctttttttgaccagcattcgcgtctttcactagctttgtctcctctttttctccattatcaatcttatcatctgttgccggaaactcatcttcattctgaataacaggttgatcggtatacgtattttgttcggaaatattgtgttctgttttcgccagtctatctgtctttagcataggacgcgacacaggatctgccgttgcaccttgcgcatccggctgttgcaccgcaggcaatgcgtccggtacggaagccaatgcaggggtttgagtatgacgtatttcgtcagcggcaggcgtacccagaaaatacaggcttacagaagaaaccaaagccagtaatataacagccgcagccgccatcatccatttccgataaggatatatcttcctctccacaggagacataagctctttctccagttgttcccaaccggaagccggtatcggctccgaataatcttcgagcttctccttcaacttattcatccataattctttctcttccatatctatccattattcattatccattcttttactctttttgctaacacgcttttcgcacgaaacagttgcgaagccgacgatttttcattaatgcctaatacctgagcgatttctttgtgtgatttatcttcaaacgtataaaggttaaacactgtacgatatcctgcgggaagttcttcgataaactgcatcaatactctttgtggtatcgcttctacatccgaaacatccggttcttcgtacttctcgggcaattcttccaaaggcgccgactgattcattacatcatttttccgaagatattgcaaagccgtattgactattacccgctccatccaggctcgtaaggagccttcacctcgccaggtgaacttgtcgaaagaatcgaatatctttataaagccgtcgtgaagcagatcctgggccgtatcacggtcgccggtataacgaagacagatgccaagcatgcgccccgcatactgctcatacagttccttgcgggcctgattgtttcccagcctgcattgttccgacaactctaattcttccattctcttatacacgtgtttatcttataaatgcagcaaagatagaaatactgcatagagagaacaactcttttagtacttttgtttctttaacagattcgaatgcaatattttctgcctccccgcattttcaaaataaaaagcaattatattattaaaatccataacctattatgtatatgaagaaattaaaattcattaccttaactttagctatcataatcaccttaccgatgctgcaatcgtgcctggacgacaaggatcatcaatcgcgttcattggttatcagcactatcaaccaaatcagtgaggatagcaaagaattttatttcactttggataatggaaagacgatgttcccgagtaattcgcaggcatggggaggcgagaaatttgaaaacggacaacgtgcctttgttatattcaacgagctggagcaacccgtaaacggatatgactacaatatccaagtgagagatattacgaaagtgttaacaaaagagatcgtcaccatggacgatgaagaaaatacagaagaaaagatcggggatgataaaataaacgctacttatatgtggattagtaaagataagaagtatctgactatcgaattccagtactatggtacccatagtgaagacaagaagcatttcctgaatctggttatcaacaataaggaagctgattccgctgccgaaaacgaagataataccgatgacgaatatatcaatctggaattccgtcacaacagtgaaagagattctcccgaccatttaggcgaaggatatgtatctttcaaactggataagatagaagaacagatagagggaaagaagggactgaatatccgtgtcagaactttatatgacggaataaagaattataaagtacaatttccctgatttattaattctgcgtgaaaaacactcttttttaatataatatattaattacgcaaaaagagggcggtagttgtgaaactgtcgccctcttacttttattatataaacaagttatttcttatctccaaaataattccacaccaccgcactcaaagcagctcccacaaaaggtgcaatgataaacaaccacaactgtgacaacgcttcgccgccctggaacaatgctggagcaatgctacgtgccggatttacagaggttcctgtgataggaatacatacgatatgtaccaatacgagagacaaaccaatagccagtccggctaaattgcctgcccccttcttaggatcggtagaacccagtaccaccaatacaaaaataaaagtaaacacagcttctgctatgaatgcctgcaacatctctccttcgccaaagccgttcgaacccgtagccgtaggtccatcatgcgcaccggtagacaccaaagcaaaaagaacagccgaaccgataatggctccaatcacctggaaaatcatatacattcctgcatcttttccgttcatacgcccggtaaggaacactcccaatgtgatggcaggattaatgtgacatcccgaaattcctccgatagcatacgccatcgctaccactgaaagaccgaatgccaaagctacgccgaccgttcccacgccagcacctactgtacctgttacactaccggcaaaaacagcacttccgcatcccataagaacgagtaccatcgttccaatcatttctgcaatgtactttttcataactattatataaatggttgatttgccaaatataaagaattatcccaaagaaacaaaacgcatctacctaattatttgtatctttgcagcatttttgaataaaagactagcaaataaaatgaagaaaggacttttttacgccatattggcttctatcctatgggctattgtaaacccgtttatcaaacaaggattgagctatgacttcacccctatgaacttcgccggtatccgctttaccactgttgggattattcttttcgcttatacctggcacaagggtatgtggcgggaaatccgtcaacacagtaaactgttcctgaatctgattcttatcaatatgtttatgggatatactgctttttacttcggtgtagactttgtaagcggagctatctcgtccattattatgggaatgacacctttgattaatgtcctgttagcgcacttgctcgcaagtaatgacagactgaacactcataagattatcagtcttattgtcagcctcatcggcctgttcctgattatcggaatgggaagcaacggtgcaccactcgactggaaaggaattacgggaatcgtacttttactgttaagtattatctttcaagggtattctgctatctccgtttcagaagacaaaggaaaggtgaatcctattttcctgaatgcggtgcagatgttcttcggaggtctgcttatatatatggtgggcttgggcacggaaggttatcattcttttatcggaaaacccggcggattttatgccagccttgcgatactggtattcatatctgtattcgccttcagcttctggtttatcgccttacaaagcaaaggcgccaaagtcagcgacatcaatatgtgccggttgatcaatccgattctgggtgcagtccttagctggatcatgctccctgacgaatatccgacttttagtaccgttgcaggaatggtcgtgatcgtcagctccctgattatctatttcaaagggaccgaaataagtgaatggttcaagaaaacaaaagccggagcatagaacaaaccccggcaaacataatagtccgacaaatatcagtatcagctcacaacaaacattgaatagattgtaatgacaacatttctttaggaactgccgcctttatttcttctttcaaaacagataaaaggctgtggcgaataaaatctttatttgtagccagcaccacttgcctcgtaggccgaggaatggcaaacggacggacgagttgccgttgttcctctgtcaactgtgtcactgccagttcgggaataaaggtaatccccttcccgctttccaccattcgcataaacgtttccatacttcccagccgataagccatttggctgactttcaccgcttccatttggcaaaaacgaacaagctggtcacggaagcaatgcccttcatccaaaagccagagacgttcgcccgttatatcggaagtacggattacttcatgcttgaacgacggttctttgcgggatacataagcatagaattgctcataaaaaagagtttcttcggtcagaaatgagtcttccaatttgctggctataattcccgcatccagatctccggcgtgtaatgcctgctgaatatcctgcgttttcatctctgtgacgcgaatatccagttcgggatatttctccattaattgaggaaagaaacgcggaagtaggtatggagcaatagtaggtaatacccccaaacgaaagacacctgacaacgactgcttatcttcactgataatatctttcacttgagctgcctgcgccagaatcacacgagcctggtctattactttctgtccgatagttgtcgggcaaacaggttgcactgtccggtcgaatagctttacgcccagttcatcttccagcttctgaatcattgcactcaaagtcggttgtgtcacacggcaatattcggctgcccgtgcaaaatgtctgaactgatcaacagccaatatatactccaattgttgtattgtcatctatcaaatcatattaagtcatagatttcttctatgcaaagatagaaattttcagtttgacaacaagcattttccgccttatctttgcaatacagaaaaaaggaaacaagtataaatcattaaaaataaaaagaatatgaaaactttagaacttatcaaattgaatgaatcaggagcaaacaacgtagtagtatctttgcaacaactcttagctgacttccaagtgtattacactaatctccgtggtttccactggaacatcaaaggacacgacttctttgttctccacagccaattcgaaaaaatgtatgatgacactgctgaaaaagtagatgaaattgcagaacgtatcctcatgctgggtggcactcctgccaataagttcagcgactacctgaaggttgccaatatcaacgaagtagataaaataagcaacggcgaacaggcactaaacaacatccttcagtctatcagctatctgatcggtgaagaacgaaaaattctttctattgcatcacaatccggagacgaagttaccgtttcgatgatgagcgattatctgcaagaacaggaaaaattagtttggatgttgacggcttataatagcaagtaacttgataataaggatttaagttttaggtaagaaagagagaaaacctccataacaagaggcattctccctttctttattataagaaatcgtcaaataaaaacacacacagagatcgcagaaaatatgaatctcagcgtgaaatctatcaaccggtacaaacaaaaaactatggaacttttgcgaaatgaactgaaagactacttaccgttgttcctcctgttgttattacgtgcatgatttctcctcactccagatatatgcttatcttctgagaaacatccgcatctgatatgtattatccctattgtttatacgactttgcctaacagttagcaaaggctcactaatgtaagcaaataggctaacatctatgaataaattaattcacggctgtaaacaatcttattcactaatgtgagcctttacaaaacaagaagtacttgcctaagaatccctaagtatttgcatattatatacaaagggaaacagggcaatcccaccggaatctggacgaagtactatgagggtaaatatatactctcaggcagctatcagcagttaccctcatagctacaagtaggatgaataaagagattgtgccaattagtgagggtatgagggtaaaaacgtcactaacttttttctggctaagtcggaacattccgcgcgattgacctttccgtttcccgtttgcggtatgcaatccgttgtcagaatatacttgggacgataatagggtgtcaatattgtctgtaacctgttctctatttcttcagtatccgcccgtccttctattaataaggtcacagcctgtcccaatcgttggtcaggcactgaagtaatgacaaacggtacggaaataaaaggacggagcagcttctctacttcttccgcctggatttttattccgccactattgataacattatccttgcgccccaggataatgaaacctttatcgggatagattcgtgcgatatcattcgtctgtaatactccgtcacaaaccaaaggggcgtcaatcaccaacgtgttttcaggagataaagacagatttaccgaagaaaacgggtaataacgttcggaagcagctgttccgttgagacggcggagggcgatatgagacaaggtttcggtcatgccataagtagaatagacagctcccggaagtgactttatttctgtttccaaagcctcatcgatcgctccgccacctatgatcagaatctccgtttgcttgagtcgttctttttcttcaggagtccgaagggtattataaacttgcaagggaaccattgctgcaaatctcaaaggctgtttcacatccgacagcggatgaccggaagcgggacgcacaatgagatccagtcccgcaaccaaagcacgcaccaccaacatcatcgcgccgatataccggagattcatacataacaatgccgattctccttgctttaagttcagaaattcacaagtcaagcgtgcactttgcatcatttggtctttacgtacaatcagttctttgggcgtacctgtggaaccggaagtatgaactgttatgaccggagaatcattaaaccactcattcaggaaaaggtataaatcccataaagcagaaggagtattttctgctccttctgctataaaccgggctatatcttcaggagtatattcttttccttccaatagcaaatattgttgttgtcggtcgaatatcatcggatattattaaatagcatcattacaaaaccacaggcaatcttttcttatttcaagaggcatttctacattatccgtaaaaagcaatcctgttcccaagccctgcggtaacggattatcaaacgtagcacaccactgggcgatagcgttcagcccgatattcgactccagagcggaagtaatccaccagccaatctgccgtttctccgcctcggatatccattcgtttcctccgcatactcctccatgaagggaaggtttgaggataatgtattgcggacgaattgctgaaagcagtttttgttttccttccagtgtattgcatcctatgagttcctcgtccaaagcaatcggtaagggagattcggaagtgaggcgtgccatttcttcccattgcccggcacggataggttgttcgatagaatgtaagtcaagttcggacaggcgtttcagcttttccattgcatccaccggagagaaagcaccgttggcatcgacacgcagttcgatttctttagaggaaaagcgggtacggatatgacgaagcaatgccaattcttcttcaaagttgatagcaccgatctttagtttgatacagcggaatccggcctccattttcttctctatctgggaaagcattttatcaaagtctcccatccagataagcccgtttatcggaatccctgcctcaccacgcgagaaagccgtatcgcataatgcccaacttcctgcaaagaagtgccggatagccgtttccaaaccaaacaggatagagggataatcacacaaagagtctacatccagccttccctgccgttcttccaaccgacgacaggctttagccaggataacttcataatcgggaaggtcgtcacaactcaatgcgggcaaaggcgcgcactctcctatccctaccctacccggaaaatcaggagacgtcagatgaagataccagactttacgtgtcgtatatatgcctcgggaagttcctgccggttgcctgaaatgaagcaaccggggaataatttctactttacagtccattatgaatgtcaggggaacttaggatattgtttaaagttcggtttgcgtttttccagaaacgcattctttccttcctgagcttcatccgtcagataataaagcaatgtggcgtcacctgccagttcctgaataccagactggccatccagttcggcattcagtcccgctttaatcatgcgcagagccaacgggctgagcaacatcatttcttccgcccactgcacatattcatcttccagttgttccaacgggactactttattgaccagtcccatatccagagcctcctgtgcagtatacttccggcaaaggaaccagatctcacgcgcttttttctgtcctaccacccgcgccagataagaggctccgaatcctgcgtcaaagctgcctacacggggaccggtctgtccgaagatggcattttccgaagcaatggacaagtcgcaaaccacgtgaagcacatggccaccaccgatagcaaatccgtttacggcggcaatcaccggtttcgggatactgcgaatttgtttctgtacgtccaatacgctcagacggggaataccgtctttaccaatgtacccgccacgtcctttcacattctggtcgcctcccgaacaaaatgctttatctccggctccggtaattacaatcacatcaatgtccgcttcttcccgacagatacgcagtgcgtcgctcatttcagcagttgtggtcggagtgaaagcgttccgataacgttcacggttgatagtgatacgtgcaatcccattatagtaatcaaaaagaatatcctcgtattctctaatggtagtccattttcttggtgtagacataatctatttttgttttagttgatgataataatttttcagcatgcgggcatctttgtttttattggtaaacacttccagcagcagaggacgttccttttcttccggttgggtgaagatttgcatggtttctgccagttccgcctcattctctgcttgcagataaagaaatccgcgttcttccgcccagcctttggcagaggttttatgaacagcagcaatgaatttatgggatgtccccgacatatccaatccccgcaacgtatggaagatttcccctcctccgttattcagcaaaaggatgcgcagattgggacggacattcacattccacaaagcattcatgtcatagaagaagctcaaatccccgatagctataaaattcagcttgtcggaagcagccgcataaccgacagcagtagaaagcgatccttcgataccactcgtcccccggttacaacagatttcgacagtggaaggaacggaatacaactgtgcatagcggatcacggaactgttcgccagatgaagcgcacatgattccggcaggccttttatcaatgcaccgacagccgccatttccgaatacgcaaaatcgggttcggggataatcttacaatagttttcccacacacggggatattccggtgtacggttgtccatcaagcttgctattttctccagaaactcaaacgggtccatttcaatgactgttgtcaatgctccgtagaggtcgactatctcaccgtcaggagagatgtgccaatgttctttgggcggatgttgacgaaggaacttcttcagtcgtttggaaacaacgtgcccgccataggtaatcagtagttcgggagtcatctggtctatcttctcctcaggcattgcgtaaatcgccgcatcgaagtttttcaccggaatgccgggtacggtttgattaccgatatgttccgtcaaccaggcaaagtgtttatataataatttggtgtgtttcttctcgaacagatagataagattcatctgaccgacaataatcattcgtttctgatatttattcatccggtcaatgaggtcattataatcgcggtcatacacgttcaacccctgataacgggtgattacacgcacttccggcaatgcgtccgacgtaaactgaaacagaggttcggaaataggaacgttgatatgtaccggtcctttcccatgatgtttcgtttccaacagggcttcgttcaccagacgattgcaataccattcatcttcttccgtatgaatctccgggaggttgaccgacttcttgaccagattctgaaaaacaccgggttgcggcaaggtctgtccatccatttgtccgatccaggcagcaggacggtcggcagaaataaccaccagaggaacattctgataaaatgcttccgccacagccggatgaagattgagcaacgccgtgccggaagtacaacagacggcagcaggtttgccgccattcaaagccagcccaatggcaaaatagcccgcactccgttcatccgtcaccggataacaggtaaagttcggatgattggacaaggtatgcacgagagggatattacgactacccggacataacacgactttcgttattccatgtgcttcgagaagcgcaaccagttggagtatgtttttcttgtctgtatacatagtgcagtgataagttgtaaagttatatattatgaggtgataggctgtgggtcgtgcagagaagaaggtacaataatccgtctcatggtttgcaacttcttttccgtttccagccactcatcgttcagctccgaggaggccaacagtccgccaccggcatagagagtgagttgttcttcttcgatgtgcatacaacgaagattgacgtataagtccgtacgcccatccgggtcgagccagccgataaaaccggaataataacggcggtcgtagccctcattttccagaataaaccgataggctgtatccttcggcagtccgcatacggcgggcgtaggatgcaacactttcaggaggtcacccagacctttattgtcttgcagagagaatcggaaatccgttttcagatgcgacaaggcgccggcataagcaggatagggtccgttctccgtcgaatgaatccctaatgaaaggagttggccacggatgtaagaggagacgtattcctgttctttccgattcttctcatcccagacttgcggcagtttgccgtcttgcagaggttgggttccggccaatgctaccgtatgccagtcgtccttttcgcccgacaagatgatttcgggcgtacttcccaaccagatacctgtttggggagtataacataagtatatataggaatggatatagcgttggcaagccgcgcgaaaggctaatgaaggagaaaatgccgatggttttccaataataagtttacgggaaagtaccagcttttcaaaagtcttatcacgtaaggcactgataaatgtacgaaaacactccgcatattcctcggaacaggagggatagtcggttgacggaatatcccgcggaacggcgtccgcatcatctgcaagaagcaaaggttgccccggcccattcgattgaatcagcaaaatggggcaagtctcgttaggtcggaacggagcaatcacaaatcctctctgcccgtttagttcctgcaaatcgtatatcagacggactgccccctcctcctgtgtcaccaggcacggaattttctccccgggaatacgataaacggcaaacggttgcttccgttctataaatgcatcaatagttgtcaagttacttatttcttcgtcggttatctttttttcatcacactgttgactacccgtatggaagacaccagtttgttggttgaagtaaatacgtccacattccatacatgggacgaacgtcccttatgcacgattgttgctaccgcacgcaccgtgtctccttcgtgtgcagaagatatgtggtttccgctcacctgcattcccacgacaatctcatcgggctggcaaagaatcatcgaacctagtccggcaactgtctccgccaatgcaagactggctccgccatgcagaatgccgaacggctgacgggtacggtgatctaccggcatcgtcgcttccacacgatcttcagcggcatacgtatattggattcctaaatttcccattaaagcgtgacgcgcctgtgcattcagttggtcgagaggtatctccgccgcacgcacttcagctataattgccttttcaacagcaattgccactccgtcttcttcattggaagcagtcacatagtcagcacaaatcttcacggaatcctgcgagtgtcccatagctacgccgagtccggccagttggatcattgtcacatcacatactccgtcgccgatagcaatcacttcttcccgcttcacgtccagttcttccaacaaagctcccaaagagttggccttatctatggcacaaggaacgacttccagaaaatatggctcggaacggaaaacatccaatgctccgttcagtcttcttttccaatgatcttccagaccgatcaacgcttcttcattatcgctgaccaacatacacttacagggtgcaaaatcaacagcggcagaaaattccgtttcctcgattatccgcagattattcagccgggcttcattttgaatatgttcattttcaggagagtccgtaataatcgtatcatcatgataagtgaataaggcaaaaccgtttttccgagctttcttttccagatacggcaacatctccggattaatccgccgttcgaacaggatttccccgttctgcgcatttataatctggcaaccattatatgaaagaataaagcctccatagtttccaagttcgagtgatttggccagtggcattaatccataggtaggtctgccggatgccaatacaatacgcactcccatttgctgaactttcaacaaagccgctaatgtacgcttactaatttctttcgcgtcattaaggagtgttccgtctacatcaagaaccaataatttatacttcatgattacacgattttgatttagattacaaaggtaggaaattgagtgaacgacagaaagagtaaacagataaaaattactttaatttcactctttcagatgcatttccagataatcccgaagtatccgggcatgattatagacaggttctttagacgcatacagcagtgtgaccaccggatgaggtctgataagaatcaggaaatcagccattgcgggagatgcggccagttctttttgatattgcatgacaaagtcgttccaatgcccgggaatatcttcgtgaaaccatttgcgcaaactagcggaaggtgttatatctttcgcccaataatcgtatttcagccattctctcttcattcctcgcggccatagtttatctaccagcacccgatatccatctgcttctgaaaaatcttcgtaaactcgttttatcctaacctgtatcattcttagtttatttagttactcataataataaaccgagaaagacgaaaattgtttaaccgaaggatgtcgataaagttttttaaagcgactcttgcgcttttttaaattcataaggagtcattcccgttttcttcttaaaaagactgtataatatcggagcactattaaacccagcttcatctgctatcgcgcgtatcgtatagtgcggatgtgtttttagcagttgaatagcataatcaatacgcaactcgttgatatatccgttaaaattagttccggtacattcttttatcatccgggcaaaacgcgcattgttcaaatgaacgatttgcgccaagtcttctctcgacagttcaggagaaagatacaaacgatcttgaacaacgatgcgattcaattctttaaaaatctgtctattctcggctttttccccgcttgctacttctgtgtcatcttcgtccgaagactcacactgttcttcttgttccttctcgagcaatctgtcttccagttctatttctgatgatatagcgaattgctcatattcctccgactgctgatcccttttttccttatcggcaagtttctcattgatcaacttagccaacattctgtttttatatttaatcgttttattgaaacgccacagacgccataagataaacaaggtcagcagaacgatacagaccatgaaagcaagtgagatattctttattcttaattggaaagcttgttgggcaatgtattcttctttctcagaagcaccgtacatcgcgttcaactccaatgccgcattgtttctatctctacaattaatgctgtctgttatagctaagatagtcccacggatcgctgcagcctctttatagtggtgcatacccagataagctttcacctcatgttgaagaacagtcagatattgttcattcaaagtatcttgttgagttctcatccattccttgaaacccttacatttctcaagagctttctcatactgttcggaaatcatcaaataaggaacagagtacatttttccgtccggtgtatgagattctttcttcgacaagtatttttgataatattgttccgcctgtgcattctttttctctacataataaatataggcaagttttgcatacaaataactatattgtccgtccacataaccttcgggtatttgaggtaatgcctccagccgctttataagcttttcacgctcaaaagcaagttccaaagcctctttaacacgtgaatcgttcattaaaaagctcatttctgctccataatagtaagaaagcaacatcatctcccgcattttatttgaaccgcgcaataatttaatagtacggtcaaaataatcatatgctttatctttaaaagataatctccagttattctcacctatgcagaaaaataatctggctttggcttctcgatcttccaactcctgtgccagtttaatcccactgtatgcataacgcatactttcattatacttgctcatcatagccgaaaattccgctagatgaactgtcattttcaacagatgcttcggatctttttgagatatagaatcaagcaaataagcttttcttgcatacataaacgccagtttattcatatacatattgctatatgacaaactacgcaactcattgataatccgcaaaggaattgcttttctattttctgcctcatccaataattgcaaagcacgtttaggctgtgcaatatagatactatttatatactcggcggtatatagcgaatcgtcacttactgtttcgtcagctctcagaatttggttatgcacaaataaaaatatgcagatacatacccctaaatgtatatatttcatattatgtctaatcatttacaattcaaaggtaaatgataatttcataaaatacaaaagtggattctattttaagaaataaaaataagaaacattagcattatgcatccgccaaaggcagataaaccgaaaaacaactaccttccccgacttccgaacttactcccaaacgtcccgacaatttttcaacaatgatcttgcagataggaagtcctaagccactcccctgttcaaactcatcactcttgtaaaaccgatcaaatataggttctattctctgcttcctgaactcctgttttatcagttcttcgaattttccatgacctatttcgtcttcagagaatgaatagacaagagaaatatattttttcgtctatgatttgagccgtacaatcttaggtgatagccactaaaaaaaggcaactaacaagcaaagagatgcaaaaatatacttatatttcaggttaacagctttcatgttttatttgtatgtcatgcaaatttccataaaacaaattcattttgttaataatatattcaactaattttcattacctaaaacttccaaaccaatatcctactacttttcgtcccctgatgcatccgtataaccttgtactccgacacctcgacagctttcaacttggcatatagcttatccagattcttctctttggaaaccaaactagtgaaccacccgcaatttttccggtatttccggctttcgacaatcatattcagcaggaaacgcaattcgccaccttcacaccaaagttcattcgcattccctccaaagtttagctttgccttttttactatctcccctttcaaactactcaatttgcgcaacgttccctcttccgcttcctctttcgaacgatgaaacggagggttacaaattgtcacatcaaaatattcatcgggagcaatgatgccttcaaaaatcttgctgctatctttctgaagccgtaactctattttatgagccagcaccggattacaagtaactatctttcgtgcattttctattgatatggggtcaatatctgaacctacaaacatccaaccatattctacatgcccaataatcggataaatgcagttcgcacctactccaatatccagacatctgtatgcagatttccgtatctctccattttccactttcacatctttgcttacagcttccgaaccaatcaaatctgcgatgtaatgaatataatccgctcgtccgggaataggcggacacaaatagttcttcggaatatcccaatatcgaatgccgtagtagcttatcaacaacgctttattcaacgccttcaccgcttgcggattgaagaagttaattgtttgcgtaccatagggattgagttgtacaaacttctttaaaggcggataattctccgtcaatagagaaaagtcgtattgcccgttgtgtttatttcttgtatgtagttcgcttctttctgacatggcggcaaagatacagagaatcttcctgtctgcaaattcttccctatatcttttcccgcactataagttatattgtttacagtaaccattttaatataggccggctgaccgaatcacaatcttttccaacaactgctgtgtctttccaatgctataaaagctgataaataatcagatacgaggtgaaagagtgaaaggatttttattccatattaaagcatcttagagggacctctctgatttatttttgttaatctatgacttgttatgtagcttgtatgagaataaaatactattttcgggattgaaaaatataaaagactatcacaaaatgaaaattacccgtgatgaattgctgatagcagcgttcaagctgtttatgtccgtaaactatgaaaaagccagttttgcagaacttggaaagatgctcggaatgtcgaaagccggaatattcaaatactacaagaacaaacaggaattattcattgccgtagtggataagttttgttttagcgcgcaaaacccacgaaacaaattcactgaaacgaacggtacgtttgccgaatttatagatgaatacgtgaaaggcgtacaacgaacaatggatatgctgagtaatctgataggcccaggtagtgataaggtggtacaaggaaagttttcatatcatgcccaatattttcattttctgtttcaacttctccaatatgaccctaacgccaaagaaaagctccataatcttatagtcggtgattatgcttattggcgtaccgccatacagcgcgcgataaataccggagaattgagaaaagatgtggatgtagaagatgcagtagttatgttccgacaagtttacatggggctgtcctttgaaatgtcttttctcggtggactggatacggaacgtcttgccaaacatttacgcgccgtttactccttattgaaatgttagatagtgccgtccggcacatattccttacctacttgtctgttggtgcaaaaaaatataaaaaagggatcataggaaaaaatctggcatattttaattaggaatcacaccattttacatacataatagtaaaagcatactatttgcaaatatggttcataattcgctttatttcaaactataagaatttgcagattttgttttttacttgcagatttgacgtttttcgcccaatttatccccccatctatccccgaagtaatactttttcctcaagggatggaaaaatttcatcggagatggttcatatatattctttttatcatccctttttcaaaggatattaataagccagccccctataattcttgacatctgaagtaatacagcaaaatggaaatgcaataacatatcgttttctataagtaagtttaatgtgggctgtcaaatagccttcaaaaatcgattgcctccatatcatgcaaataatgaatgtcaataattgatttcacatactcttgagtatctggtttaaacattctcaccaaccggccatcatcataattaaaatacagcgttacaggcagtttcgaagaagcagaaataattcttgctatagttcctttgtttggtagacaatggcgatttattccatcagcgctaataatatactttccacattgtatcatcttaaatagagctaagctattatttgctacacttccatgatgcgaaagcaaaacagcatcgcaatgcagtttgttcgcttcactatatcctagtttaaacaatgagtgcattataactgatggtactgagtctgaaagccataaaactcttttccccacatactcaaacaatgcggctatactactggcgttctcaacactcgtatcttcttgaaaacattctatattaaaatcattaagtaatgttgcataatcatcaacaacattacccgcttcaacactaacctcatttgtttcagacttacacagtggacgattgtttgaatatttttccctaagcaggttcagtttgccctcatcaggagaaaggactgttaccgtcattccgtcaatactgaaagacatcccttctataacatccccccaatctaatgggctatgtgactggatgtattcatagaccttatcccctgagactatgccacatagcactccattcttattatcagagacttgttcaacatcataccttcttggcggattatatatccactgactaacaacattccccaaagcacaatctttttgaatatcttttatgaatctactagctccgccaatgtggtcatcatgaatatgggacaagaacaaagcatctatctgctctgaactcctaataagatttgaaataacacctttcaacacttgggtataagtcttagagtaccccatgtcaagaaatatgttacgacacctaccgctttcaccctcatactgtagatgaaacgcatctccacactttgccttgtaacagaatagtctcatatcacactctcttatatgttctgagaacaccttccggaacattgttattatccaaataatatactccacatggggcatatatgcactgacatccctttcctccacttatatatacccgcttttccccccgcacaatccacaaaatggccagctcactttgcttcaggaaccgtaaaagaggctcttttttaaccaaaatctggttgtacccgtatgttaacgccacaaggttgccatctttatccagatattgaccgtcatgtgaatcatactccatgcccataccctcgaataataacctacacggaatgctatatttgttgatagtgccagactgatcatcttcaatatgcccgcaggcctgctcacaagaataataatagggtacatctagcccatctattgaatttgcccaaccttgtcggtccctataaacgtctttatatgctggtgaccagtatttttccctgttcaccagatattgccagtcgtcggtcggtaattccacaccatcccataaaaccctaccatctaaagactgtattgccttctctttgtcttgttgctttacgaggatggcatctgtagccaaatatacatcatgctttaagagtttatactcatatttttccttaccaatgtctttgggttcatcccaactcctggagttattcagggtcaaccattctatgccgtcatcgtccaacttttggattaaagaaactggatctggcaaatctttaatcatggatgcccatgattcatttgtaccagagtacttccagttatcaaactgttcttcattataccattcgtgttcttctgccaccctgctatcatccgcctcctcactttcaacgctttttactcttgcaatcattgaaggattgatattcctcagaaaagattgccacgttccatgaaacaactcgtatcccccagagccctcgtttgcataatcatcctcatatttgtaattgtctgccaaaattcccataatctcatagaaggctatccactgatatttctttcctatgcggtctattcttttatccgaattacggaacgtccatttctttgcaaaacgatcgtaagcaccatgcaaattcacatcaaatcctaattcataggctctcttaacaacccaatttctaatcccttcagttgggaatctgccataatgatgttgcatcaaaggtaattcccttactttaaaaggaatcatgatatcgtataaagcctttttctgctcttccgacattaacttttcagcctcattacaaacaaattcgaatatagtatcgtttatgctagcattccttggccctttttgcctatttaagattaaaacagctttcctttcacatatatttatggccagtttcttcatatttcccttaaacagacgtaatgctttatcaaattctttttcttcagaaattggtactggataaaagtggtcgattgttggcttagtcagtttattccagaaatccgccaaccctcctttcaccgattcccaaatctggttttgctccgaaccttttctttccttgaagtttggtgcatcataatcaatatgaaggtagttaacttcatcatcggcaggccatgtagggagtgtgctcgtatatggcgggcgaacctttttcatatcaacagcagttataacccccttatatttagcgtattcaacaatatttcttgcataatctcgcagtaaaatattttttggtgggttattgcgtttgaagatggtctcatatacatatcttgcaagtttcatcagcccatcgcgtgatgaagtccgcaatgcgaccccgtaagccacagcatacaaccgttcatagatatacatatcatccacattctcaaattggcgtagtgtttcaatcaatacttctacctgctcagaaagaaggttgacaagagcctttgttgcctcatctctgtgtttgatatatgttgatgacagcagccaacaaagtataatggctgctaatctggtcgattcggaatctgcttttacagatacatcttcagaccatgcccagtctatcaatctccgcagaggattggcacatctgtcattatcatattctgcgcaatcattgaaaaagaattggaatatgctatcacgttttggcatggtaagtcccatcattaatgcatgaaaataatcagcattaaaagagtgattagggattgttgaaagctctaccagtttattataccaatcatcaggattaatatgacaatatttggagcctagaaattgaattatagtttccttgtcaatggattctatcgcgcgccaacacaaactatttatctgggcctcagaaattgtgttaagacatgtataatatactctttcatactcatcttctggaatgaaacgaatgacatctgtcatctcatgagcaaatctctcggggattaagatagccatggcttcaagaattcctttgaacgaccaatgcttgtctacaaaaatggaatgtaaagttttgtctgtatttatgttttctgcaaacgattcccagtcttgaaacttattgacaatttcacgtgcaattataaaatcactgattctctgataagagaaaacaacactgtcgatattttcttcatcaaaagaatacttcgttttaagcagcaaattgttgtctattagatctgcaagcaaattgtgacaagaaggaaattgttgttgcaataatgaatctgcatcttttatcttcagaagattatatttagcctcaaatataggaaatgccagcagcttaaccgctgcactgacaacatccctatatttatattcgggtttcttttcagcaaacttcttatccaaattcttgaagtactgattaaatagtgatgaaacgccattgaatcctttaggaaaatctttctctccagaggcttcaagtgtatcgcaaattatcttcaagaataaagggttacaaaactcaggtgtcaggatgggaacattgggtaagttcaactcatacgccaaacagaactgtcttaccgcctcatattccagacctttaaatcctttatgctcaataactgtagctcccgaatcagtttccaccccatcgggaataacatcatcaaagtatgtatcacgcactgacaccactaaacctatcgcaggatagtctttaagagacttgataagtccagaaagtctgtctttccataatacggcctgaggtccttcattcagcgcatcaatcatcagaagtgccctcgaacctacttgggttcctatctgattgaaactggataggaattcccggaaagtacccacaaagcctacttttgaagtaatggttgtttcataagtctcctcagcaaagtctgttcctaagaacaacaaagtgggcagaccatcatcgattctcttactggcaacatcacctaacaaatgcgactttccacaaccagcttcacccttaattatcaaatagggattgtttgctagattaatctttaaatcttcaaagttttcagtgaatgaatacaaatcttgagatatttctaataatctggcttcatcagcctcgagctctttccttacattatcatctttttttgtcgaggaataatcagaataaaatctatgtctaacttcctctaattcattttggagagattcaacacgcttcatcaaactagataaatcaatgatagcatctacacgctgatccaaatttgacaatgctacagtaaaatcgtctcgaatcgcttttagatgagattccaactgacctattctattggaatcttttcttgttctatagcttttctctgttaaccaggaatctatattcctgtacaaccgttcaaaatatgcaggcgtttttgccacgcagttaaaatacttggcagttcctgtcctcacattgactttctgacaatatctgggacccaagtttgctacggaatcttcaacattgttttttaatgtcttatgtcctaaaccgtgatgcccgaggaatgacaatgacattttctttttatactcttcttccagcagtttattgaaggaaatcaacctctgagcacttattacctttccacgctcttcgtcagtgtacctaatgaagatcccattaatatacaactcctcacaagcttctataaaaataccggaacctgacattccgacaattgtatcttcactataatcgtcatttgtagaaagctggaatacattctctgttatatcttcatgaaggtaagtcattctgatcattgccaaggacgactctccattttcgttagtctgattaagagttgccacagggaaccctttactcacggcttcgtcagttccaaaattcttatcaactacgtacaccgatggaaggtcagagacaaccgatgcaagctctcgtttattaataataattataccagcatcatctacgggatggagcaaaatgctttgcttaacaggggtaacgtattcgtatgtactggtatcggggttataaattcttaacgataccctacctttttcccctaacttcgaaaggcaatgtttagccgtcaaaacatataccaccccagacaatttcctattggtataaagaacgccagtccccaacttttcttttgagatatcatctttatgtaattcaaccgttaactgtgttattatattaagacatgtatccgtcataagcatttatgtcaatttccccacattatctattgaaaatcctgtatgtgctccaccatgaatagcaaacacctgctcatccattacaatcgggatgagacggagcaacaactcaaccttctaagtgtaaacacctgattttatatcattcatattctgcaagttctttcgagattatcatattttacttgtcgatgtattttcccgtaggcgtgattataagttcataatgatttcaagcatcttctcttgatgttgaaccatatcatcaacattccattctaatccaaatgaacgttttaaggtatcatctttaataccagcatcgtaattatcttggcatatttgtaacatgattctaaactttaaagaagcaacgcttacttggtttgactttgtatcaagatagcgattctttttatcaatgggattccagttggagccagaactgtttgcatccgaacctatcattgcaaaattaccaaagcaatttatatcttgcaaattaattagcatattatcaccagccttggcttgtggataataatgctctaaactttttcgtgttcgagagaaatagaaatttttgaaaagttccaactcaaagtcactacaacctaatgctctgaaaaactctattccattacgagaacttttctttgttacttcgaagtccttccgcatattataacctgtatagttaaaaacatacaaaaggaaaagtttcgtaacaagcaaaacggcattagcgatgttgaaatcatggtgattcttatcctgttccactccggtggctttcgctacttcaagtattattataaagagttattgtttttgtcccaaagcagtttagtcccgatacagtatgccaatctgagacaaaggatacacactgcataactttataacgcacattttcatacattaatgttgagattaaaatattctgatttttctaaatttatccctaagagtctttatcatacgtaaaaaaatattttcttgattctttttaacggatatttcttctctattggggagctctttattgattgaccattcaaattcattaatgccaaccaatgcagaaccctcaaaaatctcatcaacaatatgcaaaagttgcttaccaattgcatcaatacacattcgcgtaatcatctgtcggttattatcctgcatatcataaataaagtattcaagcatcggaatccagtcatagagggtacgacatttatctaatgtaaatatatctaagcacatttttctttttttcgctgtatacgaatagcgtttatgattaccgatatttgtatgatatgggtgtccataatgaaacaaaagtaattcaagccaaagatgtgccattggtacatcacaaaaacgacattgcccatagaaccagttattaatctctgatatcacctgattgacctcaggtgtcacaacttgtttaaaatctacatctatatattcatcatcaatatcattatcactactggcaccatgctttatatgttcctctattttattccaaacaggtaatgaatggctatatggagactgcaagaaaacctctgctatttttatacattctagtcgagatcttttggttccattactaagtttttcaataaattcatcttctaaatattgattagagggtaaacgttggccatccataaaagactcttgaataagcacatcatgaaaattccgaaaaaaatcctccttttttgctattactttactattgattagtctttttgaaagcatatcttgcttaaaaacttcatacgcaggtttatgtctattggcataatcaattattaaagctgtttgaaatgcagaatatgcattttcaaaattcatatcaataattgaccttaaattttcaatatcgatacccagcgcatcacaaccttccgctctttgaaccttactattttcctcctcagtatcattgcttgtcagaacagacgattcgaaaaaagtatcattatagaaaaaattggtaagtatttcaatattctcttcagttttatctggatatgttgtattgatagcaagaatactcatatcattgagagcattcaagtccaacatctttaatacgaccttatactctttaaataaactcccagtaaaatcaagataaacaatatcaaatttcgtattctgtaattctgcaaagacttcaatcttacccttgtaaatttttagtaaaggatatgtattatggagtgattttacagccagattaaacaaatttgaatcacattcaaaagcatagatattctctattcttacacctaacccaagcaaatgttttacatcattctctggttcattaccgcagaagaaagcaatcttgagttcttctggcttcttggtctggtaacaaatatctgcatattgcttccactgaataaaagcttcaatatctagtttttcatttaattgctgctgacaatacagccacaaatgctccatataggttgtattcaagatgcgattactatccctgagagaagtcagcgattctacagcatgattccataataagacacgagatttatctttctctggttgtttatatgttgtcatataaaattacaaaatgtttaagtgattgaaaataaattgcagttaccaactcatagtagtaatagattacgaattaattatcagctactttatttttctgtgtgttgcgtaaccttcaaactcttcgtatgcaaaagtacgaattttaatggcacatattgaaataaaaaatagcttttgaagctctaaaacaagtttttccctaaaatctacttgaaccgtaagaacatcatcatcaataaatcgacgaccatgtcgcccccatactcgaatggtttataatgaagtttcaggaacttaaagaaaatctgggtgtaagccaccccaaaaaagaggaaaacagactaaaaaaggggggtaaactatagtttttttatatcaaaaacaaaaaacagattatcattattgtcaaattcttccgtaaaaacaacaatatttattctatttgtattacatttgctactgtagagtaagcagtaatgttactgtttaaaaaattctttaaatatgaatataaaaagaagactcacatagcatcttccccattgcaaggctatgttgaagtctctaatcaaagcaatggtttggtacatagaacataaagaagctattgacaccctagtaaaatagttacgtgacatctttataactttttattaccagtaaaaaacaaaagaggtgaagcattgctcacctctttttctatacaaatatttcacaaattcattcattccaaggatagccacaagtatcacaaactccatcatccacataataccaatctccacaccttggacattttacacgatctaaatagttataatcatactccctttctgtctttatattctcgtataactgcatattacaattaataaattctttatatgttaactctttaataatatcatgcaaatatttaggcaacatccgttcaattttttctttattacccggaggtgtagctataagacccattgattcatattctcgataaatacttcttcctctccttactgttgtaatttcctgacaatcactaaaagcgtacatccctatacgtttaacagaatctggaatatatacagctttcagattcctacagtatctaaatgctaatcggtctatgtattgtactgatttaggaattataatttccttgaaagatttacattgatagaaagccgccctacctattcttgtcacagaactaggaattaaaatatttttcaagctagaacagccagaaaacatactcttattaatggacttcattgatataggaagttcaatagtttgtaacgaactacatttagaaaaaacagagctaccacaataaattaaatattgaggaagcttcatattctgtaatgatgaacaaccataaaagactccattacctaaatattttatagattcaggcaaatttattttctgcaaagtaatacaactttcaaacgcattatcctcaattctttctacaaaatcgggcaacactacttcaactacctcacttctaaaaaaagcattcctctttataacattcacagaagcaggtacgttaattatcttataattagaataacaaccaataagcgaggacccatctttagtcagaagcagattattttcaagaataaaattttcagatagattctcaattattgcttttgtatatgcaaaaggattctctcccatccatttgactgttggcgaaattgtaattaattccaaatcagagcaataccaaaaagcataaccacttattgcaactacacttttaggaataatataagaagtcacattagactgaaaagaaataagaacacgcttattcttagtaaacaaattctcattttcaacagtaaaattaggagaattattcacaaatttaactttattgtatactatgggatttcctgttatttttaacaaagatttcggaagtacaatttctttcaaactcgtatatgaaaaagccattagtcctatttcttctaaagattcaggtagtttaagttccagcaatgctttacaatctttaaaagcaaactccttaataatcttaactgaattacccaaagaaacttctcttaagaaaaaacagccgctaaaagctctttcccctattacctctacagaatcaggtataataacattaataatagtagaacaacctgcaaaagcataatcacagataatcttaacactttcttttattctatattctctacaagaaaaagttttattatcaacatcaattaatcgtaaaccatcacgactataaaaaaccccatatttgtccttctctgctgaaacaaaatcgtaatcagtaacttttgtcaattgaacatgctgtttgttattcatatctttaactttcatttttaataactattcagcgaatccgcaaaataaacaatattgataatcaacgttttgcagattttgatatcagctaaatccgtagaaaaactgcatttttgagcagtgtataagactgaacctctcataaatatctgaaagtcaggaacgtttttcgctgaatagttaccatttttgtcatactcattaacagttgctaaaaagttggaataattttacttttttatttcatagaacaacacatagccgaatcaacctcgtaaccaatcacaaaataaaaaacaatctgtttaaatgcatagttaaataaaacaaaaaacacccaattctacattgtagggtgtaaaactgggtgtaactctcgtaaatcactgacaatcaatgtttattgcggagagggagggttttgaacccacaactataaccgcttatatttcagctacttcgctttcaaaatttcaaataggtaacgaaacagtaacgattttcacccatgaagcctgtccgactttgaccgctgtctgtctgcctaactttcgggttcaaagatactgctttcttttgaattttgcaaatgcctgatagtaaatattttcgggttagtgcaaggtgcaagctatatatataaatatatacttgcaccttgcactaaaaaagaattgggtaacaaccgattaaaacaaaatccgtatattcgcatacgaaaacagaaaaaaggaaataaatatgtttaccaaccgagatgaagtattggaaaaggctttgcggatattcgcaaagatgaattacgagaaagcaagccaaatggaaatagccaagacttgcggactgtcgaaagcgggactaacctattatttcccgttcaagctggacttgttcatggctgtcgccgacaggtatgtgttcgacacccagcactcgaaaaacaagttcaacttcactgacggctcgttgtcggaatttatcgaccagtacatagccggagtggaaaacacgatgcaacggctcgtgcgcctgctggatgacgggaacaatcccagcgggtgcagttttaatttctattactaccacctgctgatgcaggtaaggctgtattatcccaacgtggaacagaagatagccgccatatttgaacaaaaccaccggctatggaagtccgccattcatcgggcgaaagagaacggagaaataaggtcggatttggatgtggaagaaacggctttgatgttttggcagatgttctttgggatgtcatttgaacaatcttttcttcaagggctggacaccaagaaactatcacaaaaactgcactttatctattcgctgataaaagcgtgaaacacggctctatactgcaatacttccccgttagaggaactttaacaaaataaaaccaactgtatagttggtttgcatcttatcttttcctatatttgcggtaatgatattactttcagttatatggacaatgttcagaaacaacggggaagcatcgtgctgcacaaggaaacaagggacggtgcggactacatacggatagaacatgcggacagtcaggctatcgccctgctgttggcacaggacaaggatgtggagctgtcaggaaacggctctgcctatatagcgtccgccgctttccgtctgcctgatttctacgaccgctattctccccacgcctacatagattacagccgggtttacgtcaggcatccgaagccccaacgggaatacatattgccgaaaggctacctcgaactgttggaacagaagcgttacagcccctcgactatcaaaacataccgtgcctatttcagcgacttcatggaatatcacaagggacggaacatcgaccgcctgaaagtcgccgacatcaacaaatacatactctatcttgtgaacgagaagaaaatctcggtgtcgcaacagaatatgcgcatcaatgctatcaagttctattatgagcaagtgaaaggcggcaaacggcaatattatggtggtatcacccgtgccaaagagtacaagagcctacccgaagtgttgagcaaaaatgaaatcaagcgcatccttgcacaaatttccaacatcaagcatcactgcatgatttcgttggtttactccgcaggacttagaagaagcgaattgcttaacctgaccccgcaggacatcaacagtgaaacaatgtcggttcgcattatgggcaaggggaagaaatgccgttattcgctcctttcacccaagctgctggaagaactacggcactattttcgggaatatcgtccacaaaaatggttgtttgagggcgaaacacccggagagaaatattcggcaagcgcattggtgaaagtgctgaaagaagcagcacatcgtgcaggtatcaaacatcgtgtacacgtccacatgctgcgccactcctttgccacacacttgctggaacagggaacagacctgcacacgatacaggaattg

SEQ ID NO: 2970 - DNA, 40808 bp, Unknown
  gut microbiota DNA sequence
aatcctttttatacaatatgtcaaagaacacttgattcttactttttacacaacctccccgaaggaggggaagccattcggagaaaaccattcggaaagaaaggaaagaaagggagagaagggaaagaaaccatagaaaccacagaagaaacagaagcaacaaaaaaataattgaacgagattaaatgagaaataaaaagctgcaaggtcaagtaacagcagggcggtggacgctgcctatcgttgtctttatctgtaccctctgttgggtactgacatcctttttactgcccgacctcacagcctcaacagtggaagacagcaccctctccctctggcaatccgcccgcgacttgttacttcccgcatgggccgaacgacttgtcagctatctgatttatgccgttatcggttatagcctgatagagctgaacaaccgtttcggcattatccgtatgcgggcgtccatgcagacagccatatactttctgttggtcactatctgcccggaaatgcacttgctatatgcaggagacattgcagcccttgctttcctgttctccatttatttcctgttcaaaagttatcagcagccgcaggcagcaggctatttattctattccttccttttcatcggagcgggaagcctgcttttcccccaactcaccttcctttcggtaccctggatattcgaagctcaccgttttcaggcactcaagccccgtagtttctgcggtgcgctcttaggctgggtactgccttactggttcttgttcgggcacgccttcttctacaatcaaatggagttattctaccgtccgtttaccgaactggtaactttcggcaagcccttcgacctgcaaattctccaaccttgggaattggcggttctcggctatttacttgtactgttcattgtcagcgccgcccattgcatcatcgcaggatttgaagacaagatacgcacccgtgcctatctgcaatttcttatcgacctgaatatcttcctcttcctgctcatagctttgcagccaacctattgtgccaatctgttgccgttgctcatgataagcagcagcatcctgatcggacattttttcgtactgaccaacagcaagacatcgaacgtgttcttcataatctcgctggtcagtctcatcctcctattcagttttaatatatggacgcttttatagactcaacaatacaactcctcatcgaatggggattaccgggattattcatctcggctttactggccggcagcatcgtgcctttcagttccgaactggtactggtggcactcgtcaaactcggcctgccccctaccgcctgcctgatatccgccgcactcggcaacacggtaggcggaatgacctgttactatatgggacgtctgggcaaaataagctggatagagaaatatttcaaggtaaagaaagaaaaggtagacaaaatggtgaacttcctgcaagggaaaggagcacttatggcatttttcgccttccttccggctatcggtgaagttatctccattgcactgggatttatgcgaagcaatatatggcttacgatagcttccatgtttgccggcaagttgatacgttacatccttctcctgtatgtgctggaaagtgcatggaatgtggtagcaggataaatgtttcattaagtaatcaagcaataagtatcagatagcaagttatacgatgaaaagaataatcgagaagaccgatgacgggagcactaccctgtttgttccggaattgaatgagcattatcattcaacgaaaggggcacgcacggagtcccagcacattttcatcaatatgggactgaaagcctccaccgccaccacccctcacattctggaaataggtttcggaacaggtctgaacgcctggctcaccctcgaagaagcagaaaaaagcgggaggaatgtatactatacaggtctggaactctatcccctggaatggcaactcgtagagcaactggggtatatttccgccaacgaacaactaatgacaggcgacaaccagtgtccggtccacgagttattcaaacagcttcatacctccccgtgggaagaagacgtaccgattacccctcacttcaccctacgaaaagtacaaaaagactttaataagctggaaacagagacagaagggtggaaagcagacgtgatttacttcgacgccttcgcaccggaaaagcagccggagatgtggtcgcaagaactattcaaccgcctttatgttttattaaataacggcggaatcctgacgacttattgtgccaaaggagtcgtcaggcgaatgttgcaggccgcaggattcatcgtggaacgtcttcccggccctccgggaggaaaacgggaaatactgcgggcccggaaacaagaataagaacttaaaaacgaaaacaagaataagtaaaacaagataagtaagaacaacccgaaaatacaacaagtcatgaaaaagcaactaatagatatgaagaccctgcttatcatcggctcctgcctcctactggcagcgtgcaccggacgaacgtcccaaagcggtactgaggaaaagccggtcattaccgtcacactcgaaccgcaacgctatttcacggaagccattgcaggcgacaagttcacggtagtcagcatggtccccaaaggttccagcccggaaacatacgacccggttccgcagcaactcgtatcccttggcgacagcaaagcctacttccgcatcggttacatcggcttcgaacaggcctggatggaccgtctgatgaacaatgcccctcatatccaagtgttcgacacctccaaaggaatagacctgattctgaacgacaacgaacatggcaacggatatcatgaccatgaaggtcacaatcatccaggtcacagtcatgccgtagagccacatatatggaactcgaccgccaacgccctcatccttgccggaaatacgtataaagcgctctgcacccttgataaagccaatgagctttattacaggaaccggtacgactccctctaccaacgcatccagcaaacggacagtctgattcgtcaacaactctccgcaccggacgccgccaaatcctttatgatttaccacccggccctctcctactttgcccgtgactacggactgcaccagatttctatcgaagaaggaggcaaagaaccctctcccgcccacctgaaagagctgatagacctctgcaaagcggaagacgtgcgtgtaatcttcgtccaaccggagtttgacaagcgcaatgcggaaactatcgcgcagcagaccggtaccaaagtagttcctatcaaccccctcagctacgactgggaaacagaaatgctgaatgtagccaaagctctcgccccggccgagacaaaggaacaaacagtcagacagtgatatcagaaaagccaatgacgaagccaattatcgaaataaaaaacctatccgccggatacgacggccgcaatgttctccatgacatcaaccttgccgtctacgaacgggacttcctcggaattatcggtccgaacggaggcgggaagacaacgcttataaagtgcatcctcggtctgctaaagcccaccggaggggaaattagtttcaactgtaagccttctttgggctacctgcctcaatacagcacgatcgaccggaaatttcccatatcagtggaggaagtaatcctttccggactcagcatacagaagtcactgacctcccgtttcacccccgaacaaaaggagaagggcaagcaaattattgcccgcatggggctcgaaggactcgaacaccgtgctatcgggcaattaagcggcggacagttgcaacgcgcgcttctgggacgcgccataatctccgacccttccgtgcttattttggacgaacccagcacgtatatcgacaagcgtttcgaagcacgcctctacgagttgctggcggaaattaataaagaatgtgccattatccttgtcagtcacgacatcggcacggtgctgcaacaggtgaaatctatcgcctgtgtcaacgaaactctggattatcatcccgatacgggggtcaccaccgaatggttggaaaagaactttaactgtcctatcgaactgctcggacacgggacgcttccgcaccgcattctgggtgaacatcatcatcaccactagccgttcgctgtggaggggtggacaggtagatacataatgctgataatctattaatttacgcatgcacctaccacctccccctacgggtactcctccttccagaaggaggagaatatagatagtatcggctttaaagttcctttataaggacggtatcaatggattagagcggcggtattgttagcttgccacggccgtggtaggtattcgtcacgggcgtggagagatccttccacagccatggcaggaagtctccacggctgtggcaatccaatgatagcggtagtgtaatgtaactttccttacttgttttctcatgtttgccggctcttctacttatataatgcggcttcacagcagagttttcattacggttcttcctcacccctatcagggcttttcccaaccgccgcagagacataagatagcgtaaatcatcttcccgttacttaatatttcttactttctacctcattatccttacaaatcactatctttgcgaccgcataacctgtttttaacgaataaactacgatagtgctaatgaaacagtacagaaccgtaaacaacctcatgggttggcttacattcatcattgcggcaacggtttattgcctgacaatagaaccgactgcaagtttctgggattgccccgagtttataactaccggctacaaactggaagtcggtcacccgcccggcgcacctttcttcatgctaatggcgaacctgttcacccagtttgcctccgatgtgaccaccgtggcaaaaatggtgaattatatgagtgccctgatgagcggtgcctgtatcctgttccttttctggagcatcacccacctggttcgcaaactgattatcaccgatgaaaacaatattaccaaaggccagcttgtcaccattatgggtagcggactggtcggtgcactggtttatacattcagtgacacattctggttctcggccgtagaaggcgaagtatacgctttctcctccctgttcaccgccgttgttttctggctgatactgaagtgggaagacgtagccgaccagcctcacagcgaccgttggattatcctcatcgcctacctgaccggtttgagtatcggcgtacacttgctcaacttgctttgtttgcccgctatcgtgctggtttactattataagaaaactccgaatgccaccgcaaaaggttcattgcttgcccttttcggttccatggtgctcgtggcagccgtgctctacggcattgtgccgggtatcgtgaaagtaggcggctggttcgaactgttgtttgtcaacggattgggaatgccgttcaacaccggggtagtggtctatatcatcctgcttgcagcagcgctgatctggggtgtttacgaaagttacacgcaaaagagcaaggcgcgcatggctgtttcctttatcctgacgattgccctgctcggtatcccgttctacggacatggagccagcagtatcctcatcggtatcctcgtaatcggcgtattggctatctatcttgccccgcagatgcaggaaaagatgaaagagaaatggcgtatttcggcgcgcacgctgaacacgacattgctgtgcacgatgatgatcgttatcggctattcgtcttatgcactgatcgttatccgctctaccgccaacacgcccatggaccagaactcaccggaagatatcttcacgctgggcgaatacctcggtcgtgagcaatatggcacacgcccgttgttctacggccctgctttctcctccaaagtggcactcgacgtaaaagacggttattgcattccccgccagtcggaaacaggcagcaagtatgtccgcaaggaaaagacttcgccggacgaaaaagactcttatatcgaactccccggacgtatcgagtatgaatacgcacagaatatgcttttcccgcgtatgtacagttcctcgcacgccccgctctacaagcaatgggttgacatcaagggacatgacgtaccttacgaccaatgtggagaaatggtcatggtgaatatgcctacccaatgggagaacatcaagttcttcttctcctaccagttgaacttcatgtactggcgttacttcatgtggaacttcgccggacgccagaacgacattcagggtagcggagaaatagaacacggcaactggattaccggtattccgttcatcgataacctgctcgtaggcaatcaggaattcctgccgcaggacctcaagaataacaaaggacacaatgtattctactgcctgccgttgctgctcggactgatcgggcttttctggcaagcctaccacagtcagcgtggtatccagcagttctgggtagtattcttcctgttcttcatgacgggtatcgccattgtgctctacctcaaccagacgcctgcacagcctcgtgaacgagattatgcatacgccggttcattctatgcctttgccatctgggtaggtatgggtgtggcaggtgttatccggctattgcgggagtactgcaagatgcaggaacttcctgccgctgctctggcttccgttctctgcctgtttgtccccattcaaatggcaggacagacgtgggacgaccacgaccgtagcggccgcttcgtagcccgcgacttcggccagaactatctgatgaccctgcaggaatcaggaaacccgattatctacaccaacggtgataacgataccttccctctgtggtacaatcaggaaacggaaggcttccgtaccgatgcccgcacttgtaacctgagttacttgcagaccgactggtacatcgaccagatgaagcgtccggcatacgattcgccctctctccctatcacatgggaccgcgtccaatacgtggaaggacagaacgagtatatctctatccgcccggaaatgaagaagctcatcgacaactacttcaagcaggccgaagaactggcagcacagggagacaccaccgtattgtctctcgtccactctatcttcggagagaacccgtatgaactgaaggagattatcaaccgctggatgctcggcaagaacgaccaactgaaggaactgctcaagaaaagcggacagggaatcgaacttcctctgatcccgacggacagtatcgtgatgaaagtggatgcggaagccgtgcgccgttccggcatgaagataccggaagccttgggtgactctatccccgaatatatgactatctcgctgaaagacgccaacggcaacccgaaacgcgcgctttacaagagcgaactgatgatgctcgaaatgctggccaacgccaactgggaacgcccgatctatatggcaataaccgtaggcagcgaaaaccacctcggcatggataaccacttcgttcaggaaggtcttgcctaccgcttcactccgttcgaaacggacaaactgaacagcaaaatcgacagtgaaaagatgtacgacaacctgatgaacaagttcaagttcggcggtatcgacaagccgggaatctacatcgacgagaacgtgatgcgtatgtgctacacacaccgccgcatcttcacgcaactggtgggacaactcatcaaggaaggcaaaaaagacaaggcgcttgccgccctcgactatgccgagaagatgattccatcgtccaacgtaccgtacgactgggccaacggggctttccaaatggcagaagcctactatcagttgggacagacagagaaagcgaacaagattatcgacgaacttgccaacaagtcgctcgaatacatggtctggtacctgagtctgaccgactaccaactctccattgccagcgaaaacttcatgtacaatgcaggattgcttgacgcggaagtacgcctaatggagaaatacaaatcagaagaacttgcaaaacactactccgaacagctcgaccaactatacaacgagtatgtgacgagaatgaaagggaaataaattaagcaataagtaacaagtattaagcgatatcatccatgcggtttacaacgcagcccattgcttattacttgttacttattatttcaaaaaagtacaaactctcatgtttatagaacaaccaccgtggtttttccgggcgttgtatccgcaagccattttccgaatggacccgaacgaacgggccgtctacctgacttttgatgacggacctatccccgaagttactccctgggtactggaactgctggaaaaacacaatattaaagctaccttcttcatggtaggcgacaatataaagaaacacccggacgaataccggatggtggtagaacacggtcaccgcatcggcaaccacactttcaaccacatccgtggattcgaatactccaaccccgactatctggcaaatgcccaaaaagtagatgaaatcatacattccgacctgttccgcccgccacacggccacatgggtttccgacaatactataccctccgctatcattaccggatcatcatgtgggacctcgtgacccgcgattacagtaagcggatgcgcccggaacaggtactcaacaacgtgaaacgttacgcacgcaacggctctatcatcaccttccacgactccctgaaatcatggaacaacgggaatctgcaatatgccctcccccgctctatcgagtttctgaaagcggaaggatatgagtttaaagtgttataacgttacgcgagctatacagaatacgtcatatcagctaaaacatacgttatatcagctataaaaatggaagcactcctccccactgaaataatcaaagccgaagccctgcgcctcggcttttcagcctgtggagcagcgcctgccgaagctgtcagtgaaaaggttgctgatactttccgccaatggcttgcagacggttgccagggggaaatggcttatatgcagaattatgaggacaagcgcctcgacccgcggctcttagtagaaggggcacgcaccgttatcagtgttgccctgaactattatcccgaaacgaagctgccggagaatgaataccagatagcgtggtatgcctacggcaaagattatcacgatgtcatgaaggcaaagctcaagacgttgcttgagtttatccaaagcaactattctgccggcggacgcgccttctgcgacaccgcccccgtactcgaacgctattgggcatggcgtgccggactcggctggatagggaaaaacacccagcttatcattccgcaagcgggttcttgcttctttttgggagaattaattattgacttgcctgccgaccgctatgacagtccgcaggaaaaccgttgcggttcatgtacccgttgcctcaacgcttgtcctacaaaagcgctagaagcgcctttcaggctcaattccgccaaatgtctctcttacctgaccattgaataccgtggagaacttccacccgatacggggcaaaaaatgggcaaaatgatctacggctgcgacgaatgtcaacgtgcctgtccatggaaccgcttcgcgactccttcacggacaatagaattctccccttccgcctccctgctgaccatgcggaaggaagactggcaccgcctctcggaagaacaatacaggacactgttcaagggcagcgcagtgaaaagggccaagtatcagggactcatgcgaaacatccggtccgcgaaaaagtaagtgaccgaagttctgaaaacacgccgcacggtctgaataagcaaaatttagcaaccatattgttctcccgcctcattatttttcataaatttgcagcggactcttccgcagaaagccttcgggtggttagtggggagagctgtttatatagagaagacgtttacaagcgtttgtctttcgtgtttcaaaacttcgcagtttttttcatatcaccagaaagatgaatagcaacaaagacgtcctcctgatgtgtatttatatacatccgtgcctctctttgccgaaacaaagggaggttacgggtgttgtacatatcggcgtgggctttctgcgttgttcgttcttgatgatatggcattgcgaaggccttgaaacacggaacggacgaaggtgagattcccacgcctcttttatatattctcgccggtattacaataatccgttcctccaacgggaatccgggggacgcacacttgcagaatgacatgattcatgcgggacaacttatcgaacgcacgcttcacgaacaaggacgtactgttacctggttcgccagtcagctatgctgcacacgtcccaacgtctacaagatcttccggaaagagaatatcgacatccacctgctctggcgcatctcctgcatcctcaaccacgacttcttccacgatttatccgacagcatcagtacgggcagctcctccggtgtatccaaataggatacaattccgtatcctccttggaactatgttttctcctgctggtatagtcctttcgcatacctttgcaagcatattaacatataatcacaaagggatatgaaaacgaaaaaactgattttagttattttcctcacctttatcggtgcaatcggagcgtacgcacagaaaacaaatgtaagaatgcaggaaacacaggcacgtctgctggatgtcacctcaaacgcttatgtaaagccgctaaccgtggagttgcagatagacaaatcgaaaggacgcatcaaagacgaatggacgctcaccagagaacaagccgaacaagagatgaatggcgacctggtcaacatccgcagctatgcaatctatatgtcttcgcaaaaacataatgcagacgtgatagtggcagccacattcaacgtcaaaaccaatgacgacgggaacgggtataaagtgaccgtcatcggctatccggccacctttatcaactggaagacggcagaagcctcggactacgaatggatccgcatggaaaaaactctcacaacagccgacaaagacaagatagccgccgtcatcaaataacaaccgttatcaaataaacagacaacaagtattaataatcaaatagaatttcaacatgaaaaaactattatcattggcagccgcattcttactgtgtgcaggcgtgcaagcacagattgtatcatccagaagtgtcagcatcaaatccgctcagaaacagccttctgaaacacaatggttcctgcgtggcggattgaatgtcatgaaaatgaccggagacggagcggaagacaccggcagcaaactcggttacaactttgtttacggtttccagaagccattagggagtgtaggtacgtactggggaatggagttcggactcggttcccgcggctggaaggtcgaagaaaacgaaagcgactacgaatacagcctaagcttaatggctcacaacgtacaggtttctccgtttactttcggatataaatacaacattacggatgctctggcagtcgacgcacatctcggcgcttacgtaagttgcgactatgtaggtaagattaaagaaaaagaatcctatcagggagacagtgaagaaacaagcgtcaacatgggcgactgggaagactggaagcgggtggatgcaggcatgaatatcggtgtcggtatatggtacgaccgtttcaacctggatttcacttatcagcgcggctttatcaaaacatgggagtgtaacaccagcaatgtcctgattcgtctgggtgtagctttctaagtgaagtacaatcaaacctcaattacacatatatccagcgttcacgtctttctctctcaacagggagaaggggtgaatgctgtttttcttaaaaacaacggagtatgatgaccaaacaacgattccttgcaataatctatctactgatagggataatactgcccgccatggcgcagacgtttacggaacagaagaaaacttatcctgtcagtgccgacggcagcaaatacgtagtcagcgggtttacttctttcagcccggcaagcgatgagcatatctacgccaacgcgctattgtggacggtggagaacgtctgtccgaagctacgtgaaggaataacggaagccaacgtaccggccaaaagtttcagttgcgacctggtactcgcctcgcaagcagattcaaagcagaacaacacctattattgcaaagccattttccgggtagcggaaggcaagctggtctactatctctctgatgtcctgatagaatcgtcggtacttgtaatgaagaaagtcaccgccatggagaaactgcaaccggagaagaaagcgtcgcacaaggagataatggatgatttcgtacaggtggaatcgcaaatgctcaaccggatgttcgacttcatcgccacacatcaactttcaccgatcacccattggaacgagatcagtatcggtaaaccggtgaaaggtatgaccgaggatgaatgccgcctggctttcggcaaaccgcaaacggttctggaatcaaacggagaagtgcagtggatgtactccagctccttttatgttttcttcaagaacggacgtgtggaaacaattatcaaataagtttagaaacatatagataatctataagaaaaagaagcatcaattgaatattcactacgtacgcctatatacaaaaaagaatagctgctttatcacaagacagctattctacataattaatgtaagctaaatcatctttcaaagaatttatgatccgacttactctaagctcgcttgcttacatatattcaaaacatgttatttattctagtatctttcatgtcgctgtatctttagtatcaagtcattctacattccagcatataacttgtttcattggtgttccattacaatatcaaccgcatacccgtaactttttccagcaaactggcctccgttttcccatttcttatcaaaaatgccatacataaatccgtctactttatgatctttccatgttccatcatctttaaactcaaagaatggtaatcctgcttttgtaaactgcaaatcagcaacatacgtgatatttcctccccaagttaatacattagccgctttatcatacgcacagagataaatgtaattaggagagataaatcccaaatactgattatcaaagttgataaccagccgtccgtcagtcaatacagctttaaaaggtacaccattattgagcggaacatcttttgctatcaaatcatacactcccttctcatctgttgccgtaaaggtacaactacccgtataacgttttccgtcattacgggtatgcatcatagtatatgtaccggacaatcctcgctgaacacaagtcgccgaccattcatttttcccactctgaacggtcaacgtcccttcccgataatccgtaccgtccaacataggagaaaccaccacatgaagctgatcgcctttcaattcataagtcagccattcggcagtagattgaatactatattcgcgccgggtatgcaaagtgaaaacagcttcacccccttgcataaaaaaatcctttgtaccttctacatcacaaataaaagtatcgcccaactgggtaacgggaacttgcaatatatcttccccggattgtatgaccaccattgtggtacgactggatatagaaagattagcctcaacaaccaaactgacttcctgatcggacacactggctaccttacaccaagcgacatccgaggtggcacttacctgtttaccgcctgacagttcaatagttcctgtgccaccatccgcagaaaacttaacatccgaccttatcgcctttaatgctacatccgccgtatccttatcatcactacaaccaacagccgacaagcatagcacacaaagtaatatagaatatatttttctcatagtcattcctttttttattcatgtttaacaagagtgataaatgcaaaacgagattcggcataagccttatattcacccgccttgctccacagaatcataccgcgagttacaaaatcagctttccttccgtcgtctacaaactcatattcgttgtcagaaccttctttcagtttgccgtacataccattcacaaaatcagttcctccatacgtcaggcttccgggattcaccatccaaatgctcaaataagcttcactaccgtccgtcaacttctgattcaggagctccatacgccgttctgccttattataaatcattgtcagatcaatcggcaacatacctttaattgtataacttttcatatcctctttcttcactaactcgatttccagagacaatacaggagtattctcaccacgtcggtaattcatcgtatacttgcccaaatattgtgcgtaaatgatatattccggatcataatccactttcaacacaacatccggagcattttcagctaccagtgtttcatttgcagccgaccaagtaaagcggtgcagctctttaccaccaacttccaccggaagataaaactgtattcctgttgccgtcggcatgaaagaagtagacgtttcctgtccgtcatataccacattaaatgtatgggaatccgtataaagcagagccagttctttcccattcatcatgccactgaaccccaataccccttccaaacggttcatttcttcatccactcggatagcagcagccagataaggtgtagcatcttccgccagacgggtcatacgaattatatttttcgttttcttccctcgaaggacaatctcattctcagtatgcgagcgcaaaagaaattcataatcaccctcatatcctttgcccgttcctgctcctccggatatatccgaatcagagaaataatggaacaagctattataagtgtcaaagttaagggtcggtccgatatccttcttaatagaaaaaaggctctcttccgtttcctccggtttcccaaaagcgtcagtagaaatagtcactttatccccttctttaaacttcataatgtaattgaaaccaccatatatctgcgaagaatgcggataatactccattaaccacccgtgctcggaacttaccagcaaatcatgatattcttgaacggcttcttctacccgctgggcaacaggtttatcgtatacatcatctacatcctgcacacacgaaaagcagacagtggcaaatgccagtaaagtataaatcagttttttcatattctcagcgtttgttttaataaatatgatccaaatccagttcactaatctcattagtacgacgtgcaatcactttgcgaagcagatcaaggtccacttgccaggaatctttcatatacttcttcaccattgccagcttttggtcaatgatcggtttacctttttctccagccagagtcataacattttcccactgtgcttccggataagtcaggaaacaggctgtcacttcagcaatatcctcactcggtttactaccggcatacggtgtgacaaatcccaaaggagcgacctctgccaatttacggttctgccaaccggtaggtgtataattacctgcactaatcttatcataatctaccggataattttttttctgatgcagaatgtgggcaaactcatgatgcatcaccttgaagtaatattcattcatgcggtcaacattcgtcaaatccagccagttacccatatacaaagtcactttcagtccgccttcggcagttcccagtgtatacgtccccttatcccacgaagcagaacctataagatgaataactttcggagcacaagcacgtgtaaaatcaagacctcccacttcatcataggcctccagccagcaatgtttcactatcttcgccaatttcacactcaaccaaaagtccgtaggtacaagattgtgcgtataatcggattcaatatgttccattctgtatttaaagtcgatgttatagggattgacgtagttttcgagtaaccagcggtcaaactcactcttttctttctctgatgcatcaaaaatactctggtcttccaagtcatcgtcctggcaggcgaagaagttgctgctcaccagaatacaaagcaaatatatataccaatttttcataatcaattctttattatctaacattaaactatcttggattaggctgcataccagcctctacgacagacgccggaatttgaacagctttacggaggtcgtgagctttcagcacaataggagattcgttctctatattatgggaaatctcaataccgaaacgcttaatatcctgccacctttccccttcgtgcaccgtctcaatacgacgggcatgaatgactgctttcagcaaatttgtctgtaatcctgcttccagagcaaacttgggatcaagtggtttaccgttagtcgtaggatctactgtctcataaaaaagattcagttcatctttgtcgggtactttagtagccgccttaatacgataccaatactgtaaatcgttcactgccttatcatattgcttagagagcacataagcctcagcacgattcaacaatgtcttatcagtggtaaaagcaaacgcaacctgacgtccataataactacctgtaatggcattggcaatctctttaaactggtccattttaggaacaaaaatagactggtcaccatatcccaagactgtttcatatactttcaaactaccataaggccccttcgaccagatagtctgtttctcacaaatctcacggctatgaccgtagcgataagccgatttatagttactcccccaccatgacatcgtttgctgtaacatcagattagccggttcgtcgctactaatgtatgccagcgtatattccatagaactgggaaattgagcatatcctcccatatttctcaacacagatgacgggtcctcaccaatagcctccgtagcataacgaatcgccttgtcgaacttattataaaacaaattgaattgtgcggcaaaagcataggctgcattctgattgaagtgatataagggaatatcataggcctcggaactaatcagcggtaatccttcttcaatatctttatcaatcatggcatacgtctctgccaatgtaccacgctcatattgtacaccgacatttgtttcgggagcagtgatatagggtattcccagattagtatctgcatcatccccataagccatacagaatattttggctaaagcaaaatgcccataggcacgacacatcagcgcttcccccttataaggctgcgcctcctccggatctcccagttcttcaatcgcctgcaatgcctggttagcagcagcaatcgcactataacatccattccataaataccttggcgtatcttgattgatatcggtcatttcttcccaatagtaaccctgcatcagtatattggaaggaaaaccatatttttctccattgtccatacggttgtccgacataaattcttccatttgtatggatgaagctgtagaataggcagacatcagcaaatctttcacttttctcacagagttcaattccgtacgctgatcgggcatggtatccagataactttcacatgaagtaatcatgcacgtcaatgcgagtgccagcaataatattattttatttcttgttttcatacgctttcaactatttaaaatccaactttcaatgtcaaagtaaactgcttgggcacaggtgccgacacaccaccggaacggaagaattcggggtcctgcccattcaatttcgagtctgcataaagtagggcaaggttcgtaccctgtattttcaatccgacactactgataggggtagacttcagccattctttcggaaaatcataagaaagagaaacctctttcaagcggacgaaagcaccactggcaatgcgtgcagtagaatagttatacgagttgtaggcaatactcaggttcgcatattgattgcgttcaaaagaactggccattacagggatgtccgtcaccttttcatcacccggcaacacccaacggttcttgaaatctttcggagtggcatccaagtcactatacgacgaacggaacatcgggtccaagcggactttgttaccaccggagtaagtgacaaatacatttaagcggaaattcttataggtaaagatattaccaatacttcctgttatagtcggatcggtaggaccttcatatttaaggaaatccacatctgtcgattgttgcaggttcagactgccatagtttgctttcgttacggtttttccgttaaaactgaatatcggaaaaccatccgaatccaatccttcgaacggaatagaaaacaaaccgcgcaccggataaccttcacgggcaaacccaacgccggagatcaagtcgaatacacgcgaacgtgacttgaaatcggttacttccgtcttattatatccgaatatgaaatcggtagaccattggaagttacgactttcgatattgcgggtagagagagtaaattcaaagccatgggacttcatagaagctacgtttgccatacgttctaccgatccaccgacaccttgagttgtaattgcaccgatcaaatcataattatcacgtttgtaccacgcagcttcaagattgatacggttgtcaagaaatcccatatccaaaccgatattcatctcatgcttcttttcgtaggtcaaatcactgttttcaagatctacaatctgtaatcccgattcagaaacacctgccgacggacgccaaggggtatagctgttaataataatcttggagtttgacacattactcggacctacatcagccgtcaaactatacgaggctttcaatgtaaaatgagataaagcaggttctagtttcttgaaaaactcctcttcatgcatattccatgcaccggcaatattccaagtaggcaaccagcgggcagagcgtgactttcccaaacggttggagccttcataacgacctgtgcctgtaatgatataccgtcccttatatgagtaagtggcagttccgaagaaagctacgttacgtttcttggtattagtaaggtcataatagtttgtattaccctcgcgcagtttcttgaaagcaaggtaatcaaagaaaggaatttcaccgttttcatactgcatcccccagccgtcaaagctatttgccgtacgattttgagcattcgattccatacctgcataaacgttgacaatatgcgtatcattaaacacatcattatatgaagcagcagcacggaagtcatagctcagcatcttatattgcgctgtattataaaaacctcccttaggcaagatagacaccggaagtgcataaggatcatccggatctttatacagccatgagttacggttgataatcgtaccatctcccatagcccggtatgccaatgcctggtttgagttttcgcgtattttgtgctcttgtgatgtggcggaatacttcaaggcgcctaaagcgctcagttccagtttgcggaaaagtttccatttcaattccgcctgaaacttcaaatcaataacgtccaaagagatattgttggcattcagttcgttgaaaatattaaaatcagaatagttacgcatataatactcgttcggatcaagggttctggaagtgttcagagcataactataaggattgatatcaaatccacggctcactgtgccggaagctgcatcagaactctgtcccaatgttcccggagctttctgctgacgataagaagcattggcaatcacattgagcgacaagtctttgactatcttataactattattcaaattagccgtgtatcgttgcaccttattttgcaacatccagccgggatcgaccatggcacttactgagacataagaagtggatttctccgtaccggtagcataactgacggagtgattcatcataatggcattactgaaaagcaagtcgaaccaatcggtatttctatattcggcttcgcgcagataagcattctgagcttcaggagtttgagcaagaccatacattccgttggttttgtcataccagttattcaactgatacattttcccatacacaccactattggaagcacgatacacgctggcaaagttcaaatcacctttatcacgcatttctttataaattcccatttggtcttgagaattcatcaggttaaagttacggtaagacggcttcatccgcatagtaaactcacccgtgtaactcaacctacttgtacctgccttaccctgcttagtagtaacaacaatcacacccgacattgcacgtgctccgtaaatagaagttgccgaaccatctttcaatatttgaaaactctcaatgtcatctgcattcaaccccgcaatagccgaactaatcaaagtaaccgcatctcccgaagataattgatcggcactgacttctacgacatcgtccataataacgccatctactacccacaatggtttggaattaccataaattgacgtggcaccacgaaccctgattttaggagctgtaccaaaggtaccggatacgttttgaacagatacgccggcagaccggccttccagtccacggctaatatcaggcagaccatccagctttacacttgccgctgtcaaacgatcggccgcaccagtaaaaagacgcttgtctacttttgtcatacctgtaaccacgacttcgtccagtacttcggcatccggctgcataacgattttcatcgtccccggtttaatggatacttcttgcgctttcatcccgatgtagctgattttcaaagttctagcagaacttggtacattgctgatcgtgaactttccgtctacattggtagtagttccgatagctgtgccctttactagtacggatgcccctacaacaggctgattgtcttcttctgaaatgacaacccctgtgattgttttaggtgtttgggcaatcgccagaccgattcctgctaataagcaggccaataacaacacaaatctttttttcatacgctcactagatatttggttaatataatagttgtctatttgcttgtatgctttttgcaaaaataagcacattttattaaaaacaaaacaaaacaatgaaaaatatatcaatttgtttgcaagttaatttgaaagaactctagcgaattcaattctcatgaatccacgtatattatgtgcttattaacattttgttattattaataaggtatatgattattctaagtacccataaaaccgaaatatcttctaaaagaacaagtttaattatatcgaaaatttgcacttattattttagggaatttaagaccggacaatttgtgatgagagtaaatcgtgatgaaaaacatctacataatttctgaaatacctttcctcaaatataaaaataaccagttaaaggtggcgtattacttaatgataataaaatagacatattgctgttattatgcaatatgattacaattatgagtaacatatatattctcgtaagcgttcgatatggagaagtatttttaattccttgcatttttattctgtatcctgtacttataccaaaatatttgcaaacagaaggaagcaaaataacattttgacagttatgctttaagttattttattgacaattattcccgaaattgtaaaatacagatgctgcaatattaagttctgctagaactaaatcaatcggttatcccctttcataacaaatatacactaaacgttcctctccggattccttcttacgcggcagattatttctactaaaaaaaacaatgggaattcccatatagttacaggaatccccacttttcagctattttcagttcttaaacttgctactaatatgctaccgtcagcggagcacgtaatttctgagcatattcggccacgtatttattccaaacatccacagttttgatagcccccttattccaggcagaaccccagtaataagtatattcagaacccggttcgtattcgctgatagccaacacatgaccgtcggctccgccacgctccttcttttccttttcagaaagaagcaccactttagcctccttcacctgtgcagggaaagcagcaccgatgaatatcttgccgtttcctcccttgcggtcggtggtaggatctacataagtaatatagccattcgccgcatcggctgcaacaacgccgtccggctcacggagaacgattccggtggttacaggcattgcctctttcaggtttgtataagagattacggctttattgaggtacgaacccgcatccagagtaatcacacgcgtctctatcacattagaatcaccgcggactaccaacggattaaattccagtttcaccgtgaaacgcaacggaccattatcaaggatttcctgcgtgcgataacagtatggatagatgatcgtgtcgccctgcatcaaagcagccgtaccgcaacccagcgtaggacctacggcataacagtccattccataaccgtgatcgatatgataggaaatggctctttgcagttcagaagccgctttaggatctgtttttctcagttcagctatcttggcacgcttttccttattgagttcttcagcgtacataccttcaagaactggctgtgtggtattgtacttcgtaaagaggtcataaccaaagccacgttcacctcttgcctgcaatgcaggaccataagcacggtaaccgcccaggtcattctcccatgcaacgtcgtccagacgttcggaataatatttgccgcaggcaattacgttgaaaggttccggagtgcccggttggatagtataagtggctgtaccattcgctttcaccgtaaccgggaaaacaaccttctcatcatacgtcacctgatacggaacttgctgtccgtctatgtcaagcactacaatttgcgctgtatcggccagcttcaacttggcaacgacatcgctcatcggcacttcaatcatctctcccgcacgctctaaacccagcggattggtcacggtcaccgtcataacctgcttgctttcgacgcaggaagcaaagccgataaaagcaacggcaaacagaataaatatctttttcatgattgattcttattaaataaaaaataaggtgacagatgaaaagagtatgctcttttgccattctatcaccttaccggatataatttatcttacattatttcggttgttttccgatgtaagcaaggataccaccgtctacgtaaagaacatgtccgttgacagcgttagaagcttctgatgcaaggaatacagcaggaccggtcaattcttccggatccagccaacggccggccggagtcttggcgcagatgaatgaatcgaacgggtggcggcttccatctgcctgcggttcacgaagaggagcagtttgcggagtagcgatgtaacccgggccgatgccattacactggatgttgtattcgccatattcagagcagatattgcgagtcagcatcttcagaccacccttagcggcagcataagcagaaacagtttcacgacccagctcagacatcatagaacagatgttgataatcttaccggcacgcttttccatcatagcaggcaaaacagccttggaaacgataaacggagcattcaagtcgatgtcgattactttacggaaatcagcagcttccatttcgtgcataggaacacggcggataatacctgcgttatttacaaggatgtcaattgtacctacttcttttgcgatagtagcaaccatagcctgaacagccggttcgtctgttacgtcgcatacataaccatgagccttaattccctttgcagcgtatgcagccatacctttgtctaccaactcctgattgatgtcgttaaaacaaacagtagcaccttgttctgcaaaagcagatgcgatagcaaaaccgataccgtaagaagcacctgtaacgagagctactttacctttcaaagaaaaattcaaatactgattcataatttttttgttgttaaattaaggaaactattgtagttgtttattatttcaagtctgtaatcaatgagaagtcctgatcgccgtaatcaaggttctctccgcccataccccagatgaaagtataattgtgggtagccgcagccgaatggatagaccattcgggagagagcaccgcctgatcgcctttcatccagatgtggcgtgtctcgcctacttcacccatgaaatgacagatagcgtgttcttcgggaatttcgaaatagaaataagcctccatacgacggctgtgcacgtgggccggcatcgtgttccatacgctgcccggagcaagctcggtcatacccatttggagctggcaggtaggcaatacctggttcaccaacatcttattgatattacgatggttggagccttccaaagagcccatttcagccactaccgcatcggctttcgtcactttgcggtcgggatagttgcgatgtgcagtcagtgaattgaaatagaatttagcgggatgagaagcgtctttgctttcaaaggtcacttcacggtcgcccgaacccagataaagagcctctttataatcaagttcgaatacagcgtcgcctgccttcacgataccggggccgcctacgttgtaaatacccatttcacgacgggtcaggaagaacggagctttcagcggatcgattgcttcaagcgtcaatacctcccctaccggaaacgcaccgcctaccaccatacggtcgtacatggaatataccatattcacttcattggggacaaatatcttttcgattaagaaatctctgcggattcttgtagtatcatagttttttgcatcttcgggatgcgcagcatagcgaatttcatagttcgttttcataccttatttatttatagttattgaataagctctctttctcaaatgtacatcgtttacgtacacgatgcaaaaatagtaaaagaaaacgggttaacattacaattttgttccaattatccatcaaaaatgtccagatttgacgcaatgtacatctttttaacgaactataatacgatttgaggtagttttttacctaacgggaaaaacagagccactcctactctcataaaaacatcctcttttagcaataaatactcccggctattgactttcgcctttttattttgtatctttgagaaacagtaaagaaagaaatagcacatgaaacgtacagaaataaagacataatcagtccaccacagcatatatttccatatatgcacaaacttctaatgggagaaagtcagtcatgattttctcccattttgtttaaatacttcgattcttatcgccaaagaagccgaaaaacgtttttaataaacttggataccgtttataataaactctccaattagttattaaaaacgctctctccgtttattataatgttgtaaggatattattgcagcagaaagtcaccttatccatagacaaacaggacaatagcagataatagttaatattctatacaagaaatagcagtacaccaaacagataacagcagagtcgacctgcataaaagaaaaaccccgaaagattactctttcggggcttctctgttggactaccaagattcgaacttggacaaacagaaccaaaacctgttgtgctaccattacaccatagtccaaacttatgtactttctgttaaaaagcggtgcaaagatagaggtttgcaagcaaacctccaaatatttcgttcacttttttactttgccacctcgcaaatcgcgtattattacttcgcaatcagcaaataatagttctttttaccacgctgaacaagcagatatttctcgtcgagcaggtcagcagctgtaattacctggtcaaatgccgctaatttctctttattcagcgaaacgcctccgccttgaaccagcttacgcatttctccttttgaagcaaatacagccgcattatcaacgaatagatcaaccgccttcacacctcccgtcaacgcgtcacgagaaatctcgaattgaggcacaccttcgaatacagccagcaaagtatcttcgtccaacttgcgcaaagcttcggaagtagcattgccgaacaggatattcgatgcatctaccgctgcattataatcatcttcagagtgaaccattacagtcacttccttagccagacgtttctgaagaatacgcaaatgcggagcagcctgatgttctgcaattaatgcctcgatttcttctttttcgatcgaagtgaagatcttgatatagcgttcggcgtcggagtcacttacgttcagccagaactggtagaatttgtagggagaagtataacggggatccagccagatatttccggattcggttttaccgaacttaccaccgtcggcttttgtaatcaacggacaagtcagcgcaaacacctcacctccgttggtacggcgaatcaattctgcaccggtagtaatatttccccattgatcggaaccgcccatttggagcttacagccttttgtctcatacaaatgaagaaaatcgtagccttgaagcagctgataagtgaactcggtaaatgaaagtccgtcacgtgcttcgccattcagacgacgctttactgagtctttagccatcatatagttcacagtgatgtgtttacctacttcgcgaacaaaatccaggaaggtaaagtctttcatccaatcatagttgttcaccaactcagcacgattaggtacatccgactcgaagtcgaggaacttggccagttgattcttaatgcatgcctgattgtgacgcagtgtttcttcatccagcaggttacgttctgccgatttgcctgaagggtcaccaatcatgcccgtagcgccaccgatcaaagctaacggcttgtgaccgcagcgttggaaatgacgaagaatcatcactccacaaaggtgaccaatgtgtagcgaatcggcagtcgggtcgatacccaaataggcagtcacctgctctttgattaacaactcttccgttcccggcatgatgtcctgcaacatgccacgccatctcaattcttctacaaaattcatcgtattactcttttattattagttttttattgtatttcaatcccgtgaggggcaaaagtacgactctttctcggaagatacaactcttacgccctaaaaaagatgtcttgaatatttttacggacaatagcctgcaacgtttctacttccacaccacgtactttcgccgcatcacgcaacacatcttcaatatctaccggactgtcatccgtttccaaaaacaagcggctatcaggcactacattcatcgcctcactggagtaatgcattccgaaagaaagatagaatcctttctgtaacaattgttttgcctgctcaggctttccacggaatccatgccatatccacggctgtttcggtgcacgttcctttctcaaggcaagcagttcgtccatagccttcacacagtgaataatcaacggcaattcatacttttccgacaattccacctgttctttaaacacagctacttgaagctgcatcggagcagcagccagcttatccagtccggcctcacccacggccaccaactgtttttctgcaagttgctcccgaagacattccaatcgacgctccgtatcaaactccgtcaaatcccaagggtgaataccggcagaatagaaatatccttcgcacaaagcatctgtcgccaacttacggttaataatcgccttcccggcagaaaccggttctgctttatgggtatgaatatccagaatattatttgtattcctttccattttccacattttggagtttaaggtacaggatcatagccggaaccaccccaagggtgacaccgtaagatacgcctcacagccagataaaaacccttaataggaccatgtttctttattgcttcgaccgcgtatgccgagcaagtcggcgtgaaccggcaggagggaggagtaagtggggatatgcaaatccgataaaaatagataggaagcaggagcaggaatgagaacaccctcctcaaaaatcctttgacggacatccggacgccagacatccgggagctatgggctttcataaggatagtttttcggagatacgcgaaagcgctattttcattttttcttccagctcggcagtagcagtaagctcgtccgacagatagataaaggcaatagccaaacgcttttcccggcgttgcaactcgtctaccaacagatatttattcttccggtaggcttcgcgtatctgccgtttcacccggttgcgcttcaccgccctcttgaagcggcgtttcgatacactgatcaatatggaagccggagcctcgccttgttcgacaggcatatatacaacgcgtatcggaaagatggaaaacgacttcgaaacaccgccttcaaacatctttccgatcagaattttactattcagcctttcggctttgcacaaagtatatatacccactctgtttatttattgttttccttgataaacatgtcaagtgcggcagtcatagacggagcttgcaccgtaggggcttcgagatccagacggagtcctgcatcgcgtacagcctgtgcggtagtagaaccgaacgtaccgatcttgatttctttctggtcaaaatcagggaagttcttcttcaaagaagttactccggcagggctaaagaacaccaacatgtcataatcgaattcttcgtcgggtgtaaagtcattgcttaccgtgcgatacatcacagcttcggtatgctgtatgccgttcttgtcaagcagtgtttttacgtcgtcattatgtacgtccgacattgggacaaggtatttctctgttttatgctttacgatagaaggcacgaggtcctcaatctttcccgttgcaccaaagaagattttacgcttacggtactgcacatatttttgaatatacaatgcaactgcttccgtcacacagaaatacttcatagtttccggaattgcaacacgcaattcagtacacaaattaaagaaatggtcgatagcatgacgagaagtgaatataacggcagtgtggtcgagaatcgaaattttctgttgccgaaattctttcgccgaaagactttcaaccttgataaacggccggaaatctatttttacgccatacttctctgcaatgtcgtaatagggagatttctctgacgcaggcttaggctgcgacactagtacttttttaattttcaacgtcctaaaattttattagcaatatattgttaatttgaatcataccttgatagagtagcagacaaggtagtatttcaagagcgcaaaagtacaaaattaataggaaaagtgcgccaaattgatgaaaaaaaagctttatccacttataaaacatcaatattttagcaaaaattagaattatggttccaattatgagcaaattggtgagactcaggtcgaaataaactaaaaagagtacgaacggaaaaagggcaaatcctgcataatatatgagcgtagaataagattccagccatatatttgtcctgtttttatcaaagaatgtccaacctataaacatataaagcaaccatttcagtaagaagtaagcaagacaggaacccacataaatccccaaaagcagaagaggggacacggagttcatcaaagcaggggatgtatcatgaaaatagttgaagaaagtaatccccgacaatacgcacgtctgcactacaagcacaagaagataacgcatgtcagccgctgtagaactatcaaaaatacttgtccgttcacgatgcagcacaaagtcttttacttgctgggaaagaaatttctttccgcgtgccaaagctatggaagaaaggaagaaacaagccagcaaggttagcgctatggcatcatctgtacggggagaataggggataggagttccctcgaagccggaaatgacttcctgcgcagaatggatctgtgccaattgcaagctatcactatccgcctttattgtcgattgcggtgaaccaccgagctgcccttgttggaaaagcgacagagtatccgtagtgcgctggaagctgagagtgtcaatcgtcatatagctgcaaatttacgaatggagatatcccatacaggcgttgaataaagcagttccacagcttcctccggcgtttgcgccactttccatatatcaccgtgctggcggcgcataaagttttcgtcgattgctttttcaagcatttcgagtaacggatcaaagaacccgtttacattcagaatcacaatcggattgagatagagtcccagttgtttccaggtgataatttcaagcaattcttccaacgttccgcagccacccggcaaagctatcaccgcatcactcaaatctgccattttctgtttgcgttcgtgcatggattccacttcaaccagctccgtcaagcctgtatggtgccagttctgctctaccataaaatgaggaataacaccagtcacctcaccaccattcgccaacaccgcatcggccacagaacgcatcaggccaatactgccggcaccattaatcaaacggatatgatgatcggcaagcagtcgcccgagagtctcggctgcggtaaagtaaacaggatctattttagtgctggaagcgctatatacgcatacggaatttatctggttcatcagtttctccatgattttattatatcatgggcacaaaattacgaaaaaatttggtatttgtccactacctccggaagcaatcttgggcttcttactcggaagcccaagagcctttctcacagagaatacatctattatcaggtatttcacctgtacagatataccgcaattgttgctgaatgagcctatcgttcgaatcaccagactactcgaacaccctaccagtctccagaccaacaattaagagtgattttaatattgcatcctgcaatataacaaacatttattgcacacctttcacaagggttatcaagtcccccaatcagaattagccgattctttcccctgtcaaccggtatccgatcgtcattttaacaatgcactatattatagtggggcttttgtatagttaattatttaggttaatcctctagttacagatgattctaaggtttcaattttccagttcaaattctccggaaaatactttcgtaggaagctgtatttccaaggtatatttacctttttgctcaccggtaagatcaatattaactttgtctacattccattcggtagatgaataaacaactttgccttctgcatctttcacaacaactgttgcagtagggacagtagaaagtaagtcaatagtaactaatacgtcctcaataaaagcagcaggcgtaataggaatagaacgatgctgtgccggagtcttagttcttaattcaatttgacgtgcagatttcatctcccgtgcaaaagaggatgtatttacctgaagcaaaatagttaataatagaagaagtaaaaatttagttttcataataatgtgggtttaaaatttcgcctcaaatgtacacagatagagtaaaagaaacgatttttatgcggtaacaatggtaacagacttctgtctatatagaaaataagtaataacattcttagcatatcttacagattatcaatattaaacacctgctcaaatagatatgtacccattttatttttaatacgatttttacgtgtcttaagagcatctgatgtagtattcatcagctccattattacagtctttgaacaatgaagtgaggaaagaatgcaataaaacaaatcatcattggtcaaagacggacagcattctttcaagttcaccatcacgtcaacaaatgcttcacaaatagcaatacgcatatcaactctcaaaccacgcatagctaacagttgtttaggagtcgatttctcgaatgtttctaatttattataacaatcagtggattgaaacatagatatacacaattttaattgttgttctctcaactttgacattttatgttctttattagatgcagaagattcttctttaagtagcatagtatctacacgtttctgagtgagttcttgctgcaaagcgatataacgtttctttctccttctatcattccacatgaaacaaaagacacatattattgtcaaagaaagaaaaacagagactaaacttataaccaacgttttagtacgctgtgataatatccttttatgttcttctatttgatgtttatccatcagccgctttagttcttcattgtctgttaacacctgaattgaatcataaagagttttataggcatccatattttccattgcagttcgccattcctctcgtttctttgctacttgatacattccgtcataacaaacagcttttccataaatatcaaacaaatctatatctttactaaaatagtagctggcagaatcaagttcgttcagattaaacataatttttgctttcaacaaacaagcattagccgacctatcctgccccaatgctataatagcttttgatatatatttatcggcttgaatgtaatcttcttcttcataatagaccatagctaaatcatgataaagtggtccgatcaagttggaatcttgtacaaccaacgcataatcaagagctttttgataatagcataatgcactatctctgtcactctgagaaaaatatacgtttgcaattcctcgcagtggatacgcctgttcacttcctcctttcaatatctgataagctttacgataagcctccattgctacatcatccaaatcttcttcctcatagcattccgccaaattatcatatatcattgccaagaactcattttgttcaggcattagtcgaatcgctttcaaatattcttctaccgcaaaggaggtacgtcccatatcccgataagtggcgccccaataataatgagcctgtgcagcgcgtaaactcttatctctgtcaccataataatcgacagccgtctttatcagcgaatcatcatctaaaggtacataattcttatgccgtgcctgtgtaagcaacaatgcataaagcgctctatcagcacgtgacagcttctgtggtgaggaaattgactccaaaatagataacgcactatcaggacttacctccattaacgagtcggcacagagcagtaacggattcttcacagaagaagaacaagaggatagagaaacagatagtaaaatactacccataccgataaacaaaaaggcgaatagtggaaagtaatatataaaatagtcgtatttctttttcatctcacggcttgttttacttcttaatggaacaaaggtagtgatttctagtagaaataaagagccgcaatcccaaattccataaaacggaagtgagattacggctcttatcgtataaaccctctttcagactagcttacagaccgaaagctgctttaatcttatcaacgtagtcgagtttctcccatgtaaagagttccacttccactgttttgtcaccttcataacgagaagaaaacttcttcgttaccacttgtggttcgcgtcccatgtgaccataagctgccgtttcctgataaatcgggttacgaagtttcagacgttcctcgattgctttcggacgaagatcgaacaactggtcgataacgcgtgcaatctcgccatcagtcatgttcacatgagaacggccgtaagtatccacaaaaatattaatcggacgagccacaccgatagcataacttacctgtacaagcatttcgtctgccacacctgctgcaaccatattcttagcgatatgacgagctgcataagctgcgctacggtccaccttactagggtcttttccggagaaagcgccaccaccgtgagcacctttaccgccgtaggtatcaacgataatcttacgtccggtcagaccggtatctccgtgagggccaccgatgacaaactttccggtcgggttaacatgatagacaatcttgtcattgaacagagccagcactttatcgtgatgaatagaagcaatcacgcgaggcatcagaatttcaatcacatcacgacgaatgatagacagcatttcttcgtcagctttcaactgagcggcttccgagtcattctccggctgaataaaatcatcatgctgtgtagagacaacaattgtatcaatgcgaacaggagttccgttatcgtcatattcaatagtcacctgactcttggcgtcgggacggaggtaagtcattaccttgccttcgcgacggatgtcggccagcacttgcagaatacggtgtgccagatcaagagaaagcggcatgtagttttccgtttcgttcgttgcataaccgaacatcataccttggtcgcctgcaccctgttccatcggatcctgacgttctacaccacggttgatatcgggactctgctcgtgaatagcggaaagtacaccgcaagagttactttcgaacatgtactctcctttggtataaccgattttcttaatcacctcgcgtgcgatgagttgtaggtcaacgtacgcttttgttttcacttcacccgctaatactacttgtccggtagttactagtgtttcgcaagctactttcgaactggggtcgtaagccaacagtttgtcaagcacggcgtccgatatctgatcggctaccttgtcggggtgtccttctgacaccgattcggatgtaaataagtatcccatctttcttaaattaagaattaaaaaataagaattaaaagatgatagagcaggagaggtgagtagtgcaaatatatgccgaaagacatcaacgagtcgtgttttagcatttttttctgtggttgcaagctactcaaatctgtccacactttcatttcggttgcaaagataaagagatttcggagattatgagtatctttgggcggtatttaacacaataatagatttaaaatgattctaaataagaaagtaagaacgcttttcgcactggcgctctatatcggatttacgattgcgatttacgccattgtctgtcatttcatccaccgtgagtttcaagacattcacctgctttatgccatattgataggctgtctggcttatctgccacgatttattgccgacaggaagaagaaatgagctcttttatcgtccttcccaataccgggtgtaccacgtccggcgcaatttctgccagtggccgcatcacaaaatcgcgctccgtcattagagggtgggggagattcagtgctgccccggaaggagaagtaacagagagcaccagatcatcgtaaagcaagaggtcaatatcaatcagacggtcgctatatactccgtcaacagacttcttggtgcgccctaactcccgttcaattagttgcgtctcccgcaatacctctaaaggagataaatccgtgtctacacaagcggcagcattcaggaaactgttttcagaagcaaagccccacggagcagtaacgtaaaaagcagacagggaaacaactttccctatctgctcttctattttctgcacggcatcccggagattctgttctttatcacccaggttagtaccgagtcctacatatacttccgccattatttgtccaaaatcagcattgcatcgccataagtaccgaaacggtaaccttctttcaatgctacgtgataagcgtccattacctgctcgtatccgccgaaagcggctacaatcatcaggagtgtagaaagaggcatatgaaaattggaaatcatcgagttagccacagtaaattcgtacggcgggaagatgaacttatttgtccaaccttcaaattctttcaaatgtccgtcggtgctgactgcactctcgatagcccgcatcaccgtagtacctaccgcacatacgtttctaccggtatccttggcacgattgacagttttcaccgccgcttcgtccacaagcatctgttccgagtccattttgtgcttcgtcaagtcttctacatcaatgtcacggaagttgcccaggccggcatgcaaggtgatataggcaaagtctattcccttaatttccagacgtttcatcaattcacgactgaagtgcaagctagctgtcggggcagtcaccgcgccttctttcttcgcgaagatagactggaaacgttcggcatcttccggttctacgggacgattgataatagagtgggggagcggagtttcgcccaaagcatacaaagccttcttaaattcatcatgcggtccgtcatacaggaaacgaagcgtacgaccacgagaagtggtattatcaattacttcggccaccattgaatcatccggaccgaaatacaatttattaccaatacggattttacgcgccgggtctacgagcacatcccacagacggagttcttcgttcaactcacgcaataagaatacttcaatacgagcacctgtcttttctttattaccgtacaaacgagcggggaacacctttgtatcgttgaatataaacacatctttatcatcaaagtagtccaatacatccttgaacatcctgtgttcaattttacctgtattacgatgcaataccatcaaacgcgactcatctctatacttcgtaggatgcaaagcgattttatcctcgggtaacttaaatttgaattgtgatagcttcatatctattccttattacgttaattattttcttcatcattttctatctcctgcccgtcgatccactctttaaaaagtgcgggatccaaacagtcttccaaacggacatcgcctacacgggtacgaatcaaccctgtgagatgagccccgctatggagcgcctcgccaatgtcgcgtgccagtgcgcggatataagtccccttgctgcataccacacgaatccgaatcatcggttccggttcttccaaacggcattccaacaattcaatctcgtcgataacaagctgtttcgcctttagttcgacttcctcacctttacgtgccagctcgtaagcacgcttgccgtccaccatacaggcggaaaaggcaggaggtacttgttctatcgttccgataaagtgcgtcaacactttttccaccagttccctcgtgatatgtccggtagggtaggtggcatctatctcatgctccaaatcatacgacggggtagtagcacccaaccggagtgtcgcaacgtactccttcgtgtgatattgaaactcttcaatccgctttgtagccttgcctgtgcatacaatcatcacccccgttgcaagagggtccaacgtgccggcatggccgacctttagttttttcacccctatccggcgacagatatgatagcgggcgtgccctaccaccttaaatgaagtccagccaagaggtttattaaaaaacagtacttcgccttttttaaaattcatcagctcaatataatcgttaccaatcctgctatcgcacaatagattgcgaaatagatcagctttcctttcttcactatgtttatcatccacttacaagccaggcaaccggctatgaaagcagccataaaacctacaatcaacgacaatgcaggaatgtctcccactacgtcctcccctttcatcatcttcataccgtcaagcaatgcctcacccagaatgggcggaataaccataaggaaagagaattgcgccaacttcgctttgttgtctcccaacagtaatcccgtagcgatggtagaacccgaacgggacaatcccggcattactgcacaagcctgggcaataccgataataagcgcatctttcatcgagattttttctttttgacgcggcttgtaatagtacgagaaagtcagcagggcagccgtcaacaacaacatacagcccacaatcagcagtcccgagccaaatatttcttctacatagtctttaaagaatactcccacaataccgattggtatcattgagatcaatatattaatcacgtagcgcgtctcctcgttcatccggaacttgaataacccgcggaaaatccaatctatctctttccaaagaatcaccaatgtactgcataccgtagccacatgcactacaattgtaaatgccaaattctcttcaccctgtatcccaaacaatgccgacccgatagccaaatgcccactgctacttacaggcaaatattctgtcaatccctgaatcagtccaaggattaatgcttccaaccaactcataacttatctttattctattttagttttaggtttgcgcaataccgcataaatcatcgacaagaaaccgaacaggcaaacgacaggcgccaccttaattctacgtgcactgaaaatatcaggttcaaagaccgtttcggacgacgaaggtcctgtcatcaatagaaacccgataataacaatcgccattcctaccgctagcaagataaagttcactttatcaaaggcaaatttctgcttgtcagacatagtttgtttaattataaattcaaaattaaagtcgcgaatcacagttcgctatacctatttactatctattctctactaaatataatacaaggtattggccctcattctcaagtatttgttaatggaaatgtaggcacacagccacgtaatcaccattccaaacaccaacacactcgcacaaacgataagcatgacttcgggagtgattacctgaagcaattcctgctcgtatgtcactgcccaataggccgtccccattaatatggcatcggcaactacggcagccagcacgccactccacacattccttcggagaaacggtcgccgaatgaagctccagctcgcccccaccagtttcattgtatggatgaggaagcgcttggagtatatagcaagccttatcgtattgtttatcaaagcaaaggagataaaagtaagcactaccgccaaagccagtaatatcagactgatattccgtatgttatcattcacagcatcaatcagctccttccggtagagcacatcctgtatattactgttccgtttgaccattttctcaatcttcgcaatactgtcggagttagcataatcggaatggagctttatttcaatagaagcggtgaaaggattataacccagaaactcttcaggatcagttcccatagcttcggtctgctccttcaatgcctgttttttagagatatattcggattgtttcacgaaaggttcctgattcagcttcttctgcagtttcagaatatccgcctctttcatatcgtcgctaatgagaatggagaaactgatattctcgcggacatatacggaaagattgtgcgccgtaagcacgaagaacacaaccagccccaacagtagcaacaccagcgtggtactgatactcgacgtaataaactgcatatcgaaaatcgaacttgacttatatctgcttttatttcccatcctctacctctttttccgaaaaacgtaaatcatggaactgctccgctccttccgtcccaaagcgctgaaccatgccaatgttccgacatacatccctttcaggaaactacatgaactaccccgatgtttctcacttagcatggatacgtaaaaagcgtcaaaaggcatcgggtgacgtgccgccatgataaagccatgccgggaagccaactgttggatagtgcccggtgtgaaatgccaaagatgtcgcgggacatcataagccgcccaatactcgccgtaacgttgcgcatcataagaggaacagttgggcactgccacaattagcagtcctttttccgtcaacatctcgtgaagctgttgccacacctcgccgaggtgttcaagatgttccataacgtgccaaagggtaatgacatcaaaactgccgggagcaaactcttgcagagccgattcgggtttcacctccagtccgaaatgttcctttgcaaactcacgtgcctgcggattcttctccaccgcctccactttccagccacgacgcaccatcgtatcggcaaaataaccggtacccgtacctatatcgagcaaacgccccgtcttgcgatgcgcctccttagctaccagccgcgccttgcggcccagcatataggaacgtacatagtgataaacggaattcatcgcgcctttgcgcgtatcagtgtgggagatataatcaggagtctcataatacttacctatctcagcctctacgggaacaccttgcgtgaacgtaaatccgcaatcttcacacgaatacagttcaaactgttcgcccgaagcataaaaatccgtacaagtcatgacgcgtttcaagtgcgtactgccacacaccggacaagcatttatactgagtttctccattaatttctaagcaaaattaagtgctgcctcaaaccacaagacaacactatacctgaatttggtgcaaagaaacaaataaaaagtgatgtaatgggcttttgttaaggacttttaataatacaaactgaccttgctctgatataagttgtataaactaaaatctatataacagagcaagacagttatttacgtcagggtaggacgcttgctttaagaagtttaagaagattcttttcttcatatcaaccaaccgaattaaaagatccccatcttctttgccatcctcattatacgaatataaaagaatagaatcatcaaatatttcgactatgtaacctacataaaacttgtccatgtcattatcaaaactatgtcaaatggtatctctacttcaggaacaagatgacaaaaagtaatggcgttgcggtaccgcaacgccattactttaaaatcattataa

SEQ ID NO: 2971 - DNA, 13718 bp, Unknown
  gut microbiota DNA sequence
aaaagttagacaaaaaacttttggggtcacttcaattcagcctcttttttatttaaatcgattttttttcgttttttcttggtaaaaatggagtaaaggcttctcttcctaatataagtactctatgaatagtaagattaagattagaaaagaatttgagttgctgtgagactaacatgaaaaaagtcaaaacaaacaatagattttggtagcagaatgagtaactaccaaaaatagtgagtcggaaatggttccctcgccggaagttatagttgttgaattagcttagttttccgactaaaaaggctgggttgaattttagaaggtttacaacccagtctgacactaatttttttagaaagccgatgaggccagaatgttgtatttatgttgtgaccggttttcttctggtagtttgataggttaagaaggtatgaaaccagaagtagggctaaaccgggttgttatcagtcagtgcatttatttaataattgttttatccaaggtgtgagagaagcaggagggagtttctctcataccatttgcttttatatgccgaggacattttgttgtcaatcctatcccaaacttgcggttttatactttattatccctttcttaattaattttataataaaaaattggtattttcggacgctttttagacaaacggcttaaattactaatagtttattatatggaaaatatcgaaacagcgattctgctgatggtggtcggaatggctaccgtatttgttattctgctgattgtgatttatttaggtaaattgctgattactttagtcaacaagtatgctcccgaagaagtggctcctgccaaacaggaaacgccgagaggtcctgcgcctattccggggaatatcctggctgccattactgcggccgtgaatgttgtgacacaaggtaagggaaaggtcaccaaagtagaaaagttataattaatcaagtatatcattatcattgaaagacatgaaaagagaagtaaagtttagtttggtattccgagatatgtggcagtcagccggaaaatatgtacctcgtgtagaccaactcgtgaaggtagctcctgccattattgaaatgggctgttttgcccgtgtagaaactaatggcggaggttttgaacaggtaaatttattgtttggcgaaaacccgaatagagccgtgcgcgaatggacaaagccatttcacgaagcaggcattcaaacccatatgctcgaccgcgcactgaacggactccggatgagccccgttccggcggatgtccgcaaattgttctacaaagtgaagaaagcgcaaggtacagatatcacccgtacattctgcggattgaatgatgtacgcaacattgctccttccattacatacgccaaagaggcaggaatgatttcacaatgctcgctttgtatcactcattcgcccattcatactgtagagtactacaccaatatggcgttggaacttatcaaattgggggcggacgagatttgtatcaaagatatggcaggcatcggtcgccccgtttcattgggcaagattgtggcgaatatcaaagcggcacatcccgaaatacctgtacagtatcatagtcatgcaggtcccggatttaatatggcaagtattcttgaggtatgcgaagccggttgtgattatattgacgtaggtatggaaccactttcatggggtacaggccatgccgacctgctgagtgttcaggctatgctgaaggatgccggttatcaggtgccggaaatcaatatggaagcctatatgaaggtgcgtggcatgattcaagagtttatggacgatttcctcggattgtacatcagcccgaaaaaccgtctgatgaattctctgcttatcgctcccggacttcccggcggtatgatgggtagtttaatggcagacctcgaaacgaatctggaatctatcaacaaatataaggcaaaacacaatctgccgtttatgacgcaagaccagcttctgattaagttgttcgacgaagttgcctatgtatggcctcgtgtcggttatcctccgttggtgactccgttcagccagtatgtgaagaaccttgccatgatgaatgtgatggctatggagaaaggcaaagaccgttggggaatgattgccgatgatatttgggatatgattctggggaaagccggacgtttgccgggcaaacttgctcccgaaatcatcgaaaaggccgagcgcgaaggtcgcaaattcttcgaaggaaatccgcaggacaactatccggattctctcgacaagtaccgcaagttgatgaaagaaaataagtgggaagtgggcgaagatgacgaggaactcttcgagtacgccatgcatccggctcaatacgaagcttataagagtggaaaagcgaaagaggacttcttggaagacgttgcaaaacgccgtgcagagaaagataagtctcctgaagaagatgcaaaaccaaagacattgactgtacaggtagacggacaggcttaccgtgtgaccgtagcttatggcgatgccgaacttcctgctacacctgctgccgctgccgcaccggcaggagagggacaggatgttctttctccgcttgagggtaaattctttttagtgaagaatgcgcaggaaactgctatgaaagtaggtgacgtggtgaaagaaggtgatgtgctgtgctatgtggaagcaatgaaaacgtataacgccattcgtgcggaatttggtggtacaattactgctatctgcgctaacccgggagacactgtttcagaagatgatgtattaatgaagataggataatgaacgagatatttgagaacttatatgagatgactgcgttcagcaatatcattgccgaaccgcagttcctgataatgtatgctatcgcgtttgtcctgctttatctgggtatcaagaaacagtacgaaccgttgttgcttgtccctatcgctttcggtgtgttgcttgccaactttcccggtggtgatatgggagtgattcaggcagacgagaatggcatggtaatgataaacggagtgatgaagaacatttgggaaatgcctttgcatgacattgcccatgaattgggactgatgaacttcatttattatatgttgattaaaaccggcttcttgcctccgattatctttatgggtgtcggtgcattaacggacttcgggccgatgttgcgtaatctgcgtctttctattttcggtgctgccgcacaactcggtatctttaccgtactgttggtatctatcttaatgggattcactccgaaagaagcagcttctctcggtatcatcggtggtgcggacggccctacggctatcttcacaacgatcaaactggctcctcatctgttgggcccgattgctattgccgcttattcttatatggcattggttccggtgattattccgttggtggtgaaacttctttgttctaagaaagagttgagtatcaatatgaaagagcaggagaagaaatatccttcaaagaccgaaattaagaatttgcgtgtattgaagataattttcccgattgtagtaactacggttgtagcgcttttcgtgccgagtgcagtacctttgattggtatgttgatgttcggtaacctggtgaaagagatcggaagtaatactttccgtttgttcgatgcagcttctaatagtatcatgaatgccgccactatcttcttaggattatcagtgggtgctacaatgactacagaagctttcctgaactggacaacaatcggtatcgttataggtggtttccttgcattcgccctttctattacaggtggtattttgtttgtgaaactggtgaatctcttttccaaaaagaagatcaatcctcttattggtgcaaccggattgagtgctgttccaatggcaagccgtgtggcgaatgagattgctttgaagtacgactccaagaatcacgtcttgcagtattgtatggcaagtaacatctccggagtaatcggttctgccgtggctgcgggtgtgttgatttccttccttgcataataaaagaacaaccggctttagagataagaatccggagatatgggcagagttatgctcgtatctccggatttacttttttgatttgctttctattgtttacaatactgttttcagactatttattcactgataacctttctatattcagctatcgccattttctccgacaaatatgcgttaattagatttgtgtgtgcctgtgtccacgataactgcgccgagagaacatccaccatacttgctttaccttcattataagagaaggtaactaaatcaagattttcattagccagattcatgttctctgttgcagttttcacctgatattccgtttccgtcagtttagtcaatgcaccggacaattcttcgttgatattatccgttatataactttgttgcagtttctgtattccgatgtatgctttctgctggcggtttgttttgaaacgggctccccagcggaaaataggaatattcagattaatgccgacaataggattgaaagatacgtcatatccaaggttaggcgttcccgttgcccagccgccgctaaaatacatatttagttgagggttaaactggctgagagcggctttacgttgcgcttgacttttcatgatatttacttgcgtactttcgtaatcagcgcgccgttgcaatacattttccaacgacagaatctgtacgggggtaaaagctgtgtcaatcgaagaaagactgtctacgggagcattaggttccatacccatgaggatattcaacttttgcaatgctaacgtataattctgacgggccttgatatattgtagttcagcttcttttaagcgggtggaaatcatcagtaagtctgtacggctaatcattccatcgttaaaacggtcctgaatgatgttatattgctgtttgacgatgctttgatatttgtctgctgcctgtaacatagcttgtgaagcggaggcattccaataaacagcatcgctctgataatgaatctggtccaaagttagttcctcgttcagttgattcagcttctcatccgctttcgcaatcttatgttgagcgttaagggcaccacctgtatagagaggttgagagacgacaaacaccccttgataagtgtggttccgatattctcccagcggttcgttccatgcttttaggtcgctcatattcagagtaccgtccgcatttacgtctattttgggtaagaatcccgtatgagctatctttcgtgcttccgcacttgccattgtctttagtttttgttgtttcaatatctggctgtaagcctccactttgtcgcgataggcttcccggctgagataaggttgttgcgcccgggcagtgaagccgagaagcaacagtgatataattataaattgagttttcattttatccattataaatagtaaattcccatttaatccttaatccgttgaatggcacaataagccaccggcaacacaaacagtgtcagtatcgaagctaccagcaaacctcccatgatagtggctgccattccgccgaacatcgcatcgaacagcaacggcaacatacccagaatcgttgtccccgatgccattgctacaggaacgatacggctcgttgtggcactaaccaccgcatcaagcggcttctttcccatcttagcttccaaatcaatctgttccacaagtacgattgcattcttgatattcatgccgattaatccgagtaatccgaggatagagaaaaagtcgaatgatttgccaagtaatagcaatcctaacacgataccgatgaatatcaacggtaacatcagcaaaatcactgtcggtttacgatatgtcttgaataggaacagtagcgtaacaaacatcaaaaagaacgtcaacggaagattcttggctaatgcttcgttggattctacctggctttcctgttctccgaaatatttcatcgtatatccttccggaactttaatctccttttgtacctgcgaccacacttggttgaaggctgcaatcgcatttactccgcggcgcgggtcacattgtgccatcatcaccatttgtcggttgtaatctttcacattagagaaccggtattgaaaatcaaaatccgacactacttgttccaggcttgttgtctcgtttcccgtgccgaacaccggaagcgtgcgtaagtcattgatacggaacgaatccaccgtattatcctttagcagaatagagagcacctgatcgccctgacggtattctcccaacgtcattcccgttgtaccaatctggatactttgtgccattccctgtcgggatactcccaacggttgtgcacgttccggactatacacaggtttccataccggaatcttgttcccccacgaattgcggatattaatcaaatccggattccggtgcataatctccaacgcttggttggttagtgccacaagcgtatctgtattcggccctataaaaccgatctcaatagcagcgtctacggcaggggataatttgaacaggctcgtccgggtaatcgcattcggataattcgctttcatatatccgtcgaaattctcctcatattccttcgtatatttgctgtccgtcagttctaccagtacgttggcaaagttcggtttcggtcctactgaagtagatgccagataatatctcaatggcgtacttccgaaagtaattgatactttctttacttccggctgttgcgccaaatgttcttccaccgatttcatctctttcaccacatcgttgatactatacccgtccgggtagaatacgtccgcacggaaataaggtttgtccaaagacgggaaaaagttttgtggcatcatccccatgatgacgagtgagatgatgaaaagtgctaccatagaacccagcgtcaacaccttacgtcggatcagcgtccggagaatagaagcaaacttatgatagaaaggcttgtcatatgggtcttttgcatcaccgttcgccttggctttcaggataaaattaccgaatacggtcgtctgtgtcaatgcaagtatccaactcaatcccagtgaaatggcgagtaccacaaacaacggcttcacgatttccgctaccgaagacggggccagataaagtggcaggaatgaacagatagcaatgaaagtggctccgagtaatccccattgcggtcctgtggcaccgtctatcaatgcctttcgcctgtttactccacgagcaatggcaatctgtgcattatccgtcaccacaatggcattgtctaccagcatacccattgcgataatgaatcccgccagcgacgtacgattcagtccgacaccaaagaaagacatgataagtagtgtacctccgatagaaaatatcagcgatgagccaatcaggacaccggcacgaagtcccattaccagcatgataatcacaattacaattaagatggactcaatcagattgatgataaatccgttattggcttcgttggctatttcgttttccagataaagactttgcaattccagtcctacgggcataagcgggagtagttcactcagtttggcttttacgttttcacctgtctgcactacgtcccgttgcgggtcggtagagacaccgataccgatagcacgttttccgtttacgtgcatgatattggaaggaggatcgagatagcccttttcgataacggcaatatctcccaacttcacctgtcccgctttcgtggtgataacctgattgcggatatcatctatggtcgtatacataccattagcagttacccgtagctgttgttcccctgcgcggatttctccggtgttgataatctggttttgtgattgcagcaggctggcgagctgtttcgggtcgatgcccatgcctaccagtttattggtcgagatgaagatatttactacctctgtctgtactccgaacagtgccactttcatcacaccgtcggcagtgacgacttgtgttttaatccgttccgcccagtttcgcatctcgtcgtaggagaaaccatcatcggccgtcagaccgtaatagataccgaatacatcgccgaaatcgtccgacacagtcggcgtagatgcaccactcggcaactgcggttgtatattgagtaccttcctacgtagctcgtcccacttttgcggaatggaacttgccgatagtgacggttgcaattcaaatgtgattttggaaagcccgtacatagattccgatttaatcttgtacacaccactcatactttgtatttcgcgagagataggctctgttatcagacgttccacttctgccggctcggctcccggataacgggtcatgataaccgctgacttgatgacgaagggagcatcttctttcttccctagctttccgaaggaagaaatccctccgataagcaacacagcaagaaagaaatagataatcttcgtgttgtctaatgaatatttggctaagttcatttctctatatcttttacgttttccccttctactaactgatatactccggcaataacaattttctcttccggtttcaaccctttggagataagtacttgtgcttctccggtaggtgcgttaacagtcacttctcgtttgtgtaccttgttgtcttccaccacccagacgtacatcttctttccttcgctttcaccgaacacggcgcttaacgggataattgtccaactatcctgtaccaacggtcctacatctgccgtgaaacggatactgcacgtaaatcccggtttcactgcatataaatcccggtcgaaagacgggtcatcaatagtaatactgaccggaatccccgttccgtctgtcgagatatcaagatattcttcaagctttgcctggaaaacatgtcctttgaatgtgtcgaactctactagaaaacgcgggtctttggtgcggagcaggtaaaggtaagcgtcgggaattgtaaacttgatgcgcagattgtgtgtattgaccaactgcacgataccttcacccgagttgacacgctgataattttccacaagacgtttttcgatggaaccatcgaagggagccgtcaatttagtgtcgcgcatattattgacggataactcatattctgatttcgctttctggtaattagccaggctgatttcatattcctgaaccgatatggcttggcgggagaggaggcgcttattgcgttccacttgtgcggcagccgtctcatacgccgatttggtagcggcatattgcagggcgatgtccctggggtcgatagctgcaatcaattgtcccttctttactttctcgccttctatgacaggcaggttgatgatttgtccgctgacccggaatgccagcttcacatactccacggcttctacaatacccgaaaaatcttttctgatgatcgatcttgactctacaatcgtggttttcaccggacgggccgttataacactcgtttcttttttttgtccgcagcccgctaataggacggctactgcgagcataaatccatatttctttttcatacagcacactgatgtttagagtttttgcgttgattcgtttctcttttttaaagagagtaaacaacttacaagtgtttatgttcaggatttgtgtgcttttcgttgattgtcgctacaagttggattcttaatttgttttattgggaagtgcggtaaaatagaggctctgtttgaggtaaatagagtgtctgtttgtggcagttggagcgtctgtttacatcaaacagagcctctgttttggggagagttcatgtgttctctagagacaggctgaaaggggggagctgatatgaaaatagtatttttatttccgtcttcttgtcggttttcctgagaagatagtcaattcaaaaatcgtaaatatgatttctgttgttgtatatccgtcgagagtgtattccaaattctcatcttcggagaaatacttgaggtaaacggttggcacacccatataaaagtcaagaaaaagataagaagtatagttataaatgcccaagtcggcaaatttgtttaaaatgtcattgttaaaaacagtacaccatcctgtttgggtttcgaatcccgacatttcgaatctgcgatgctctttcataaatttgtctttgtccacatgccttaattgttgctgcaattcgtcaccaaaagaaaggcgttgtctgataaggttaaaaacttcctcctttgtcatttgttttaagttagttatttccatttttgtttattaattctgtaaaggtacttcctttattttgtaataaacggaatccggacatttttcttttatttatttttcggctgatagtcctgaaaacttccggatatattgttgtcagtgtaatgtctcaaaacgaaaaagaggaaattcctttcggaatctcctctttttcatcttacaagaaagactaattatttcttcttacggtcaccgtaacggctcatgaacttatcaacacgtcctgcagtgtctaccaatgtagatttaccagtatagaacgggtgagaagtgtttgagatttcaatcttcagcaacggataagtttcaccttcgaattcgatggtttctttagttgctacagttgatttagataaaaacatgtcaccatttgacatatctttaaatactaccggacggtatgattctggatgaaggccttttttcatttcagtatctgtttttttaatttatattctgttactattttggtaagaaatagtgtaatggtcattttcagagcgcaaagataatgcttttatatgaaatagaaaaagaattcttttaaaatttataatatatagcttcgaattactgatttactgtgtattgtttgggggcactgaacttgttctgatgctatgacgataaattgaactgattgctagctcgacattacaatataatgtcattgtgtcttcctgctaaaaaaaatacggttctatttaaacctttttctactatattttcctttccgatgttcgttattcgggggataatgcttacttttgcgtagaatttttattcactaacaataaactttaaacaaaatggtaaattacaaagatttaggattggtaaacacaaaagaaatgtttgctaaggctatcaaaggtggatatgctatcccagcattcaacttcaacaatatggaacagatgcaggctatcatcaaggctgctgttgaaactaaatctcctgtgattcttcaggtttctaaaggtgctcgtcagtatgctaacgctactttattgcgttacatggctcagggtgctgtagaatatgctaaagaattaggctgtgcacatcccgaaatcgttcttcatcttgaccacggagatacttttgaaacttgtaaatcttgcatcgactcaggtttttcttcagtgatgattgacggttctcatcttccttacgaagaaaacgtagcactgactaagaaggtagttgattacgctcaccagtttgatgtaactgtagaaggcgaacttggcgtattggcaggtgttgaagacgaagtttcttctgatcaccacacatatactgaccctgaagaagtaattgatttcgctactcgcactggttgcgactctttggctatctcaatcggtacttctcatggtgcttacaaatttactccggaacagtgtcacatcgatccggctactggtcgtatggtccctcctccgttggctttcgaagtattggatgctgttatggaaaaacttccgggattccctatcgttcttcacggttcatcttcagttcctgaagaagaagttgaaacgatcaacaaatacggtggtgctttgaaagctgctattggtatccctgaagaagaattgcgtaaggctgctaagtctgcagtttgcaaaatcaacatcgactcagactctcgtctggctatgactgctgctatccgcaagacttttgctgaaaaaccggcagaatttgacccacgtaagtatcttggtccggctcgcgacaacatggaaaaactgtataagcacaaaatccttaacgtgctcggttctgacaacaagttggcacagtaatcttcggattatttcataaataaaaagaaaggctgcttccggttgacggtggcagcctttttagttagtggtaaaacgctgattttattctttctttgtagtctcaggatttccattctgaaagaaatcctctattttctgtttgcttttcaggtctttcagccagttgtcagcagcgttataataattggttattcctaaaacgagttctcccttttcattcagtttcgcctgttctgctttctcatctttgggacgtgtttttagaaatgcttccaggtagcgttctgtgctttttctgtcttttaaggcgaaaaaggaaaggtgtgccatgtcatatagtaatttatgattttgtctgtcgtatttctgataccgttcttttatagacgctaattgttctttatacatttgcgccattttataacagtcagtcatgcctatataaaggcgtaccatgctgctgtctttcggtattgacaaattgatagcttgttccagatactctactccttgtttcttccatgaagtcttggcacaggaacgtccgaggtaatagaggaggtttacattctccggatcatatttccgggcagcttccagaaaatcatgtgcttcataatatctttcaatggcataataactgataccgagatagtaacaggtatggaaggtactgtctccctggtttaccaggtactgataacggcggattgcagttggataatcctgttttagacagtacgccaaagcattctggcgattgacggcaatgttggtggtatcaatcttccggtatttctctgttgcttctattgcttcgtcatagtaagaggctgctatattgattgcccctaatttggcggcggcaagatagtcggcgggatatttttcctgaatattgtagtagcaacccgcggcaggcagaagttcattcataccttcgaaactctgtgcttgcaaatgcagggcgatagcagaactgtctttttctgtcattaggctgctttcacccaatgcttcgcggaacttttgttgggcgagaagcaggttgatatactgtatgcgtacatatttattctccggagtgaggtcgagcactttttcataatatgctgatgcttgcttatatttggcaagggtgcggcaacattcggcagcctcaatcagtgcgcgagtgttagtgctatccttgcctatgatttcctgataggtggaaagtgcttccgcgttcagtccaaggctacgcagggctttgcctttctgtagcaataggggagtggcgggctttttttgtgcaatgagcgagagtgccgtttcgtagtcgtaacttgccatagcctcttggatagggtcagtctgctgtgccattaatagggtggtggaacagagcaggagtagtagaagtatccgtttcataaattgtaattttagtgtgtcgtttataaagcgcaagttactaaaattattgtacttacgaaatattcgtaatgtgtttcagatagattaacgtatcgataacacaggataacataacagagaatatgacataaagaaaagaagaacaataaaaaatgaaggtgtgtcgtaatacacgatgcgccttctt

SEQ ID NO: 2972 - DNA, 175870 bp, Unknown
  gut microbiota DNA sequence
caaagccccagcttgtgaaagtcggggctttgtgcttaaaaaaaagaaggtgcgcattttgacacacctccatttttctttatccaattaatccggtagacgcggattaatagttttctttcttcacttcgaaatatgcttgcggatgcaggcaagccggacaaacttcaggagcttccttacctacggtgatgtaaccgcagttacggcattgccataccacttcgccttctttagcgaatacagtcatattttcgatattgttcacgaaagccagatatctttcttcgtgacctttttcagcgatagagatgttgcggtacatagcagcaatcatcgggaaaccttcctgttctgctacatctgcgaagtgaggataatccagtgaccattcttcatgctcgccggcagcggcagcgcgaagattttcgagtgtagtaccgattacaccggccggatagctggcagtaatttcaaccataccaccttccagaaacttaaacatacgttttgcatgttctttttcctgatcagccgtttcagtgaagatagcagaaatctgttcgtaaccttcctttttagccacacttgcgaaataagtgtaacgcattcttgcttgtgattctcctgcaaatgaagtcaacagattcttctctgtctgagttcctttaatacttttagccataattctaatctatattttaaattggtaattaccaaacgtaacttgtcgtactatttataacgcaaatataagcgaattgttcgtaataaaccgacttttctttatgaataaaaactatcagttcattgatgaaatctatcaacagacaaataatatgctggagaacatacttatttcgattattttatataattttgcaacctctactttgcaaaaaggtcagattacacgtataacaactcataaaaatgaagctatttgaatttaaacccaaactggtttcttgtctgaagaattactcgaaagaaacgtttatggcggacctaatggccggcatcatcgtaggtatcgtggcacttccattggctatcgccttcggtatcgcctcgggagtatcgcccgaaaaaggtattatcaccgctatcatcgccggatttatcatctccctaatgggaggtagcaaagtccagatcggcggcccgacaggtgctttcatcgttatcatctacggcattatccagcaatacggtgaagccggactgattgtagccacgctcatggcaggtgtactgcttgtattactgggagtcttcaaactcggtgcagtcatcaagtttatcccttatcctatcattgtcggatttaccagcggtatcgccgttactattttcactacccagattgccgatattttcggtttatcttttggagaggagaaagtgccgggagatttcgtcgggaagtggatgatttatttccgtcacttcgatacggtcaactggtggaacactatcgtgagcgttgtcagcattattatcatcgccattacccccaagttctcaaaaaaaattcccggctcactgatagcaattgtcgttgtcactgctgccgtctatctgatgaaaaccttcggaggaatcgactgcatccagacgataggagaccgtttcactatcaaatcggaattgcctgacgctgtcgtgcccgccctagactgggaagctatcagggaattatttccggtagctatcacgattgccgtattgggagctatcgaatcattgctgtccgccacggtagccgacggtgtgattggcgaccgccacgactccaacacagagcttatcgcgcaaggcgcggcaaatatcgtagcccctctgttcggaggtatccccgctaccggagctatcgcccgtaccatgacgaacatcaacaacggtggcaagacaccgatagccggaattattcatgcagtaatcctgctcctgattctgcttttcctgatgccgctagcacaatacatccccatggcatgccttgccggcgtgttagtcattgtatcttataacatgagcggctggcgcgtattcaaggctttactgaaaaacccgaaatcagacgtcactgtgttgcttatcactttcttccttacggtcattttcgatttaaccgttgctatcgaaataggattaatcattgcctgcgttctctttatgaaacgcgtaatggagacaaccgaaatctctgtcatcaccgacgagattgacccgaacaaagaatcggacattgccgtgcacgaagagaacctcatcatcccgaaaggcgtagaggtatatgagatcaacggcccttatttcttcggtatcgctacaaagtttgaagacaccatggcacaactgggagatcgcccgaaagtacgtatcatccgtatgagaaaagttccgttcattgactccacaggcatacacaacctgaccgtgctttgtgaaatgtcgcagaaagaaaaaacaactgttatcctttccggagtaaatgataaggtacataaagtgctggagaaatccggcttctatgaactactgggaaaagaaaacatctgcccgaacataaatatagcgttggaaagagcggaaagcattgtaaaatagcgatgtttatcaactaattacaggagatatataccgtgtatatcgggcatatagatccaacgtattggacatatagatccaatgcgttgggtatatatggcctacgtgccggatctatatgtccagcacacacggcatacaagctacttaaatcaaacattatttcaccagactttcaagaataatccgcgcttatacatcgctctcaacagtactggatcaataaatggtacgatcgttagaaaaacgataagattatgccttatcacaattcaggattgaatacatcttcatatccacaacgacgccattcttcaccgcattctttctcagcgttccctccaactgaaagccgcttttctcaaggatacgacaagagccgatattatgtgcgaaaggctccgcaaagagccggatgatatcggtattgcgaaagatatactcacatatctgtctgatggcactcgttccaagtccttttccccaatagggttctgcaatataataacctacttcagccgttttcgaatgtatattgctctgacggaacgcggctatacttcctattgccttgtcatctacagtaatggcaaatgaaaaagtagtttccggatcggcaacattcatcgcttgtatgaactctttcgcatcctccgccgtataggggaaaggaatgccgtctctcaaattatcaagcactttcttgttattcagcgtctctgcaatgtcattggcatcttctatccgccaccgacgtattctacattccatacaatctttactatttgaagttacactccttgctaatacgtccgtaaaactacgaaataaatcctagactgatataaagagccgattctattttttctaaaaaaacagagcaaacagtagagtcggatttttatttccagcctctactatttgctcccctaaccattttacaagaaaaaatagattgaatgattcaggaatgctgcttctatcactagaattgatgcattctcagttccttatcaaccaatattccgtctttcaaagtcaattcaaacttcactttacgtttcgctttcagcttcaggacaaacaattcttccgaaccattcaatgcttcctgctttcctatattgacaaacgtaggatagagcgatttcactccattggtatgcaagcggtcgtaagtcaggttttccattgctttcatattcagcggctctacaccaacgaactcaaagtcattctgatcgtaaggcaatgcaaagctaagtgcattcacagctttcaggtcattacccttcacgcggatttcaacgatttcatccttctgatagaggcgtttcggggtgctgattgataaagagcccgatactttaagcgtatcttttctgccgacaccaccttcgagctgagtagctaccacgctgatatcgtaagcgtctatcagatcattcatgtttatatcccctttgctgatatatccttcataatcagaatctccacggcgcaagcccgtgtaattcatataagaagtcaagtcgttgcggtcgatcttaccgtcattgttgatatctccctgcaagtagctggctgttccaggcactttgaatacgtacaattcgcggccggaaccgtaatttcctacaccttccgtaacggcaagtttgatatagcgtgcagtaggacgggactcgaagctgaatatcttcacatcaccgttgcgtttccaatcgaatgcacccgcctctgtccaatgttccttatccatgctataatataccgtacctttcaataatgtaccgttaccggcatcagtacgcggcaagtagtggaacttatccagttggttcaccgtcttgaggtcgataatcagatcaagcggcattgcattcacacggtacttcgtatgccagttgtctcccgattcggcaaagtcgaacaaacggttcactccgaatcctccctgagaagcggcagttgattcaccttcaattccgtgaatagcaaattccaacggattggccttcgtcgttacctgaatagttgcccagtcggaaacgccgtctttattgacagcacgtactttgaaagagtacggagtttctgcattcagtccttcaaacaataaataagtattgcggatagtcgtataaagcataccgtcgaattcgatttcatagaaatctgcattagcgaccttatcccatgtcggtttcaaggtgtatgcttcgcggttttcttcggtcacttgtgcattctgcggcatggtcaaagtaccggtagttacacggtaacgatcggcaggcgcaaaacggaaaccgtctacgttcagcacaacctgactgaccgtaatgtcggcagaagccagtttaacgcgtagttgcggattctttgtaatgaccactttctcaaattcactgcctttagtagcgaatttattcaggttgggagtagcttcataccagtagacgttctcgcctttcaggaaatcttcggccgtagttacttccataagtttcaccgttttcttgttcaccttagcgacaagtttcttcggtttttcggtaacattgatacgcaattccgtctttttatccttcacaaaaccgtcaaagtttccggctgtcggatgaatggtgatagtaagacggttcttcttgtcgtttacgtccgattcaatcagggtagatactgatttattccggcggtaagcttccgttacaccgtcatcatcatactctatggtttcagtgtgcccgttcgggtagaactcataaatacgcagagacttgtctatctcgctaacgttattatgagggttggtcatcggaatgatagagccattcttcacaaatacgggaagtttccagataggagtatcgaagttgttgagaatacagttaccttcatacttctcgccactgaaataatcaatccaggagccggcgggcagataaataccgtcgcggatatcattgcctttctcatcagcctgggttttctgataaacgggagctacaagaaaatccgtaccatacatatactgatactgggtagccgttccatgcgtataagcactgggataatccaggaacatcgcacggataagaggcattccgtctaccgcctctttggcaaaactatatgtgtaaggcatcaattcggatttcaacttcaagaacatccggtttatggatgtggccggttcgcctaaagcatgggggtacttctcattggcgccccagccgtccatattcaattgcatcggactaaatgttttccattgaaaatcacgtatattgactgtttcattcttgccaccgaagattccgtccatgtccgaacaaatgttcggttgaccggaaaggccggagcctatataagtagggatatggaaacgaatatattcccacacaccgcctgtctggtcgcccgaccaaattccggcataacgttgtgtgcctgcccaaccgtccaaagagataatgaaaggacgtgcatcatttccatagtaaggcataatacggcctacgtcagccacaccgttcaacccgaaggagtatccggcacctacccacgctacgtctgttttcagtacacgcacgcctgcatcacgaacctctttcacaatatcacgttgcagcaaagcacttacgccttccttcggatgcaagtctgactgtgtccaaagtccgatctccactccgttttgacgggcataatctcccagacttttcaagttggcaatgttaccgtccagcgtttcggtctgtccgtatcctgcaccgtaaccgtcgttgggaagcagccagccgagaggcatgtcatggctcttatagcggtcgatcactgcacgagcggagaactgatagttgttcttttcaccgttcagagattctttgataccaccattgtctttctgactttctttgtagcgttttccatcttcaaaaagaattcctttttcatcttctttccaatagtcacggttgtaggcattcaaatgtccttcgtaaaaaccaaatttggggagtaaaacaggatttcccgtcagttgatagaagtcgttcagcaacgcaacggctccatcgttaaccatataaaaaatatcaaggtaggaagaattgtgagatagtttcacaacatttttttccgttgcgccaaagtcatactcaccttttttaaatgtataccacatcattccgtagccgtttgtcgaccaatagaaaggggtaggggatgctacgccgccgtcggtccagctattctgattctcgatagcaatgactttgcctttatgagagaagcgtccgttctgtacgccgccaccgtagaagtactcatccggctgctctttcaaagtaacagttactttcttcggttcgaataccacaggagcagtttcatcaatgacacaggcatttgttcccagattgatgaccttcatcagccctgtctgtttattcagttcgacccggacttttccggtagtcaatgttataatgccgtccttttcatctattgccagattggatacttgacgacgaggctggtctacaagtatctgtgcctcaggttttgcttccgggtcacggatgattcctcccgaattatcctgaaatacacggaagatattctctccgtaaaaatcaattgtcctccgctgattattggagaataacacatcgactgttgtcggatttactttcttcacactaagaatacccgaggtctgttgagccgtgttcgaaacgacattactcatatcggacttttcagatgcttgtatggaaagaagtgaaatcggataaaagagtaaaaacactgcgataaatctaagttttcgcaaacagaaagagtggtttttaatcatgttttacttatttagaattagacataagactgctttttatttctatctcaacttttgtttttccaatacttccgctttatttacggaaatatttcgctaatgtataataaatacacaccagttcattgtacccctattcaaaaaggcgtttttttaaatattctttgttcttattactttttttcactatttgcccaacttaaacaaagaaaacaatggtatacaaaaaaggaaccgacttagagaaaaacataaagattcagcttatttatcttttatcaaagcatacttatattcaacgattaaaatctagtttttttacccgtactcagcttcagcgcttcaaactcatcagtaagctcttttacctttttcggatatttatcagccaagttatgcttctgcccgatatcttcttttaaattataaagttgatattccgtctgtttacgataaggaggtattaacgcccaatctccttttcgataggcataattgaacataccttcaattaccaattcttcccgaccctttttacttttacccagaaaagccttcaaggtgttccgactatcaagtttatccggataagtttgtcccaacagtccggcaaatgaagccaacagatccatctgacaaacaaaagcgtcggatactcctggttttaccatagcgggccagcgcaacataaacggcacacgtactcctccgtcatacatcgtcgtcttccaaccgcgaagagggcctgccggacggtgcttaccaaccaactctactgcctggtccttatatccatcatccaacacaggaccgttatcgctcgtcaatattacaatcgtattttctgccagtcccaaccggtccagttctttcaaaaactcatcaacacaccaatcagcttcgagaataacatctccgcgaggccccatacccgacttgccaataaaacgttcattaggtactctaggcacatgcggctgatgcaggccataataaagaaaaaaaggacgctctttattatctacgacaaattgcttcgctttttgaagaaataactgtgccatatcctcatcccgccattgtgctgcctttccccctttttggaaaccaatacggggcactccattcactatcgaaccggcatgcccaacactgggatgcattcttaataattccggattatctttccccgtaggctctccaggaaaatttttccgatagtcaacataaagcgggtcttccgcctcaagccctatcactttattattctctaaaaaaacgcaaggcacccgatcattcgtagctgcctgaataaacgaataatcatatccaatctcagaagctcccggatatactcttttattccagtccacattaccatcccccagtccgatatgccattttcctacggaaccggttatgtatccggcctgtttcattaccttaggcaaagtaattgcctctgtatcaataatcaactttgcattccccggcaatatctttgcatccggatttgtccagggatacctgcctgtcattaccgaataacgactgggggtagaagtagccgccgtacaaaatccttgagtaaaacgaataccctcattagcaatacggtccataccgggagtttgtattgcatcagccccatagcaactcaaatctccgtaacccagatcgtcagcaacaataagtactacattggggtgttgtttatctatagatttcttctccggttgaaactgtccggccaacagggtaacaggcatcgaagaaatgcctgcgaacgcataaaaagtcaaattcaagtttttcatatttatttatgtagttatttaaatgttttcaagttgtttttcagtctctacaagacctccggatatttctcatttactattttttcctctttgtagtcattaaaataatctccgacaacattgagatatgcctcttgcttctcttttcttctctgccacacccggcaaagctactaacaaaagagcaacacatacaaatgatgttcttttaatattatagcttcttttcatgcattcctcaaattaaagccttcacaaaccaattctttctaacgttatttcttcacccgcccgtgtttttaactcaagaactccattcttttcagtaatcttcttctttttcccagcaatcctgaattttcctttaaaaggattgaccaaacgcaacaagcctcctttctcagaaacaactttaaccaaagaagcatctccgttttctaaactggcacttacaacaaaggctcctatggcacgtagcttatcaaacgaaacatctttccaatcggacggaatagcaggaaaaacacggataactccactgtgactttgtaataacatctcctgaactccggaggcaaaagccatattcccttctaatgtaaatggacgataagtaaatccggacttaccacttctactttgatctccatttgcatgaaaaccatttcttaaacaaaaacactccgcaaatatacgtaaggccttagcagctccgttgccatcaaaagcccgtgcctttaaatttgccaaccaactatacgaatacccggtccaaccgccaggcccgtatttatctaatgtattcaaactaacatcaataatttgagaatcgctttttccataagatttatcaagcaatcctaacggatgaattgctaataaatgagaaaaatgtctatgagaatgttcgtatggatgccctacagcaatagacaatcccccttgagcatcaaaaataaaatcaggtaattcttcctccagtttctcccaatgatcagcttcatcttttcgccctaattccctagccaattcagctgctgcacgaaaagcaaaacgaaccaatgcacggtcaaaattcgtcatctctctaaaccaagcatccatactattatctttaaattccggagatgaacttaaaggtaaacttcttatcccatctttcactatagtaaactgctccaaataagtagcaacttctttcaaatagggataacacctgtctattaaaaattgacggtcctgtgaatatttccagtataaataaaaatgctgggaaagccatgcggaaacagttgggcctaatgaatattgacaccatcctcccatcggttgtcccagtaaagtacaaactcccggaacattcaacccctcagttccaaaataggttttcgtatatctcttattttccttcagttgattccacaaagtatgtaaatatccgtaactttcttccagataattgccagtataaaaaggccagtaactcaattgtgtattcaaatcgtgatgataatcacctttccaaggaggtaattgcccattgtcagctgtccacacagactgtaaagatatcggatacgagtcttttctagagatactccccattttataaatttcattgtaatattgcttttctatcaccttgtccggcaatgtgacagacgaacggctataaaatatattccaccaattttggtgagtctgataataagcctctattccggcattcatagcctcatccacaatttgtgatgcttcttcttttacaagagaagaggtaacactccatacacctattattttttctccaaaccgcttccattttactgcaaccgaataagaaaaatccccccaaccaggttgattataaacaaatttatcggataatgcccgttcaacttttccttgttcatatccgagtcggaacagactatgttgactatgatcttcagcggtatgtcttacttcttcattataagaaggaggaattaataatggctcaaaatcagcttctaccccttcaaatataaaccaacccacagttttttgggcatggacaaaacagcgtaaggatactcctgatttccatacaacttcacatacagcttgtcgttgatataaatgtactttttcaacctctccaaaatgttctattggaaactccaaacccgcacccggaatttttgaagggccgggataagcgttatatggattatcaaaccgcctctgtaccggtgtataatctcctttttgaagctgttcgtacaaccaatgaaaagagaagccttctccttctaattctttagaatgccgcaagtcccacaaatcactgcgatctatggacatacgcaaacgttctcctttttgccagattaaagaaccaatagtcgcatttcctagcggtattgcttcatcccattttcttgccaagtctcgaaattccatatcatgcacatgagtagaaacagttactaccgaagcatatgaatcaatagccaatagaaacaatatagcaaacaacaactttcgataactcattatttttcacttacttaaaattagaggtaaacaaaagagaatcttaaaaataaacaaaaggtttcagctcatttccttgtttatcaataggataaagagcgccttctttttccaaccgagacgacatattacgaatcatctccctacatttatcaggaaatacagaagaaagttcttttttctcttcctgatcctctttcagattataaagtaccgctttcggttgcttcggagtctccggcgaataatagtaaatcagcttccaatctccctcgcgatatactgtgaagtaattgccgcgatgagcgtgagggaagtgcataaggaacgtttcaagacgttttctattgacttttccacttagctgcttctttagatcgaatccgtctattacataatcggcaggcagtttacatccggctaccgataaaactgtcggataaatatccatgatcgttcccaattggctttgcatacctccgacttcaataggtaatcgcttctgaaatttattacctttccggggctttgcccaactcacaataaaaggcacacgcataccaccttcaaactccgtacccttttttcctctcaatggcgcggaagaaccatatccccgttcttctcctaaaggtgcgtctccaccgttatctcccaaaaagaaaatcaaagtgttttccgcaattcccaatttttcaagttggtccatgatgtcccccaaagacttatccatgccttctatcaatgtagcaaaggccttggcctgttccttcttatttgggtctgtataacgggacagaaaacgtttgtcggcctggaaaggtgcatggacagcataatgagccatattcaaataaaaaggacgcttttcttccacagctttagctatctcacggttagcctctatcgtcagggcttcgctcaggaaagtatccgtaccatgatatttctccagatcgggtactgctctggctttcgaacctttaatatgaccgtatccccactcaccataataactgccgggatgtcctattcccgaccccgcaatgttgacatcaaaaccaagattcaacggattttcaccctcgctatccatacagccgaagtgagcttttcctatatgaatcgtcttatatccagcctgttgcagaactttcggcatggtcggaatatccttcgtcagccctttccaattccaatcaggaggcccgaaaggagtacggttattactttccgcattaatccagttcgtagtgcgatgtcttgttgcgttttgccccgtcaacaatgaggctctggaaggggaactcacactttgcgcataaaaagtagaaaagcagatcccttgttcggccatcctctccatgttgggagtatgataccaattatttaaagaatgcctcacccgatttccgctcccgtctgtcagaaaaggaacggaagtatccataagtcccatatcatctaccagaaaaacaataatattaggacgttcctgataacctgctaccgttcccgaggctgctactaaaagatttaataaaaacataattacattcaatgattaaaattcggttctctacctacaccttgccatatccctaaacatccgaatatcctatcttatttagtattcgctttttcccgttccaatatggctttcatagctttcaccttctccggatatttttcagccagattttctttctcacctctgtccttttttagattgtatagttgatctaccggagcattaccagtctcagtccttgtcagtttcataaaagctgcccctttattcggagtaatatatttccaggctccgtctgaaacagacaaagaaccggaagcttcgatcacataatcacgtcccttacgatcagttcccaaaaaggctttcaactgattctgactgtctactccggcacccggctgcatctcttgtcccaccaattcagccattgaagcaaataaatcaatctgagacaccaaagcatccgaagttttaccttttttcaccttatcaggccagctgacaataaacggaacgcgagtacctgcttcaaaattactatatttacctccacgcaggtttccccaaggacgatggtcgcccaacagttctaccgcctgatcctgatagccatcatccaccaccggaccattatcactactcaatacaattaaagtattctcccgcaatccctgtttctctaatgcctccagaatcttacctaccgtataatcaaactgaagaatggcatctccccgataccccattccgcttttgcctacaaaacgaggatgcggaaaacgagggacatgcacatcattggttcctacatacaggaagaaaggtttatcactatttctttcgataaaacctaccgttttcgcaattatcgtatcagcaatgtcttcatccttccaaagtgctttacctcctcccttcatatatccgatacgggaaattccattaacgatagcctgattatgaccatgattcggagacggtttcaaatttgtcaataactccggattattctttccggtaggttcgccaggaaaaggctttgtataacttacttcaataggagccgatggatcataattaagcacctgttgattttccatccatacacaaggcacgcggtcaccggtagcagccattaggcaagagtagtcaaatcccaaatcttccggccccggactaactttcttgttccaatcctgcgtacccgttttatcccccaagcctaaatgccacttcccgatagctccggtcgtatatccggcagacttaaacatatctgcaatcgtagtttgctccggccggataaccatacctgcatcaccacgggcaattcccgtatcatttctacgccaggcataatgtccggtgaataaagaataacgtgacggtgtactcgttgaagctaccgcatgcgcatccgtaaaacgaataccactactggctaatgtatctacatgaggagtctgaacgcgatgggcaccataacaactcatatctccatagcctaaatcatcagcaataataaagattacgttaggttgtttttcttttgctttcttctgtgcctgaatcggcgctgcgatcaacaaagagccgctgatactcatccataaatcaaagttcttcataatataattgttattgggttattgttttttcgcctttatatatgcaggattcagttctgtcggaatatctgcacgggtatctataagccatttcatcagtctggtatacagttcttttgcgagagtcggttgcaaattaactaaattattcctttccattctatcatttttcaaattaaaaagctccattgacttatcttcataataataaatcagtttccagtctcccgaacggatgatggaatatggagttgctctaaaatctttaccaagcccctgatagccttccaaataagcaggaaaatgccagaaaagcgctctttgaactttcgatgtacctttcttcatccgaccaaaaatattctcgccatcaagcccgttatccggtattccaccagtcaatgctactaaagtaggatagaaatcaactcctgttacaggttctgaaactactgttcccgcttttatcttacgagggtatttcattataagcggaactctgattcctccttcataaggcattcctttggctcctctaagccggaaattattggttgctgccgcagcacctccattatcagaataaaagacaataagcgtattttccgagagtcctaatgagtcaatagcatgacataacctgcctacattccaatccagattttctaccatagccgcataaattgcattcgtctgatacttccccttagtctttttctgatatttatcgaccaaagtctggggagcctttaaaggcgtatgaaccgcatgatgcgccatatagaggaaaaaaggcttgtcttttgtctgttctacaaatttaatagcttcacttgtcaaacgatctgtcaggtactctccctcactcccctcatccaatcccaaatggcacttttgctttctacaataagggtaaaaataagagtaaggtgaaccagccctgtcgccggctatattataatcaaatccctgtgataggggaccggttttactgccatcaagatcactacccaaatgccatttcccgatatgcccgcacacatatccctgctgttttaatgcctctcccaaagtaacaaggtctgtccgcacatcctccgtatttgtaataggaatcaatttacgcttggttttatctcctctcgctgaaggactcacagtatatactccgtgtctcggagtatagagacctgtcataaaacaggcacggctcggtgccgaattggctgccgctgcataagcattatcaaagaaaaccccttcagaagccagtttatcaatattaggcgtctcataataatcacttccggttatgccaagatcattccaacccaaatcgtcagccatgataaatacaatattgggacgttcgttctgtgcatgtaaggctgatacaaacatacacccaccagccaatatcggaaaatataaatgtctcatccgtctcttttttttatggatacttaataagttatctattttttcttatataaatcctgagctgttttaatctcattatgcatcaactgctgatgatacctattggttatttttcgccagccttcttccagccatgagggttcaatacactcatttttctcccatttagccaattttttcgccagtttacgatacaaatccggctctttgtttatcaaattattcatctcttcaggatctcttcggatattatacaatacagaatcaaccccatgagtgatgattaatttataatctcccgaacgaatagcacgtgtatccattttacgccagtataacactttatggggttccccttttttacctttcaggtaaggtagtaatgatacaccgtccaatctattacgtgttttcgatatactggccgcatcaatagctgtcgcaaaaatatccaaagaagaaaccaaaccatcataaggcttgccagcaggaattccattcttccatactacaaaataaggcacacgatgtccaccttcaaatttatttcctttgaaacccttcaaaggataatttgaagactgattggtagtggctcctccgttatcacttaagaaaaaaatcaatgtattatcaaatttcccactatctttcagtccacgaattacagtgcctacgcccctgtcgagtgcataggtcattgcagctagtttttgtctcggatgcccttcaaacttagccatatcttcatcggttgcttgcattggagtatgcaccgcattataagccaaatacatcatgaaaggctgagaactttcatttataaactcaaccgctttttcactgaaagcatcagtcaaatacttctcaaatttcacttgcctgtcattcaataacaggttacgttcatcaccgggacggtcactctttttttcattataaaaataatcacgtccccccgctttcataccgtaaaacaaatcaaatccacgattattaggatgttgttcatccctacttcccaaatgccacttaccaatagcagcagtacgatatccattcgttttaaatacttccgcaatcgtttcttcttccaaaggaaggccattagtacggtccgataagttacattcatagccgaaccgatgtccataacgccctgtgataagacaagctcttgagggactgcttactgtcgcagccacatgagcatcggtaaatacgactccctcactggttaaagcatcaatattaggagtttgcatctcttttgatcccataaatccgaagtcattataacccgcatcatcaatcaagatcaccaatatattcggatttttatcagttttactttctaccgccgagacggtctgaatgtcaccggaaactaacaatccgggaagacatatatactttaatatattcatacttttctttacatataaatttatcttgtaccacaaaccaaagttcttttaccatcccaagagacagcttcaatacgagtagcccctttgggataacgaataaatgtacttgaattatctatagttcctgtaccgacaatacaaacttcaactaactcattaccagcatacgtttcaaatgctacgacatttttccacaccgaatgagaaactgttttcgaaagattaccattagataccccttgattaaaaactccttgtacagaaagttgttttttatatgtatccagactatttccagatatataataaataacaggagtaggtaccggagatttactcttaccatagttttctatctcccctaccatttctttcgttatcgttatttgctttgccggcccataatccccgactttcatattaatctcccgcagtaatcccatctttttaaagaaatcggtcaaattcatctctgatgcatccatcgcacgtttcatgaaatttacatatttttcgccataagtatataccgaattattatcgtgaatagctgcccaatgtacatctggccagaaatcaggtttagaccacggagcatcttctgttaacataaaaaagagagataattgccaaagaggagccaatgaaacaaacggatcagcactataatattcacctttttcagggtcattaacaagtccgccttcatgtgtcaaatacggttttttcttcacaattgcatcattcaaataggcattaaaacgatcggcaactactttatcattataaccttgccttttaaattcagtatgctccaaacgacaagcagcattattcatctgatacatggcttgttgcgcataaatattgtttgttacttccgcccaaccggctcctttcatttgagccacttgattgccatgaccaaattcatgcccgaatacccagatattctgaagaaaaactcctttatcaagcatagcttgttcactattgggaaaattagcacaagtgccattccaattaggggatcctccccatgaacgcacacccaacatacgatttcggggaactgcattgtttttaactaatcccatcatcatatactctatctgcattagttcatcatgcatattcattatactcataatatcatccggacaataagtattaaatgcattaactgtatttatcaattgaacacgttcacctaaaacatccagcatagcattagttacattcaaacgttggacacatatattcgctaaattaagaatacgtttccaatcttcattggtatgtccggcacgtacatcccaaaatcctatttcattaccgtaacatacatgtacttttacggcaggttcatatacttccatatctgtccaatactgtatataccctgtaccgtctactgtcgttattattgtatttaaaccactttttaatctaatagtctgattttcgcctccttcacgccaatccttgatatataagtttagggtcttatcacctatctcgtctcctacaaatataatatacttcttatccttttcaaaaaataatcctgtcggattatcgcaaatacttcttttaccaattgtcaacccttcaccaactgttaccggatttttacaagactggtaagtccgtacccgaaactcactcggataagtattgtctaaaagttcttgtgcaatggcacgtatcatcggatgagtgattttcacaatgtcagcttgggtagtcgtaggtttcaattgagaaaaaacattgtcttcaaaataaacagcatcagccgccagatcaaaatcagtaccttctgctttctgataacattcaaactctgccagagcaacactgccttgatttggttctggtgtacgttcaaatgtaagacgaaaatgagtaggttttaccacattcacatccatccgaatagacggcactattattgactcatcaaacgaaccacatttagtccattccgttaccgcagcagacttatatgctatttccccttttgttaattgattatgtactgttattcccgcttttctttgatgtaaaataacataatcaactttttctgtcccttcctgcagtgtatactcaaatatgataggttcccgttttgcacttgtgcccgatccataatgagtattcagatcaccatcaatagtcttttccggtcccgactttccatcaccataaacagtaccttgaatcatcccaacactttcaacctttaccttaatatcatccggaataacatcatcaacgtttgcagcttcctgttctactgcaacctctatcacaacaggttcatcactttgctcaaccgaatttattcgaattatatctctacgtggagataaaccaatattagcagtcacactatattgatattccgactccaccattcctctcgtatccggtccttctttcaatgtcagccatttttcttcattctgaagggtatattctacattagctgtcactttcatagtaaatgtttgtgcctcctttgataaaagttttgattcaatgtttaccaatatttccggttctgaacctaactgtaccactcgaaaaggtatactttcaactcctgtaccacgtagaacgaactcagcctcacgcctgcccacttcttcattaggagcgacattaaatgtcagtaaatgaatatctgaagccgataaaccaatagaagttttacaccaatcgtatccacttgaaattttaggaaccaattcccaatcagacaaattggtacgtatttttatagttcccgtttttccttcaataggtacattgaatacattattttcgagctcaacagtcaaataaggatcaatcaaattttcttccgtatcactacatgcaaataaaaaaaagagaaatggtaagaataaataagaataaatatgtttcatgattagattcgttatgagtatttaaaagagctataatgtaaaaacatccttccgtctaccgtcccaagaaacagccactaaccggtcgcatccattcggaaaatatgcgattgtctcagtattgtcctcagttcccgtacctaccatagaaacacgctgcaatttacttccctgataggcttcaaaaaccactacattcttccatatatcatgagaaatataacaagattcaccctccacacgaatcccctttccttttataccctgtacaggtaactgttcacggaaagctttgacactattcattgttatataatgtataaccggagatttaggttttggatatcgggaagcataacggataacttcctctacttgcttttgagaaatacttaaatgccggttacctccataatcaccaatttcagtatctacagaccggagcataccgcatcttatgaaaaagtctgttaaatcttcctgtattacatcgcaggcattcttaacaaagttcaattgaagttcacctactgtcagatcctgttcatttgtccgacgtacaatctcacttatacgcgcatagaaatccggttttccaaaatttgtaagtgcattataaatttgtagttgccaaaacggacaaagacgtacaaaaggatttttattatctgaatagggaggcgtaaacgatgttcgagggttatatagcaaaggcttttgctgtacgacacaatgattgaaatgccaattaaacaaaccaccataaactttttgccctgtaccgtcgggagctttggaatgctctatcctaaaggggccttccggacgcagcagatattgtatccatgccgcctgaatattattagtaatttccgttgttccatgccatttcaagcccggacgtacctgattcacatgaccgaattcatgcccgattacccaattggaatttcggatatcttcgggacgaataatagaagaagtacgaggaaaagagactcctttcccatttgcattaggcggacctgcccaactgatacgagcaaacatatggttgttcgtacgataaccgaactgatcaattcccaacatttcctgctgccacagaataattcgatcatacatacgaatcatctccactccgcaatcacttcctttttcacgcagagtttttacatcgaaagtcagatgtacatattttccctgcatatcaatcacttctgctatcgcactatccaacattcgcttccattcatcattcgtatgttgataggcattaaacaccccattattaattcctgtgtgaaaggtaagtttctgttccggagccttccggcaatcctttacataatagcttacataaaccaatcccttatgaggagcataaaacttattatttcctgtttttaaagtaaatacggtagtcttctctttcttttcaccttcagcaggtttactaaagtcgaccaacaatagattcaattgataaccttgtaaatcaggagctgttacctgtatcgtttcgccttcttcaaaatataatccggtaggattctcaaacggactataacgggatgtcttcagctgttttgccaatgaattgatatcagaataaggaatagcaacaaaattgacaggagtagcttgtacggtaatcccaaaacagacattcaacaaccctaaaataaatatacttttaatagtcatcttgtttaaattataaataaaaagaggcttatatgaacctaagaggtatcaatataagcctccttcaaacaataattatgattaatatcctggattttggacaatatgaggaaccttattggtttctgtcataggaataggcatcaaatattgtgcctgtttaaaagtacgaatattctgtaattcagttggcacaaagaatgtctcatctgtatctccttcaatattcataccccatactttctcacccaaaatgcctgcatctttccaacggcgtaaatcccagaaacgttggttctccaaataaaattctatctgccgttctctgcgtactatctctctaagtccctcagcagtattcgctttctccggatgattcgccttttcccatgcctcatcaatagtaggaatacctgcacgaacacgaattttatcaattaaacctttagcttcttccaagcgtcccgtcgtattctccaaagcatccagttctattaaaatctcagctaaattcaaatacatttctgccatacgaattaccggataggggtaatgaaccggaccattctgaaacgcaggatgaacgaacttcttattcagatatccggtacctgtgtaattacctgtttgtccatcttcccagccattagcatcattttttctgaatttcactactatagcctttttggcattattcgtattaactacttttccattatatttcatgatctcataatttccattatgaaatgcaatccacgcaaagaaacgcggctctcggtttaaatgtaagttcaaagttcttccatttgattgagcaaaataattatttccatcataatttactggcatattcacaattttatatctcccggaataatcgaattctttatcctcatcaataggtaaaccattttttgtgtagaacatctcaacagtctgtaatgtcggagccaaaataccccatgaatttttatatccattagatgccttttgttttggagtagactgattctgaagagcatacgtcccttctttacgagtatcaaccatgatcacttctggatttgtgccacctacattatccataaaagtataacgtacagcacgttgagctttattcacgggccccggtttattagccgaaggagtaccagcatcatcatgtcctacttcattatataaacgataaccggcattctccaaatcagcaattgccttacgtgtcaccgtctctgcagttttccacttttctatatcaaccgtctgagatattagaaaacggccatccaacggacttttaaagcctgcaaagaaatcagagttgccattaaacaaaggagaagcagcatacaaatgtactttcgcacgtaaagcttctgccacatacttcgtaaaacgcccgtaatcatctccatcatgtttctcagctagccctattgtttccgcctcagtaatcttttcatcaataaattgaactacttcatctacactcgaacgctcgggaagttcttcaataggggtaagcggatctatgttctctctcataattaccgaaggaccataggctcggaaagacaaccaatgataataagcaatcaacaaggtagcttctgctttataatactgtaaatcatccggttctatgtcaggtgtaaaatccaccacactcaaaaactgataacattgatgcaaacctgtccaaatattatcataatatccttttgtcaactgtggcgaactcggtgaataataaccacgcggaaaagtaacccattcacttttttcgatcacattaataatctccgctgccgaatatttatcaagcgcttcactcactcgcggatcaggcatttttgaataacaagaatacaaataattctttgctgcctgaggattctgataagtgttttccggtgtattacgctcatccggaacaatatccaaataattacatccagaaaggagtactcctcccattaataatataattgcaaactttttcatagctttttacttaaaggtgaattgaattccaatattaaatactctttgagtaggatatttcataccactaccaccacccatttccgggtcccaatgcttaaaaggtgagaaagtcaaaagattcgaaccgttcaaataagcacggaacatcttgaatgtatagccaatttctgcattcttcaacttaagaaaagcaccattccgcaaccaatatgaagaatttaccgtattattagcattggtatcacgagtcaagcgtggataagctgcattcgggttcggattactttcactccaataatcatcagcgataaacttcataacaccacgagtagcatttttcccaaacggatgaaaacccgacattagaatagaagtgcgagctgccccttggaagaaaaatgaaaaatcccaattcttatatttcattgaaggaccgaaaccatatacaatctcaggatcttccggatagcccatataaacacggtcattggtattaataatcccatcacaattgccatttgcatctggttgatccacatatttaatatcgcccggctgaggaatataccccaatgtttgttcggcatgtgaatcaacatcagcctggtcacggaataatccatccgctacataaaccaaatgctgccctctggaatatcctacactggacaaattaggatacaactggaacggaggttcgtcacgctccaaaatcgtattatgcgcataagtaagtgtccccttaaatgataaaaagaaatcttttgttatctgtttattgtaatccaacgctatatcaaatccgacattcttcatcttaccgctattctcatagattttcgtttcaccagttcctatgaaatcaggaagagtatttactttctgcatatagatcttactacgaatctctttaaatacatcaaaattcaaattgacttgatgaaataactgcatatcaaatccgacattcaactttttccctacctcccaagttaaattcggattataataacggttccatacgggaccctgtaaattaacattctgatttactcccgtcgtatatttccatttatcactagataaaacaatatcttccaaataagcataacgctcattgataccatcattaccaaccaagccgtaagaaccacgcaatttgaaatgagatatcacatttgaaatcggttcccagaacttttcttgtgagatgttatatcccaaagctattgaagggaaaaaaccgaaacgattgtttttcgcaaagttctccgaaccattatatccaaaattgacttcagccagataacggtcatcataagcataagacagacgtgcggcaattccttgtttccgacgtggtaaagaagataagagattatccggtttattattgtctaactgatcctgattatataaaagcattgcattgacatcatgtacgccaaactttcttttatagtccaaataggcttgaataaatattctacggtcacctgtggcagctccctccgtatttaaagccgttttttgttcattacccactctacttaatgtatattctcccgtagcttcattgtattgatcaatctcaaattgattataaccagctttacgtgtagttttcgtctttgaccagtttttaaaagaagccaatacatggagttttaatcctttagttaccatttttaaatcctggtctaaacgaatatttgcatttaccgtactggcaaattgctttttataaccgacaacgtactcagctaccggattacggtaaccgttgttataaataccaccactcatacctccccaaagcgtataaatctctttatcattacgagccggatatacaataggaaaatcaacgggagaagcttctcttgacatagaaaatattccatcaacacctgctgaaggccctttccaatcccgtaaacttacatttaatcctaatgatattttggtagtgtttgttgcttttatactcagattattaacaaaatcataacgcatcacattgatattgttattgtatgagaaataatccttactcaatgacttcagattaccagcatcatgcttcaccgatgcactcataaaataggtaaccgcctttttacctccacgaatattaaaattaaaacgctgcgcaaaagcattcttattaaacatttcattataccagtctacattcggataaaccaatggattcaacccttgttccgtagccctgattttagtatcatcatataatccggttgtgatgccacgggttgtcaaggcttcattataaagcttcatatagtcaactcctcctaccatttcgggaacagaagtaagttgggacatagacgtttccaagcggaaattaattatcggctttaaaaggtcctgaccggatttagtagtgacaatcatcacaccatttgctccgcgggttccatacatagccgtagccgtagcatctttcaagatagaaaaactttcaatgacttccggatccaaagcattcaaatcgctcgaactgatttctaccccatccaatacaattaaaacgcctgtagcatcgccgaaggtcgatttaccacgaatccaaaaatcagctccatcagcaccgggctgtccgctacgttgtatagcaatcacaccggccatacgtccggcaaaactggtacttaaactggaagaaggaactttcaattcggcagggcgtacttgctggatagacccaaccattgtttcttttttctgtgtagcaccaaatgctgtaactacaacttcttctagtgacttcgtatcttctttcaactgaacagttatcgaagaacgatctcctactgaaatttcctgagtcacatatcctatataagatatgacaattacggaatttttatcggttacttgtatctgaaataagccatctagatctgtaataacccctgttcccgtattttttaactggatgctggcaccaataatcggatttccttgttcgtctttcacaagcccctgaagcaaacgttttttctgcgaaacgctttgctctgatacttttttctctttcagaactatctggcgttctttcatttcatatacaatattagcttgctccgagaccttatccaacagttgcttaacagttgcattttttaaactcacactgatttgtgttgactgatttatcacttccggcttaaaaaagaatacatattggctattcttttccacataagaaataacttctttcaaagttacatttttcagcgataccgtaaacgttttggcctgcccataaaccggagatttagcctgcaaagcagcgaccaaaaaacaaaaaacaaatagaaggagatacttgccgtttttcctagctacagaatcctccttagccataaagttaatcatagaattaaatgtttaagaatgttacatcggtaattgtgtattaagcccctttctgcatccgaatgatatttgcggtatcatcaacgaatagggaaaaacataaaaaatcatggtcccatagtgtttctcatttataagttcataaatattagttatttttctcgttcattctattgataagacgaacgagttctttattactcctcaatttatcagaaaaaaatgtgcaaaagatttttttagtgaaattgccctccagccaaaacgatctgacgcaatttagctaccgagcgtcctaccagattcatacacgaatgagaagacatctcaaacatgtctgctagttcatcccacgaaaattcttgaacaaatcgaaaatatatggcatttctttgtttggaagacagttgctgaaaaccctttttcaataattggaccttctttaggtcagaatcatttgtctcaaaaatctgcatcaagcctgtgtcgtcgataggaatatcaacgtactcatccaatggcaagctacggttacgggcagctttggaggaatctaacagagcatttaataaagtacgatatagataagacttcacataagataaggtaggaagagaagaatgacttacgtatattttaacaaacatatcctgcaaacaatcttttattgtttcttcatcaaagttcagacgaagggcatacccaaacaaaggagaataataacgatgatatagttcctcaaaagcaactttatcacctttcagtattcgtgtccatagctcgatatccgtcatgtgtcttttaaatagcttgcaattaatgataaggtttacaaatgtagcttttttctattaattaatatcttcctccacagttttttccgaaaaaagtcccgactttctatataagaaaggggactgatttttttaaatttatatagttttcagaccaacgtaactaccaagcgttctttcactttaatgcaagagaactgagtaattacctttttttattttgctcatagattatattaaactcgtaaatagaaggaggagcggtagctcgagtgactttcagtcgaatacttgacgtataataattatatggaaatcgaataactttacagtctcccattggctcatcgctcacatagataggtatccacttacctttttgtataatctcaatttgatagccttggattctatttttccgatagttcgaaaagccatcattcccactgtgagaatcacaatattcaaaaatagttattttattaaacgattttgtcttatccaatgttacagtaagagttgacaatgtatcattcactgcagcagcccaacgagtctgcataccaccatcaatagcatgaccagcagcataatgaggatcgtcacctgatactgatgtcgcttcagcaacctgattcattgaaatacacgtcccatttttaggcagcggttttcctttcttcaaccctaaacgttttcccaactcaatggcagcatttgcctcatattcacgtatgcgaccagactcgtcgggtggtatatttatgaccaacgtattcccgttactcgtacaccaataaaataattcttccagttcatctaaatcccgtacaggtaacaactcacgcttctgaaaccaattccatgccttactcaaacataccgtatgttcaaatggcagataataggactgtccgttatgcaaatattgcttggcatcgttttgatgagcaatcttcggatcccacaaacggaagtcactagggaaatagtgaaatgtataacagttgtcaattgtcatagagtccggaagcacatttttcctacttcccggctttgtctcaatggtatgattgacacctaccgcacaataaggttgcagttcttttaccaacttatacacacgtggtaaatcccagtcctttacactacgtgcccaacctccatctaaccacagttcacatacctcaccataatttgtcaaaagttcagtaagttgactacacataaaatcaatatactttgtcttatctttgtcatggaatgaaggctccttacgatcccataacgaataatagacagcaaactgaagtccatacttacggcaagcttttgaaacttcagccacaatatctgtcgtgttagaagaagaagcaacatcatatgtcgtagagggactatcccataaacaaaaaccatcatgatgctttgttacaagcaacacatagcgaaagcctgcatcccgagccacacgaacccattgctcacaatctagattagtaggattataagtcaaagctggtatactgccgtcggaccactcttgctgacaaaatgtattaataccaaagtgaataaacataccataagcacgcttttgcatcgcttgttgcgttgcattgggtttgatagccggaacaagtttctgcgcccttaaggggagtactccccataagataccatataacaaaacaaatataatctttctcataacaacaataggtttataaactttaaacttacaaataaacaatagaccacagtccaaccattaattaccaagcactgtccataattttgtgtcataaaaaaacttaaagctacccacctcttattattttattgcaatccacgttgcaggttaataaattatccataaatttgtattattaaggattttaatcatcggtaattggttattatcccttttttcaattcggatggtatttgcggtaccatccgtttttattgctgtcgcttcggacttatataataggttccatcaattatctgacaatcaatcggcaccactactgaaatcatcctaaccagttcggacaagggtaaacgtaaatccaactttccatctacaatttcagtttgtatagcgggtgctacaacaatggggatatcatagaaacggttcagcctctcgaacacactcatcaatggttcgttgtgcaagataagcaaaccattaatccaagccgtatagtcttttgcacgcacgcgcttaatccggctagcacgtccttcacttacaacaaccaggttatcaggcttcatcaaaacttctttttgatatttgtcgctaagcctcacagagccttccaccaaaactacttctgactgtttttttcctttataagcattgacattaaaggaagttcccaatacttctacattaaattgatgtgtctttactacaaatggtctacttttatcaggagttacatccagataaatttctccttctacatatatttctcttcggttatcggcaaagactctcggatacactacccgtgtaccggaattgacatgcatccgtgttccgtccgaaagcgttaattgactatatttccctttaggaacaataatttgattaaacccttttgcctcatctgtattttcactcgtttcactaacagtatgttcttcctgttctatttgaatctttccattagaagaataaacaataccgactgtgtccttatctatctgtactttccgcttgtctgaaagcaataattgtacttgaccacttgcttccgctacatctgccaactggcctacataggcatccaaagtccaactgttatccgaaaactctcctttatctatcacatatgccaacaacaaacaagcagctaccgatacaggtattaaaaatctttttatatattctcttactcgtgttttcttctcctgttgtcttatttcacggttgattcgttcccacatatccgtctcatcatcccgttctttacggtcatgaaatctaaaataaccgatgattttatcgattattccatccaattcttgtttttgttgacttttcataaaataaagctgctttatattgcgttttagacggcgaatcgaaattcttcaattcatctctccaaaacagttctattactatgacgaatagacaattgattactcctcactttttactacattttttcaccttcttcatatcactcaatactaaagatataccttttttaaaaaagggacattcaaattataaaaagagctgtatttaatatcagcttataagggaaaaagaaaaaatgaaggcatttgctaatacagaaatacgtatttccaacactaaacgactttatcgatcagtatgattcacatctagatattttatttactaataaacactatttggatatataaactatcattttactactcctttcttatccgttttttgatatcaaatagaaaaaaacagctcaaaaagcacttgttttttccttttcaccgagtaagaagagcttccttggtgagaaaaggagcgacgtacaccgattatgaaacgataagttctcatcaaaatattaaaaatggaacactatcataaaaaatctcaataactcattctctttttttgttaaaactgaggagtaacccaatacacaatcgtcattgtaataaagacagcttaaatagttcaattcaagccaaataactgaactttaaaggaaattgcgaacgaataaattgtgtattaaacaaaaccataaacgccatgataaacaaatatctattatcatccttagtctgtattttattttatacagcacaagcacatccttcaagcaaattgccccaatataatataatcaatgacttgtcctcactaatcaagaatattgcaaataaagacattcaggatgatatactatctcttaccggacaatggggtgtaaagttggatccggacagtatcggtgaaaagcacaactatttcaattccggtcatacaaccatgccgattcagctacccggaactcttgatgaagccggctatggaactcgcacagtcggttcggattatggtatcctcacccgccgacacaaatacataggtccggcctggtatacacgtgagtttgtcattcctcacaattggcagggaaaagaaataacactttatctggaacgtgtgctgtgggagtcaaaagtctggattgacggacgtttcattgatacacaggaaggattaggaactccacattatcatcgtttaggaactttaaatcccggaaaacatcgaatagcaatccgtatcaacaacgacatgatatacaatataggtgataagggccattcatacggagaatacactcagattatctggaatggtatcctcggaaaaatagaactacaatcttcacccacactttcaatagaccggatcaaagtatatccccatacatctgacaatcgcttggatatttccttcgatatacaaaatcattcaaataagacattgaaaggagaggtttcctatacattgaaagaaattggaagcaaaaagaaaatatacgcatacaaaaaagaaataaaaggagaaaaaggaatacaacatcaccgggaaacattgaatatccggcaagccgtgaaacactgggacgacctacacccaaacctataccggttggagatatgtatcacgcaaaaaggacaatcccaacttaaaacggttgatttcggatttcgtaatgttactgcttcccgatcaaagattctaatcaacaaccgacccgtattcatgcgaggtaatctggattgcctccattttccccttaccggttatccctcttgcgacattcaggaatgggaacgtattttccgtatttacaaatcatacggactcaatcatgtgcgtttccactcatggtgtcctcccgaggcagcttttacggcagccgaccggattggtatttatattcaggcagaagtattatggattgactggtggatgtccgtcgtaagaaaagagcgccctgaaatgaccacacgcggactgccgaaaggattggggcataatccaagtgcagataaatttgtaccggaagaactgcaacgtatgattgaggcttacggtaatcacccttctttcactatgctttgtattggaaatgaattaggcaactcaaactttgatatcatgcaacaatggattaaatctttgcaagaaaaagatccacgcagactttacgctatttctaccgcccgaaagattatgccggcagatcaatatatggtcactcacaacataccccagacaggcggtacttatggcataaacggttccggcactgacaatgaccgagaatctatctactctaaggcaacaatcccggtcatcgcccatgaagtcggtcaatatccagtttaccctctttggaacgagatagataaatataccggtgtattggaagccagaaatcttgaaagcttacgccaacaagccgtaaaaaatcatatagaacaccaggacagaaaattccatgaagccagtggagcattacaaacaatcttatataaaggtttgattgaaaatttactgcgtaccccctcatgtgccggattccaaatgttaagtatgactgattattcgggacagggagaagctttagtcggttggttagattcattttgggattccaaaggaatcatcacgcccgaacaattccgatgttattccaacgacattgtccctctggcacgtttccacaaatatacctggcaaacggacgagacgttcaaagctcaaatccaagtggcaaactacagtgatacaactctaattacacctacgatatggactttaaccgacgaaacaggcaaactgcaacagcaaggcagcagagaagtgcccttatcatccggaaaagtaaatcaggtagattctttatctatcgatctctccgaaattacatcaccgggaaaatattacctcgatgtcaccattagcggcacaccttatcacaaccgttggagtatttgggtatatcccccttataacatgccacaaaccaatatcatcatccacgacaaatttgattcgactgtcattagtgccttggaacaaggaaagaaagtattgttagtggcagatcaactcgggaaaaaggataactccacccctctttacttcacacctttgttctggtctacttctttctttcccggtcaaagcaacaccaccctaggggcatggatagacaaagctcaccctgcattctcgcaatttccaaccgacaattatactgactggcaatggaaagaaataacacaaggccgttcgtttatcatcaacgaacaccctcaattacaccccattgtacaaccggtaagcgacttccatatcaacgacaaactagcttctatcttcgaatgtaaagtgagcaaaggcaaattattagtctgcggttacaacctgaatttggattcaccggtagcacgacaactaaaatacagcttattacattatatgacacaatcgaacttcaatccttcttattcaatggaaattgatacactgaagaagatgtttgcatatactcctaaagcaatggtttccgttcctaaaggatttgaaaactcaattctttatatatcatgcgggaagcaaatgaagaattccggttctgctccttggacagccacgctcgaccatactgaaatacaagacgaacgttgtaaatacaaagttacttgtgataatatctggaaagatgagaaagggacagcctggacaggcaaaaatatgacaattgaaatacaaactccggaaggtattattggagacttatatgtaaaatttgaagactggaatcaccaaaatagagcagggctcttatcaatcgaaggacgagagtccattttagaaaatcagaaaggaaaagaacggtgggtgaaactattcatcatgcgggaagatacaaatgacggaaaaatagttctcaaaacccatacgaaacaaggaggtaacctaatgattagccaaatagcattcataaaacaataagcggtcaatactctcacaacaaagatttccaaaacagaggccgtctcaaaataaacttgagctggcctctgttgtttcatttcagattgaagttatttggattcttctcaaaaaaaaggagtttacaagcttctttttgaagatttcattctttcaaacagtttttttcgttgccataagcctcctaagaggctacttttgcaagattgtgtgctatggccagcaggccgaactcaatttccaccttcttaagtccacgaaggtggaacctcttgaagtgcttgttgttcttgaggtttccaaatacggcttccacatcctgtggccgctgactgcggtatttaagaccttccggtgacaggagcttttcacgttccctttccttgatttttctcaggcggtgattcacctgtactatcctttctgaccggcttctgtgacaccggcatcttaacgggcaggcgttacagttacatgccctgtatcttgatatggtctgtacaaaaccgttgtctgttacccgctttgcatcggaaagtctttccattctctgtcccatcggacagtacatgccgtcggtttcttcattataataaaagttggcagacaagaacggatcgttctaggggataaaatcgcctaaacatggaggtaaaagctgattatcgttggaggtgtaacttttaaacattatctttgggctattgtacttgattccctaagatacaaaaaattagggacacgggcaagtcttggctgagcgaagtttgggcttgcccattttttgcagacacaagtgagaccatcccaaaatcattttgagacggtctcgtttttggaaaaaatattataagttagtaacgtgtcactttatttgtagttgacttcaaatattcgaaacgattaatcatctcacccaacttcttcggatatttatctgccaagttttcctgttgacttatgtccttcttcaagttataaagtttatatccatatcccaagccgataaactcaccgtcttctttgctataaggattaaaataaggaggaatcaacgcccagtcaccctgacgatatgcataattgaacatgccttcgataacaagttcttcacgtccttttttactctttccgaggaaagcatccaacgtattctcactatccaatttttcaggataagtttgtccaagcaaagatgcaaaggaagccagcaagtccatttggcatacaaagacatcagaaacctgcggcttcactactgccggccaacgaagcatgaaagggatacgtgtaccaccgtcaaacatacttgtttttcctccgcgaagcggacctgctatcttatgatcgcctatcaattccactgcatcatccttatatccgtcatccagcactggtccattatcactagttaacactacaatcgtattctccgccaatcccaactggtccagttctttcagaaattcagatacacaccagtctgcttccagaatagcatccccacgcggtcccataggcgactttcctgcgaagcgttcatttggaacacgaggaacgtgtggctgatgtaatccgtaatagagaaagaaaggagcatttttatggtcgttgacgaactgtttggctttatctagaaataattccgccatttcttcatctttccattgtgccgctttaccacctttctggaatccgatacgaggaaccccgtttactatcgaaccggcatgacctacactcggatgcatacgaagcaattcgggattattctttcctgtcggttcaccgggaaagttcttacggtaatccacatacaacggatcgttagggtctaatcccactacacgtccattttcgagaaagacacatggaacacggtcattcgtagctgcctgaataaatgaataatcataccctatttcggccgcaccaggatgaacatccttattccagtctacattaccgtctcccagtccgatatgccattttcctatggatccagtagcatagcctgcctgtttcatcaatttaggcaaggttatcttttccgtatcaataatcaatgctgcattgcccggaagaatttttgcgtccttacttgtccacggataaagtcctgtcataacagagtagcggctgggggtggaagtagctgccgtacagaatccttgtgtaaagcggactccttcattagctatacggtccatacccggtgtagagatgcgatgagcaccgtagcaacttaagtcaccatatccaaggtcatcggctacaatcagaatgatgttcggttgttgcttgttgatcggcttttttctcggttgtgcttgtcctgccaataacgtgttaggtatcgaagaaatacctactaatgtacaaaatacatactctaagtttctcatgccttatttaattaagatttatcacttgctataaatacacatcaaattttgatgttccccacacaaaatccctgtttctattcataatttatgaatttaaaacgttacttgtgttttagcaccattcgctgcaatagcatttactttataatcttcgggtaacgtagtgtttacagtaaacgaagattgcggtgatacaaatattacttttcctgcatgatcgctaacttcataaacagccacattccgccaaccatacattgatagtttggaaccggaacgggtagctgttccggcaactacggctgcattatttatataagcctctaagttactatcacagatatattccagcttatgtttcggaacagaatatcctaaatttcgaattctatttttaagagcacttacctgagcttccgtcactaccacttttccatcgccataagagtcgttgaattcatatgaaccagatttcagaaaaccccattttacaaagaaatccgtcaaatccaatcctgccgccttactacaattataggcgaactctatttgacgttcaccatcggtaggcaagtccttattgacacgtatatattcatatacatccttataaaaatccgtttttcctaatacatattccatatataactctaactgccaaaaaggtactaatttatcgaatacatctcctaattttgcatgaaaaatatcattattcccgaatgctaaagtcattgcatgctcgtagtaattactgtaagcattacttggcgttgtagttagcaaacgggaattaattccatataatttctgaatgtacatcgaacaaatattgtttgttacttcggtcattccaaaccatttcagtcccggacgggtttgattactatgccctacctcatgggcaggcccccagttgttagtcttcatttgatctacactgcacagattatccatcgttgaaaaatgatatgccgtatgataagaagtggaatacatataatctccctgtccgtacatgacattgaaatacatacggtttctgaacatacgattgtcagtatccgtaccgatgccaccattattgttgtattttctcaaacccatgaatatctgttccttatatacaatatcatcaaaaaggttaattaaatctctcccattagatgtactttttagtttgctgacaggaaaagtgagatgagcataattccctacaacatcaaaatagccatcgacagctccgtttagtaaagtaccccactgttcacgggtatgttttgctacatcaaagtatccgttaacacttcctgacgcaaagtgtatctttacctcgtcatagtctaccggattaccattgacatgatacatcacatagattaaccctttcttctccgaaacaattttatttatacctgtgcgtaagctataagaaatgctgttattgaaaccatcagcattaggggtatccatgtcctgtactcttagactcaaatgttgcccgtgcgtttcacctaccatgacaatcaatgtttctcccgctttcacaaagatacccgtaggattatccaatagactataagtgcctgtcttattgatagtagcctgtatatccggatgttgataaggtttgaaatccgcaatacggaagtcagccggatatttatctttcagcatataataagctatgttcttaaaaaatggataagtacaggcctttatcatttcctctgttatatcagaccgtaacttggaacaagtaacatccgtaaaaagggtcaatgggtcaaaaccttccggattcctagcaaagaacttcatttccgcacaggaagcatgcccattcacaccggacttaataatcaggcgaactgccttcggtttctgtattgtgttatcaaaagaaaaagatactaccgcacctttggaaccgaaatcgaaattggtttcattcgttacactttcaaaagccgggtgttcttcagtcgatacctgaatttccacttcaccaaaattcccgttcgaaccgcttatacgcggataatagataaagtaatcaagtgcttccgtattttccttgaaatagtaagtcaacatgaccggataatggcttgtaaccccttctgcaaaaggataattagaatgataaatagtactcatatcactatcaaaagatttttcaatcccttcaccaccatgtgccgtagatgcttcccctctgactacttccaactgaacatcatccgcaattccttcagtatcaccaaatgtatatccatccaatccattctgaataactgtaacttctgctgaaatattagagttcttatcctttatcactatcttctccgtacgtacactacttccctcatgagtatctacggtaaacttataaggtatttcaatcgttgcagcacgtgtgtctacctctttctttatccaagaaggataggtgacatccagttccgcttccgtcagattggtagtgacagtaaaagcgactgttccacctaccggaggcaaagtaaaaacgaaaggagatactaaaatatcagtatcagtacctaactgacgtacaagaatcttcttattcaattttccattattgataaccaccgaagcattacggacagttttgttcgggttacttatcacactaatcttcacacctgcacccgaattgacaggttcagtcttacaccactgttctccttccacatccacagaagcggtccaatctgcaggaagtgattttacatcaataacaacagagcctgcttctttataaaaatctgcattttccaaacctagttccaatacagccaccacatccttatcatctttacaggacgacaaggaaaaaagaaacagggatatgaatacatataaaaaataattcttcatattcttttcgtttaaaaaggactgactaaaaagaatttatgcatcactgcattatccccttgccagcccttaagattaattatttgttagatttaagagagagcagttatttaccatataattcaaactccgagagtgcccatgtattaaatttactcggattagtagaactatgaacctcaaaacgaacataagtatatgaatcgcctagcaacatcgtcggacaagtatcataataagtggtagccgatactgggagaccgtctgcttctgcagtaaatacttttatttctttccagtttgcgccatcattactagcataaatgatgaacttagtaggatgctgattagtatttctagttgcatatcttactctcaacttggaaatagcactattcagatgaatatccacttgatgcgggaaggcgggcgcacctcctccgtaagtaacttgtgcctgagtagccaatttgccatccaaccagtcggcaaatccattaccgtcagcaaaatttgtgcctatcaaggtcatcatatccggtgtgagcgtaatcttcggtgctgaattctgtaatccgataataactgtattttcaccggaaaaggcatattttgtagaagttatttctaacggaagtgcaaagttcccttctagattagttatatcaatcttcacggtcagattcgctgtaacattacctttgctaaaggtcagtttaccgatagtatagttgttgcccttgtctgatattaatgaatactcaatgggagatgtagcattatattcatccaatagttcctttttaactgttacatcgcaggttatatcttctgtgagagcagtattcaaagtcacaggaagctcatatatatactcagtcacaccttcagtaatagtaaacggaagtttaaatcctgactctgaaagagagaaagcaggctgataaacagtaggcttcacgatgatatacttatttttttcattaatggtagaagtaccgtccgtaagctccaacatcaacacataagtgaaattacccgtactcaatacagaaattttctcaggatgaaaggttaccgttttaatcttatacagttctttttctccaaaagagacggtcatgtcggaaggcaattcataacaatcagcaggcaatggcttgaaattagtcttattctcattattgtaatattcaatatcgaactcattcaatactttcaatgtagctgaagctaacatattcaggtcgtttccacctttgtcaatcgttatattgtaagcagcagactctccagtattataaaaggtaatatcctgctcattactattcaaaatgcaaaggaatgattcataatcatccagataatcgtcttttccatcgttcaagcaagccaccatagtcagcaacaaaccgcctaacaacgaaaggatatatatttttgtcttcatataaattaaaatctgattagattgttttaatgctataattctatctccaattataattttgggtcaatagtttgttacggtctagttctctctgactgaacggatataaaaagtgattagctctaaacacacggttttgaactactgtcctacgccaaaaagtatccggagtatcttccgtgttaacagcctgtgcctctacattcataccatagataggtccattatccgtagttgtagcaatcatccatgtacgagtatcaaaaaaacgatgattttcaaatgcaagttctatcctgcgttctctgcgacaaagttctatcaattggtctattgtagcttccggatagacttccgttattggatccatacctgaacgagcacgcagatcagcccaatactccatagctgttgtacgatactgactgtctctcgatcttttctcccattccaaagctgcttcaataaagtttaagtaaatttctccaagacggaatgtcggaaataccatattacccggttgattattcacaaaactagcagtatgatcacaaaaacgattaactagatatccacttctcgaatggtcatgagaagtatttgaattaccatcttttgccaagttacacaatacatagtcatctttacccggaccgcatctccagtaactatcactccaatacacagctatataaaaacgtggttcacgattaataaacatattccgagttgctcttttataatatttagcctgatatgtgtcacctttacttaaatattcaagaaaaggatttgcaaattcagttataccattttcactatatccagagttttcgtcaaccttaggagttccatctatctcgtatccagtaatcggatacttaccattatccatcgcataagcatccacctgttgttgcgagggtcctagtgctccataagctgctccattacctccttttttggtctttacacccgtcggagtcgttcttctggctataatagcccgacttgcatatccggtagtccagataagttctttgttccaatctacctgcgtaatgccaagataattagcatacgggtcatctgaagcgtctctatgtaactcgtatactcccaaatctatgacagctttggcagcctgcactgcttctttccatttttcattactataagtttgaggaaacagatattgatctgataattccggaaaatcgggtgttgtaggattctttacggtattgtataaactattaccattatatagatcacgggctgaataaagttttaaccgtgaaatcacagctaaagcagctccctcggtaggtagcccatattctgcatctaccgtccaagttgttttcccgtgttctttaaagtaggtagcacattgagtcatttcatttacaacataatcaacacattgttcccaagtattacgcggacgatatagagattctgtcgtagcatcatatggcaatatctcatctcccaacaaaaatataggtccgtaattacgcatcatcaagaagtaataatatgctcgtgcccaacgtgtataccagtaccattcatccttttcttcctgtgttacggtaggatctgaacaactgtaaacattctgcataaaaatattacattcacgtattccgttatacaaattaaaattagcacctggtacgctggatgcattccaagctcccgtattcattgactcagcagctgcattcgatgcattgatcaattcatcagtagcagtgctttgaggagtactaacatagccagtcaaatcatttggcaaaaaactcattgcattcaagaaatacccgcgtgtatatgctctcttctgccaaagttgttcaaaagtaagatcttccgtttcctgtttatcgagaaaactttcacacgaagttaacaaaggaataaccccgcaaaataacaatatatattttactaatgatagtttcatattgattctgtattattgattagaaattagcatttaggccgatagtaacggtcatgttattcggatattttgctccattggtagtatccagcaattcagggtcccataatttaaacttactgaatgtaagaaggttcgtaccagcgatatagaaacgaaaagacttaataaaggtcttgttcaaccaggtttttggcaatgtatatcctatttctgcgtttttcaaacgaagaaaactacggtcacgtaaccacatagtagacgactggctattgttagaactgcctgcttctgcaccgtaactcaaacggggatatttagcagaagcattctgttcaggagtattggtcgttttccatgaatacttataaagatcttcatagatagcagaacgatccatattatcactactgaaaggacgcaaaggtgtacccgctaaatagatagaagtacgcgctaccccttgaaaaaatacacttgcatcaaaattcttccattttgctgtcaatccgaacccgtatgttatctcaggaagatcagtatagccaatagcaatctggtcatacgtatcaattttaccatctccatttacatccttgtacttaacgtcaccaaccctatattcaccaaacatctgtttcggactattatctatttctgcctgactttcaaaaaatcccaaagcaataaatcccttacgttgcgctgcaccattacggccaaacggtttgccaatagaattttgatatttatattcccaatctggttcatcattatccaacatctggttacgcgaaaaagtaaagtttccgcgacctgtcagtaaaaccttacctacctgttgctgatattccagtgttccatctagaccagataccttcgctttacctacatttacatatggagtagtagtaaggccgacaatagccggtagcccagcacgagccagaaagataccattacgttcttcataaaaataatcagcttgaatctttaatttttcgaacaaacgaagttcaatacctgcatttaccttagttgcctcttcccaagaaacatttgtattctcaatttctcctacacgataaccagtacctgtctgatttgcagtttttccgtatgaccatcctgttactgtattgacagaaggttcataagcccatcttctggaggctccaatgtcatcattacccactttaccataagacgctttcaatttcagatcattaactactttagtcaacggttcaaaccatttctcactggacaccatccaacctattgcataagctggaaagaatccaaaacgatggccacgagcaaagttctcagaaccagtgtatcccatattgaattcggcaaaatatctatccatataagcataagtcaaacgtcctgccagtccctgacttttatatggtaatgattttttctgattctctgctgtcaataacttataaattttatgattgtacaaaaacaaagctcctatccgatgtttttgagcaaataaacgagtataattaagagaaccttccatataagtagtaatcttagatacggtcactggagcagcatacgacagattattggaaccctcatatattgttttataatttaatgaaccgtcttcatttcgacctgttgcatgaaactgcggtggggtctttgaacgaacttgcaacgtattattagatgcatcccaagaaaatttaatattggcagttaaccctagagttatcatatccaatttttgagtaacaccaatcaatgattgggctgaattccaactttgctcacgataaccggaatgtaccagcagattccatggattactaccactggctgcacttggtgcagaaagagtaccatcagaatattccacaggaaatgcatttggagaggtgttaaatgcatatccccaaatatcagatgtcgtagctcccggtccccacgaactttcataaatattagccaaattcacattgaatgttgtagtcggtgtaacggagaaatccatattggcacgaaaattgaattttgtataatgaatagaagaattataatcataaacatccccggcgtttctaaatatagagccttcattataaaaaccacctgatacataatacttacaaatatcaccgcctccagaaaggttcaatgtcacacgttcgctcgaagccaaatttcgatacatctggtctaaccaatttacatttggatataaatcaggatcagaaccatcactatatttttgaatagcttccgatgaatagcctccatcaccattacccgtcaggcctttagcctcattatacatctcggcccattgtacagagtttgccatttgcggcatacgtgtcggagttttaaaacccatttccgcacgtacattaatacgaggtttgccttcactgcctttcttggtagtaatcaaaataacgccattcgcaccacgtacaccatatactgccgaagcagaagcatcttttaagatagaaaatgtagcaatatcatctacatcaaccaagtccagttcccgttcgataccgtcaaccagaactagcggagtagagttacctttaaaagaagctataccacggatataaaaatcggaagcactatttttacccggctcaccggatgcctgcatagagacaacacctgccagttgccccgccagtacattggagatgttagaacccggtatattgagttcacccacatccaatgaagaaatagcacctacaacactttccttcttctgacgtccgtaacctactactacaacttcgtccagcttctttgtatccggatttaatattacatcaataacattcttattgctgatagctatttcctgcttcttcataccaatgtatgaaaattctagtacaccaccaataccttcaattgtaagagaatagtgaccgtccaagttggtaacagtacctgatgagctatttttcaaccatacactagctccaataataggctcttttgtctctccgtcaattatagtacctgtaattacacgttttttcggctgttgctgttcggcattttgagcatttgctactttaaaaatgacttcttttcctttaattatataattaactccacttccattaaatagatttttcaagacttcctcaattgtaccactacaattaatctctttttttgatttatctttcaagtcactatctttataaaagaaagtataatcactcgtttcttctatataccggatagcctccttgagagagaactttccctttatctgaatattcccttgtgctgctaacatcacagttggccataataataagagtaatacgagatagctcaaataccgctgtcgatacaaaaaaatacattttttcatgttctcattttattagattagacatatagtttattaaaattcaatttctgataatgattgtgttacctactctttcttctttcaaattcataaggaaacagattttgagaataatatcatccaacgcttcctcctgacgaatggtaccactgaacggagaagtttcgtccttaccttcatacactatattagcatgatacatctgattaatgatagaaatgaggcggttaagcggcatagcgtcaaacttgaatttaccatcctgccattctatattttcaatcttccgtattcctatttccgcattaactgagttataaaaaatcttttccatgggcttcattactatctgtttgccggtcgcctctacattaaactcaacacaaccgttgaacagcgtaatctcattatttcccgcttcttttttatctactagaaaccgggtaccttttacttcgataaaggctttatcaatataaactttgaaggtgttcccatgctgcttacgtacatggaacatggaactaccctccaaccatactcttctgtctttattgaagttcttggcaaaacggatggaactattcggatacatccatacttcagaactatcgggcaactgatacaacatattccgggtggctactacctcagcaaattcttctttaacgaagaaatcactattcacataaaaaagccaacctcccaaaactgcgactaaagccacacaggctgctgccaacggataatagaactgtcgaattgacttacgtttcgaacgtactttatattctttgactattttagcccaaatataatctccgatttccggatctactctttccgagttttccgctatcggattttgttcctcccattgcactttcattttgcgctctatcatatctatttcggacagatcctttaattcgtcttttttcagtctgtctgaaaataattttctaattaattcacttttataactcattacttttctctattatttgttattctattattaaatacacatcaaaaattggagaccctggtaaaaaagcaattttttttttagaaagtatttagctaattttgtcccaaaaagataaaatgatatctaaagagttgattagaaggtttaaaaatggagatgaagatgctttttcatttctatataaacattactgggaaaaggtctatggctttacccggctttatctagtttcttctgaagatatcgcagaagtggtacaagaggttttcatcaaactctgggaagcaagacatctgatagatgaagagcagccttttgaagggtttctttttatcattacccgtaatatgatttttaattattcacgcaaaaaattaaactactcatttctgaaagttactgttctacaagcaatggaacaagaatatgaagaagaaaataagttggaattatccgatttaaaaaagtatctttcagtactaatatcacaattgcctccacggcagcaagaaatctttcgcatgagccgggagcaaaacttaacctataaacaaattgccgagcaattgtctatcagtgaaaaaactgtagaatatcatatgggattggcattaaaatacttacgaaaaaatctctatttgctttctctgtttttgtctgtttaaacacaataaatacacattaattcctccaatcaatcttgattgaaggaatcctgataatatcattgataattgaaaaattctgttggtatgctttctgttttataattaataagaagctgttgccggaatgccggctttcttaatcaattctacaatccggtccaactcttcgtgagttgccttctgcaaatcatgatcaggggtttcacggtcaatcgtgtaaatcatcacttgccggggcgcgatttcttttaccacctccaaccagggaagtacaaacttatctgaggtattatccatatcctttcccaggtaactccctttgagaaacatagtttgaatgatacagtttcctttgaattctttcatcttctcgataatcttctttacagaatattttccattcggacgatctaaccggtgaatgtattcttcatccactgtatcaagtttcaagatattattatctatcttattcagtgcatcaaatacagcagggcggtcgataaatgtagaattacttaatacactgactttcgctttcggaaaatacttgtcccgaagtgcaagagtatcgtctatgatttccgggaaatggggatgtgcagtcggttcaccatttccggcaaatgtcagtacatcgggagcaggaccatttgcctgcatatcttttagtttttcttcaagggctgtacgaacctcttcacgggtgggaagaagcttctttgtacgatgctcggcattgaagccgcattcacagtaaatgcaatcgaacgaacaaactttaccgtcgtccggtaataaatttattcccaaagaaacacccaaacggcgggaatgaacaggaccgaaaatgggtgaaggaaaaattacagtcatctttttattgtttaattaactacaacaaagataactcaaaaaactccaggttattaattctattgaacattttttaatgatgttcttcattcgaccggtatacttccgcaaaacattcccctgactataactgcactgccattactgaaagaatgccttactttaacttcttacgaggagacaggtgtactacttttctcaataagtcgatcgtaaaattgaaatcactgaaaaactgtatacctatcgatccgtctacatcggtatgatttgaagaatcaccgcccgttgaagcttgaagagtgacaggtacatttttgctcactacactgcctacttttaatgaacgtgcatgaccataaaaaactggtgttgaatgccccaaactcactgtcgccccacttccctcgggtttgaatccgctcagtaacagcctgttttgacgaacaaaccgactaaaagctatcaaataataattagctcccgtatccattataaaattacccgaaatacttttatccccggtcagattcaatacggaaggtaacatgataaggctcggtaccctaagggggatcatacgtcctttcctctgaaagatataatcaccgaaggtataaagcgaaatagtttgcgtatcaaaattcacttcagtgatatattttcttatcagattcagcccgatgatgccatccgtaccgttacgcaccctctcgaaaattgcaatattctgctttttcaatgataaactgtccgacagacgaagtacattatcggcagatatctgcaccgttttccgtccgcctacaacactcgcttcttgcgaatgactgactttcagtcctatgctatctgccaacgaacggcggatagccattccgtcagctcccgtatcaagcaagaatgacatcacccggggactatcgttcaagcgagcatacaaaatgatagagccaccctctatccgaaaaggcagaacggctgccaacgatgatttccggtaacggctatcaccgaacagccggtcgaaataatcgacaaaaagaatttttccggactcattgaaagctatcatgctcttctcttcttgtccgccggccaatgtgaaacggacctccagactggtgacgtttccctttgttttcatcctcttccagtcgggttggatagattggaaagttataccttccataatctgtttcaacaaaccggatgcaaagggcaacgaataaatgctgatagaaaattcgggagcaaaactcttttgtgcaacagcgatttcttttgttttcaaaccgtcttccatgtgtttcaaagcaagacggatgctgtcttgatccgcttttccgtttgctgtcaacggaaagaacagaaagcatataattattctcaagtatttcatagtctattacattgaaaaaagggtactgaaggctatgtattggacatatagatacaatgcgctggacatatagatacaacatgttgggtatatatggccaacaaacaggatatatatacccaacaactctgctatcaacacccatttaagtgcttgtatatcagtctattgataatattgtttattttttcaatgcgtcgttcaacactgcccgtatctcggaagaagaaggacgcggagcatccatataaagcagactgccgtctttgccaaccagcataaaacgaggaatacctgttatcttataaggtttggacaatgcaggtcccgccatgtctccggcaaaaagctgtacaccgggaagctgttcttttatcacgaagtccttccatttctggatatttttagacgcatcgacactaatccccataaatacaatatctttattgtctttatattcggcttccagtgctttcatggccggcatctcctttttacacggaccgcaccaggtagcccagatatcaatatagacaaccttgccacgaaaatcggaaagagagatatcatttccttccgcattagggaacgtcaagttaatgatttctttcttctccatactctctctaaagttatcttcaatacgttgccaacgctctttctgactgtcggtgatgaggaaactgccatattctttcttatattgttccagtcccacctgtgtcttgctcattccgctgaacattaacgctatttctcctttaatagtatcattactaatcatcccaatgtcttctttcaacatagccgaaacgggattctttcgtttctctccggctgatgaggaatcggataccatggacttgagcatatatgcattgacaaataaacgcaatccgttgggataattgagaatgcctgcagtacgggcgatagcaggaatatctatctgccggtaataatcaataaaatcctccttctgcggatgtgctgtccttaccgtataaatgaactgtacagcattgaacagcaaatcatacttacgaaaatcagcaaacgtagtgtcgaaaaccttattctttgttttcttcactttataagaacccagtttatccagtttctcttccaacagcggaaaaaagtctacatacgtactgtgttttcccataaaatacacagctttatcttccagaggaaaaataaaatcatgccaacgggccatttccttgttctccgccgtattctcttttcctatcagttcataactttcgggtaatatccgcacattcaatgggtcgcccggcttcatataaaatgtataacgattctgaaataccgaagaggaagtacccaacacgaaatacccttcctgctctggggtaaacgtcatccggaaactaccgtcttctcctaacgcagaagtggccacttccgacaagttaccgccttctacaatcttgaacattttgactgcttttgttttacccctttcccacacgccactgacagtagatgtttgggcaaacaaacttcctgcacagataaacgcaggaaggatcattaataataattttttcatggattattcattttgagtatatatataaaaatctttgcaagaatagtacttcgatttagctaccatattattcagtccgatatagcgggcattcacaggttcggcaaacttgaagtacatgtgttcgcatcggctgggaagtgctattgaaccgaggctcaccgaaagacgggtagcattatagagttcctctccggcataagacaagtccatgcttgcaggagacatcgagctattgttcgccctgagatatattccggtgatattgcgaacttcatgtcccaaatcaattgtgacactggccggaacatccaatacccagaaacctccttcgaacatactttcccaactgccttgagtaaatttatattcttccgacagggctttataaccgctcctttctgtctgtcgcacaccaaacgcagtatcatcgctttcaagcgtgtacccaccggataccgaattcactaccagataatatacatctgtacgcatagtcttgacaggctctgccgcacccggtgacgtaaccgattttatctttatggggacaagataattatcacccgcaaactgcgacgtctctcccttataggcgatatgtcccgtagccgttgtactgccggccggtaacgcaacatcggccaattcccagtcactcacggcaagggttttgaaagctgtcccatatttgctattgaaagctgctaccagactattgtctacttccagcccgatatttatatcattgtctgacgcaatataagccataagcggcagatcgtatccggtgaaactttcgtttcctgcaaccatcacactgtttttgccttcttcaaatcccacaccgttctcctgtgtcacatccaacgtcagataagagactcttttactgtaatctacttgtgcatcatagcccgaagccgaagtgatacgcaccggcatgatgtatccgtccatactggcaaacccgtccaaaggccgggtcaaggcaacggtaagtgtatctgcagattccatacttccctcgggaatggtcagggtcgatttattcaacctgatccaattacttgcaaaccggtgataggatgtttcatttttcttattgtatacatctaccaacaatgtatcaatagtaactttcaccgtcaaattgccacctgccggagaagtacaattgactaccagtttggcaaccaatgtatccatattggcaaccttaccttctactgtacgttgggcattgaaagcaagtgaagcatacttatcgctgataaatactttgttggaagcttcagcagctgtctgtttctcataattgttgatgtcatccgtgcatcctgcaaaaaagctgcatgaactgcaagtcaccagtaacagacatattatttttctaagtttcatatttttcatctttctaaatcgtttaaggtttataatccatacctactatctttccaaaacctttccacgacatctctatcgtttcatcatcattcaccttgtgcgtcgctatggcaagtgcaccggaagaagcattcggcatggaatagaagtctattctgcctccttcatcctttcctaaggaactgttgtaggtagcgattcccaaatatttactgcttgtactgggaatcataaactttaaagcggttatttcattgtaaccttcgggaagaaccgcatccgttatttctctaaccactgcattgctacccgatacgtcggcataaaacacccggttatcttcagttgcataatagataaacgcattgttgggttcgggagcggcagcaataaatttggcatggtcaatgccggtagacgcatcaaatatacacgttctcaatttattatctttcgtcaccaaagcagtagtgttagacggcaaactatactcaatatatttaaatgtaccgttgctttgtttcagaaaagcaaaagaggtcattttacttatagtggtatagcgttcgctcatatacagcaatccttcatttttatcattaaagttgaaaatatggtcggaagactcatccagaaaatcttcggtaaagaagaacgatgtactgaaatcactggaagaacggtatgtagtctggcaactgaatttattttgttcctgattgaaaaacatagtaattctgctgccacacgatataaacggagcgggctcataacgttcactatcgtatacggtattccccgtacgataagcattcatcggataggaaaagaagtagtagacaggataagtgttgtgcaaataccaatttccctttccgttatcatctttcatgtacatatatatatgcggttttatattaccattcaaagcaaaataacccactttcatcttttccgctacaataggccgcccaactgatacatagtcttgatgaagaggcgaaccattttccacggaactggatatatcatacgaaggatcccaactgaaatctgctactttcaaacgtgtcgtataatggtcggtcagcaagtaaaccgaacggttagaaccatccggctgatatggatgaggagcagtagggtcagcaaagatattgagttcataaggtttcaccccttcacgttgcagggaaggtgcggtagaagccagtatattatacttcggtatatattgattctgggaattctgaacgatcattcccatatcaaatccatcttctttctcatacaataagacatatcccttgttgaaagttcccgctactcttatactgaaaatttgtcggtaagcaatatccgtcactttgttttttgcttcgaaggcacaagtataagtactattcggagatccgataggatcggctataacaaaatcaaagtctttaccctcctgcaatacattccatgcagaaccgcttttataataccacgtataatccagattgtccgtattacccgaagttgtattgagttcaggagtaatcaacaaccgttctcctacttccactgaataactctcctgaatgttagcaatttctgtcacccgattgattgcctcatagtcataattgcccttgtcttcattacacgcaaacagagacagtatcccggcacatacaattattatccgtaaatctattatatatttcatatccgtcatcttttattgaatactcggtagaggagtcttgacctcttcaccaaactcatccaccaaaggttctccatgttcttctttatattttaccaagtaacgattaatcaatgaaatcattccaaaagaaacttccctcgaaaaacgtttggtaaacgtttccttacccgtcgggtcgttatcttcaggatcaatctcaaaatattctctagtcactccgcaagcctcatatatcacattcatttttgcattactgtatgcgccgaatgtactttctaaggtcatcgacgaataagaagccgcccataaactgggtttttcagccagtgccgtaaaataaatactataaatcaatccgtttcgattgtttcctttatcatatctggacgttgaataatccgtatgaaagttttcattcgaagccaaccggatacgggcaaacaacatttcattatcaacggcttccgtacgtttcagccttacttccacattaccaaagattgagttggcaggtagatacgcagacaaaatctctatatcttctccttctgtggctgtcgattcttcaggtatcatcactacttttaccgcccggtctgtttccgaaactcgtcccattagtttgataggaatcttaatgatactgtcgtttttcaacggcctgtcatatcccatattaacagtgatctgatcttcattttctccaaagtcggaagaggatgcatcagcatatttaaaataaattcgaggaacatcttcataagtcattaaatcctcgtcagcgcaagataccattcctatcccaagaaatagaaatgtataaacacaccatttaaaactgtttcttttcatattgaatttatttttaaagactgaattatatatctgtttcaatattcggaataggtatattatacattgcactggcatttactgccaccgaagctcctccgtatccgggaaacatctgatcgctcttcatccgcttatgataaaaataaacttgcccttccccataaaactccttataatattcactctctatgtgggaatagaattgttcatccatatcattctccgtcaagtaataaaagctagtctccggaatgcctctatgagaagaaacagtgttcaatagttcggcagctgtctttttatcaccatctttcaaggctgcttccgcctgaatataatacatttcagtaacacgaatcaacggttggaaatcgaccaacgcgggaagattactattggctgaaatattaaacttgttagagatgtaggtaccattttgcgaataggagacagaacttcctccctggtcgttactttccgtccactgccgggcacggacatctattattgctttcaggttatcaccaaaaccggaatagatgttttgaaccaaattatcacggtctactgcatataaatcgtttatatccgttttattataaaaggagttataattggaaagcatatccggattgttgattccaaaaactacttcattgaagaaagagtaatccatattggcaagtacggttgtaacatttgtccatgagaacacttttcctttttcccctatctgatcagtcactaccttggctgctatagccgcattcttatagtctcctatatattgcaatacacgggcttcgagcgctttcaccgcataataattcatacgtctgttacgattcttataaaaatcacttatcagctccttactaatagcagagtcatcagacagaatagggtcagcagccaacaaccgttccgcctcacgaatatcctccaataaataatccaaatattcatcggcagtggagtacacatcttcttcataaccgacatgattcagtatcatatccgtagttctactatacggcaaaatcttattgatattcgaacgatcttcccatctggggccgaacaaacggaaaaggtcaaaatgaagataagcccgtaatccgtatgcctcacccatcaatacatctttattgttactaccgataacagcagtcgatccctccatgcttttcaaaaaatagttgatattgagaagcgtattatatccgcttttccatatatcggcaaatatgctttcagctgctccatactcttcggaccgtccgttacagaggaaaaacaatgtggcagacaatttatttcccgacggttgtgacggaggataggtataaaagtgccccattgcgtccagagcagtctgagataaattcgccccgtaaagggaggtagatattaattgcctgtaaagcccgtttaaagctccatgaatacctgcttccgttttatactggtcttcttccaataccttgtccttcggtgccacatccagaaagtcgctacaggaagtaaagaagcctatggctactatatataataaatgtgatatatttcttttcatacttaattctatatttattcgtgtattgttatcgttagaaacgagcacttaatccgaaagatatggctctctggaacggatagtccgttcctctttcccgtttcatttcgctcaagtcgaagaaatcattgaatgaaacattaaaccgcaggtctttcaggaacaaacgcttaatccattcgtctctggaaaaatcccaactgatacgtgcactttcgccacgcagataattgtcgcgttgaacaaagcgagatgaaatcggagtctgggtagttaatgaaatacccttgaactgtgatacatcaccggcattctgccatctgctatacaaagcacgcttatcctgattataagcaatgttcgatgcagaaatattttctaccttgttaaacaaagccgagttgaatgcaaacgaacctaagttataacgtaagttgacacttgcctgcaaattcttgtaagtaaacgatataccgaatacaccccgtattttcggattggtatcggctatcttcacacggtcgtcagcattataatcgaatgtaggagttccgttcttggtgagaaatacttccttacccgttgccggatcgatgcctaacgaacgaactgcaaaaagggcagtaggactttcaccatcctgatactgtatcattgagtttacattcaacttactatctaccgaagagtctttcttataggcatcgttcaagttagctagagcttctccaaatcctccatatacagatttataagtatttccgttcaaacggaagttcagcataatgcgcttttccagatttcgtatagcataccaactcacattaaactcaaaaccattagtattcaaatgaccgaggttaatgggtaaagtagacaaaccgctggaaggcttttgctgaatagatactaccaatggattggtatttgtatgatagtagtccatggtcaacaacaaacgattatcccagaacataagatcaatacccacagaggtcttctttacaacttgccactccaaattaggattggcataaccggacaaataagaagcagtaccgaaaatatcgctacctgcataataactatatacattacttgtcaggttactgacattctgattaccgttactaccaaatgaaccacgtaattttaattcctgcatccagtcccagtccttagcaaatgattccttgctgacattccaaccggcccctaccgaccagaatgtctggaatttcttatcgcgcccgaaagaagtggaaccgtcactcgaaagactggcatcaaacaaataacgatacttatagttataattgaaagtccccagaaaacttactccacgactaatgctttcgctatatccgggtgtcgaattttctttaaaggaataagcaaaagaaggaatggcacctactcctttcggaaaaccggtagctacaaatgactcggtatttgaagaagtagacctgatttcagcgcggccattgaaagtcagattatgatcattcaaagaaagtgcataagcgataccggtattcatggtataacgccaacttctggatttcgatgaggaatattcaccttgtttggtataatccgacgaagcatacttcgtatgagccggatcggtgaagttcatattgtcagtgttggttgtattcaaactcattgaggccgtccaacgcagattatcaataatataccaattaaggtttgtgttattagtaacggacagtattttagatctgttttcggaaggcaacatagcattgtaatatggattagtagctgttatatcggcataattcgcacgtttatacacatccagatcacgagggatagtaccgtcttcattagtaaccggataataaggattagcatttacaaactctgaaaaggagccccatgcaccattatttccatttgttatgtttacattcaagttattcgaaatattaaacttgtttttacggtaagtcatacgcatatttcctccgaatgtctggcgaacagaacctttcataactccttggatatctttgaacatagcacctatctgatacaggaatcctttgtcacctcctgacacattcaatgaatgagattgtgtgacggcagtttggataggtactttcaaccagtaagtatctactcctcttctcacattctccaaagcccgctgatattgtgcaatgctttctctgttgcctgaccagtcattcaaatcaccataacgaccggccaagacttcaaattccagtttttcggcagcattcatcatgttgtaaacactcaagtcggcccatgccacttgcgcatctccactataattgatcatcacttcaccggctttgggtttaatagtttctacaaccaccacgccgtttgctccctttgaaccgtaaatggcagtggaagcagcatctttaagtaaagtgatagattcaattctattgatatccaaatcattaatctcttgcaggctagattcaaaaccatccaaaataaacagaggttcattgggattggtcgtcgtatcatcataaattccggaaatagtcatcgtagtaccaccacgcatggtaattctggacatggtattagggtcggaccccatcgacatatcatcagcaactacgaaagaaggatccaacgtttttaaactttgaagcacattaatattacccacagccttcagttcctcctgattgactgtcctatacgaaccggtaaaccccattttattacgttggataatacctgcctctactaccacttcatccaatgctttggtatcggttttcagtaccaccgacatctggggtttcggagataacgattgggattgcatgcctacataagatatctttatccgattgctttgaggcacattgataagtctgaaattcccgttcgcatctgtaatggtgcgaatagaagttccttctacctgtatggttgcaccaattacaggtagtccgtcttcttcagcaataattttaccttttacttccgaaataacattctgaggatttttatgtgtaatattgatgaattgcccttcaatgacatacttcaaaggatgcttcccaataattacctttaaaacttcttcaatcgaagctttctccacctttccggtagaatgataagaacgaacttcatcgtagataaaaagtactttatatcccgataatttctgcaaacgtttaaaaatagaaggtaaaccttcatttttaaattccattgttatttgctttccattaccaacttgtgccttaacataaggtgaatggacataacagaataacaaaagtaaaacaatcaatttccatgcttgtctttccataaatccgattggttaaataaatctattttttatattttatacgagttttataaaagaatggttacccataaacagatttattttccaaaaatatttttctaaccggatttatttcttgctgaatagttgttttttactcgataataaggctttcacctcctaaatagacatgaattctttccatacgatttaacaactcaatcaaatcagaaactttctgttgacggtttgccagaaaatgcatacgcagattcattatctcactgtttctaaattctatatctatattataccatttacctatttctttcatcatatccaccaatgctacatcgtcgaaataaaagaatccctccttccaatacaagaatgtttccgtatcaacttcatcaacggcaaatgttccgtctgaaacgagttgtgcactttgccccggcttcatttctacagtttgtaaaccacaggtatcactgacggcaacttttccttcgattaaggtaacacggacattgtcgggggtgtagctacacatattaaattctgttcctaatactcgaacctgaacatttccactttttactataaaaggatgttcagtatttttggttacattaaaataggcttccccttccaaagaaacaactctttcttttcctttaaacaccgtaggataagacaagcgactgtccgaatttaaaagtacttcagtcccgtcggataaaactaccttaaaagtttctcctctcggtatacttaatctatgtatctgtacttttttatttcttattttcttattctcagtctgaatagtattataagcaatcttctgcggtgataatttcaccgtagaagagggaagtgattgcactgcttttttcaaaggttcaactttttcttcaccggcaacttgcaaagtaacttgctgcggggcgtggtctgcctgaaaaactttaatactttctatatccgattccggagaaaaggacatcatacgtaaaaccagtataataatgattgttgccgctactcctgcaacacttgtccataaaatatagagctttttatttcgcctgtccagatgttttcgatgaaaatcagctaaagcctgctgtgtattaatagaaagtgcatttttttccatttgcattcctattacagcttctgcaatatcactgcaggtctgaaagcattcctcattctctcttaatgcctgcaattgatcggaagtaatatcagaaacattttccattatttccaaagcttccttttccgacttatttatatatgtattattttcatccatagattattcattagatatataatatacgttttaaaattcattttggttacctttttggcctaattcttcacgaagaatacgcaaagcttttactatattcttatgaatagcagccacgcttacattgagttcctcggccacttccttatattttttgttatggatgtaacatgcttccaaaatgtaataattatacggagtcagctttttcatggctttacgaatacataaaatacgggaatccggttgttgtgaatccgattcttttattttattgattaattgcgaagtaaattcgacatattcttcatggatattttgtttacgaaggtaatcaatgcaacgtgtacgaattattgtatacaaataagttttcgctgtaacttcttctattttatcataattacgccacaaatattcaaaagcatcacttacgatatcccggcagacttcgacatcatttacaaaatagtatgcaaaatatacaaattgtgcataccactcattaaacattctgtcaaaagcagctttatcatccatttattctcgtattcttttattattttctggcagacaaatatacattaaaacttgatacgtagttgcatttgtatatctgcttttttatttccatagattaaatcgttgccagaacctatttcattccggttcagatagatagtttctccgaacttggttataaacaaccagtgtttattcaattcatatcttaaccggacagcacaacgaaatccgcgaccttgaaaggaaggagtataaaatgtatagagcaatcctttttctgatacatacacacgggagtcataatcgtccgtacaaaaataactgccttgaacgtcagcaaacagcctggtccaaggcagttgggaggatatcatctgtgtaacctgatatcctttagtagcagctctgtcctgagaatgaaaatgattataatctaaagttgtacgactgctaaacacatcattcaaagaatagttcaaacgataacgaagttgatgatgaaaaataggaagcgttagtgttcctttactgcctgtcaagtcacgttctttctgcttataacgatatttcagatacattgataaattagtacgcggagtaaaagttgcctgaatcaatccgtccgttccacgggaaggtttattaattctgtatttcttccagggaaaagaaaacagatcgaatgaaacaaaaaacctccaatggctgaaaggtgttgtttctaatccaacataatatccctgttcattttgaaccgtacttccttcaccgaaagaatgagcatacatagcccaataatcatacgaataaaaacgatgtatcaacataaactgtatgtcttgaaccggcgagtattgtaatcggttcaaagaagcccaaccttgttttcctatcgccgtttctccctgaaaagagaagcgacgccaacgataggcataatctatccctaaattatagaaatgatttccatgaatattatacttggaataacctgttagttccggttcataaggtcggttgaaaacatagtaaacaccggtgatacccaaccggatatggttctgttgataactaacatttccgcctgttaactgtgatgtgagcaagttctttttatccgcttctttgcgacttctatgtaatccggttttatatacagatgttatttctccgtccgtaacaacaccatccatattccgatgtgaatagaatgcagaaaccgataaacgttttgtcaaagcaacagtagttgccaccccacgaaaataattatattcatccgtagaagaatgacttttgattccagcgctgcgattgttgaaagaggatgcatatattgtttttcccattagataatctgtactcatcactaagccttgcccgaaactaagccgatagttaccaacagccaatgatttcaaccgaccacaattctgaagtaataaataaaatgagtaataatcatatccgtagcgattatgcaaagcagcaaaaggttctccggcatctttttcggcaactccccctgcataaagctggtcacgatatcgaaatgtatatttcacagagttataaacagaaggtcccaaataggtatgttcataaccttttcgtttataaaatggtatatccaagcgagttaacacttcgttcttaccataccttcctgcatctttcaacatagttttccaccgaaaagcaggctcattgttaatagcttttatacagacaaaaggcaataaatactgaatagtctgcctatccagttcctctaccaactgaagttcgtaaatggtttccatttgcccatgtatataaatataagccaataaatgctcaatctgaatatcacttaaaaaaggaaattgttcgagttgttcacgggtagcactatttaaattaacaggttcctgcagacggttggaaagctcttccaattcattttcccaattcagggaattaaccgagttattaatatcattattaacagataaatcttcaagaacttcttccataagattttctgaagggttttgagcactacaagcaggaattatgaacaggctgtttataatacttatcaaccgtaatagttgagtagttttcatcaataaaatgtgtattttcttcttgccttttcacagacaagagcgcaaagatactttaaataggttaacgctctaagaaaatatctgaataataaaattttaattctatttttgtaatgtgaaaaggagacttaacatagtaataatgacgttgtttgctgttttttactgttcactgcatctgcaggctcaggaaaaacaaagcattaatggatacttggttccgatgtgtatctataatggagatacgattccatgtgtccaactaagaactgtgtatatcttccgaccactgaaattcaaaaatgaaaaagaacgcagagagtattacaaacttgttcgtaacgtgaaaaaagtatatcctatttctaaggaaatcaaccaggccattatcgaaacttacgaatatctgcaaacattaccaaacgagaaagcccgtcagaaacacattaaacgggtggaaaagggattaaaagaccagtataccgcccgaatgaagaaactttcttttgctcaaggaaagttgttgataaagttagtggaccgtcaaagtaatcagaccagttatgaactggtaaaagcatttatgggacctttcaaagccggattctatcaggcatttgctgcactgtttggcgccagcctcaaaaaagaatacgatccggaaggtgaagacaaactaacggaacgtgtagtattgctggtagagaacggacaaatctaaattacgtgtctgatgcttattaaccgaaagttagtaaagctattactttcttctacaacattatccttgatttaccaacatcaatttcgtttttacaagacatatataagctatttgcagggcatatatacccaatgtggtgtatatatatatccaccatgctgggcatatatgtccaatacgctggatatatatgcccagtaaacaggatatatccctcctataaagagtacaatgacataacttggattctatacttatgaacaattatatatatattgattataagcgaattaactatattattaactagttataaaccacttattaactaataaggttttaagctgtcaacgaagttttttgaataaatcccagatcacaattcctgtcgttacagaaacattcaatgagtgtttcgtaccatattgaggtatttcgatacaaccgtccgaatggttaataacctcctgctgcacaccttttacctcatttcccattacgatagcgtatttcttacttttatccaattccagttcatcaagcatgatacttccttccgcctgttctaccgaatagaccatataaccagcttttcgaaggttatcaacagcatcaacagcgttatcaacatacttccagtcgacagtgaattcagcccccaatgctgtcttatgcatttcgggatgtggaggagttgccgttataccacacaaataaatacattcaatacgaaaagcatccgaagtacggaacaccgaacctatattgtgcagactacgaatatcatccaacactaccaccagaggcagtttctcagcctgtttaaactcttcggcactgatacggttcagctctgttattttcagtttgcgcatacgtcttttcttttattacattctgattgcaaaggtaactcttttctgttaacacagatgttgataacagtttaaaacctgtcaaaactatcggcaaagattttgaaaaataattcttgcattattcaaaagaaggtataagaggacttcattatgaacattccaaaaaattaaatcaaaactttctatgcagacataaacatatttttcagcacttatctacctgtttatatccataaagtttttaactttgcactttatcaacagggagttaatagataacttccattgaccgatgcttgcattgataataaagcagatagacagtaaatcttcttcttttttcccgttcataacggacttataaagcagaagtatggactaataacttatccgacaagaaaaaacggatttatttgctaacattattaacaggcaatcatcactaacaaaggatttttttaaaaaaggaagaaataagaatattattatgaatgaactcataaaggctattaatgagctgaagaaagaaaagaatgcgatcattctgggccactactaccagaagggtgaaatacaagacatcgctgattacgtcggtgacagtttggcattggctcaatgggcggccaaaacggaagcggacatcattgtgatgtgcggcgttcactttatgggtgaaacggcgaaggtgctttgtccgaacaagaaagtgctggtacccgacatggaagcaggttgttcgttggcggacagttgtccggcggacaagtttgtgcagtttgtcaaagagcacccgggacacaccgttatttcgtacgtcaacacaacggctgcggtaaaagcggtaacggatgtggtggtaacttccaccaatgcacggcagattgtggaaagcttcccaaaagatgagaaaataatttttggtccggaccggaatctgggtaattatatcaattcagttacgaacaggaatatgcttctttgggacggagcctgccatgtacacgaacaattttcggttgaaaagatcgtggaactgaaagcacaacatctggaagcattggtactggcacatcccgaatgtaagagtacggtgctgaaactggcggacgtggtaggttctacggctgcattgctgaagtacgctgtgaatcatcccgaaaacacatatatcgtagctaccgaatcgggcattctgcatgagatgcagaagaaatgtccgcagacaacgtttattccggctcctcctaatgatagtacgtgcggatgtaatgagtgtagctttatgcggttgaatacgttagagaagctgtatgagtgtctgaagaatgaatcgccggaaattacggtggatcctgaagtagcagaaaaggcagtgaagccgattcaacgaatgttggagatttcggcaaagttggaattataagaaattattttggtttacttactggatatctttgaaagaaatatctaaaaagaaaaggagaaacttattgttgtcaagtttctccttttctttttagtgttaatatattgcgaaagactttatgactggattatctttagcttcttctatttccaactttacaacagataaggagtgagttggaaaatgttcgatccgtttatgaccgatacaacttccttcagaaagttgtatccattttccattacacagaccttttagtttatatttcagaactctttctccaaatgctatatcttctgacaatacgatacggcttatattagtctctttgtttaaccggatagatagttcgtatcctttgcctgatatttttcggataggttttgaaaatgtttttcgtataatgtcaccgaattctttcgctctttttacatcagcatcaggaaccaagccgttcttatctattactaaaccaagcagcatattggtattacgtcctacactggtttcatatttaagtaaaagctcatcagtagaaaatatcagatgatcttcattagcgcgccaaaaccaaccaccttggaatgagtcattacggcgtagtgtgaaatcagcttctccgggacaccagtagtttccgtgtggattaccgtataagccttttatcttctgtacgccatcggcggaagttgttgcatcggctgttgcccaacagggataaggagagttaccttcttcattgcctacccagcggattaaattcggatatccataagggccttgaaatgcaatggaattgggctgtaaacgttgaataagtgtcaatatatcagctcctccattttgctgagagagtacgccgccatcaaaccatatttcaaacagttttccgtaattactccaaagttcggtcaattgtgtctctactattttgttatattcttcttgggtgaccggacttcctttcttgacaagtccagggttgtcgacatgtagaaaaccattagcggtagtactggcatagattcctggtttaattccgtattttcggcaagaagcgacaaattcggctacaatgtctccctttccatttttgtaaggtgaattttttatactgtattcatgagccgttgttggccataatgaaaaaccgctgcaatgtttggctactaacactgcatatttggctccaaggcttttggctgtgtgtatccattgatcggtatcaagggaagaaggattaaatgtagatggtgaaggatgggtaccaaattgtcgccaattatagtcggggtggaataccggcatatcaaagtgaatgataactcctatttcggcatttgcccattcttgttgtaattcattcggacatacaattattttctcttgggcatcgagaaaaggactggtaaatgtcagaatagcaaagattatgcattgaatgaatgttttcattgtataatgatttagtatatacatacttgtgttatgatatagcaaagataagagatattaaattttaaagcaaattcttttattaatcttcgatattaagaagaagagtttgatgaattaatcagcacattcaagatttctatatttgattaaatttagtatatgaaatgatattcaattctttctttgcatttcagtatctttttttctacctttgcttatgggttaataaatggatagagaaatacttaataggcatttgaatgagataaactaagtatgaacatcaaataaaattaagtaatgaaaaatattaatatttcatgggccgtatttatagtaggtatattcttctccttaaataatatttttgctcaaagtagtcctccgcttatcgtgtttggtttgattgcagatacacaatatgctgactgtgaatctggaaaaactcgattttatcgaaactctttaggtaaattacatgaaagtattgattattttaataatcaaaaggtacagtttacagttaatttgggtgatatcattgatagagatcaaaaagatttagattcagtattaatatgtctgaaacatttaaacaaaaaaatattccatactactggaaatcatgattataaaggtattacagataataaagtattatataagaagcttaaaatgccttcagaatactattcatttatgaaaaagaactgggtgtttgtatttctgaatacaaacgaaatagcagcttattcaaatgttgtcggaacagcaaaagagcaggaacttttgagaatacagaatcagattaaagtaaataaagaaattcaaggcgctaggtggaatggaggcgtaagcagccggcaattgcagtggctggacaaccttttgaagaaaagcgaaaagaaaaatagaaacgtattgattttctgtcatcatccgttatatcccagaagtcaatttactgcattaaataatatggaaatattagatgttattaatcgctataattgcgtaaaagctatattttccggccatcatcattcgggagcttttggatacttcgatcatattccatgtaatactgtagaaggtatgattgaaactccggataaaaattcattcggcattgttagaatatacaaagaccgaattgaattggaaggaaaagagcgaatgacttctcgacttttcatgcttcaaccataggaaaatacttcatcacattacagtatttgtagctaggggcacaactttaataaggtgttccttttattttttcttagtctatccggttacgtttaacacttaaattatagttggaggaaaaatgtgcttttactagtaattgtatttataatcaggtagttatatcggatgttgttcggtgtatataaattgtccgggtataatataaatcgtccgtatacaatttgtgcagttataaaggaaaattctagcagatataatttaaaataaaacgcgtcctttgaagcgaaaagttaaacaacaataaaatctattacgtatgaaaagacattcaacaattcgcttaccatcaaatagtaagattctatctaagtatttaacatgacaagtattctgttattaacctttatttattattaactactaaaaaattaaaagtgtatgaaaagacgagtcagttctatgaaaataccttgtagaatatggctattggcagccacattgtctgtagggcaagcggctttttcaacggaaatggaaactatttccttttcgacgggccaagatatagcacaacaaaagaaggtaattgaagttactggtactgttactgataattttggtcctgtgattggggcaactgttacagtaaaaggcatgagtgcaggagtaattaccgatacagacggtaattttaagctgaaagttccggtaggagctactattatggtttcttatattggatatgaaaataaagaaatccattataaaggagaaagaagtctgaaaattaaattgaatgagaatgttcaggaacttgaggaggtacaaattatcgcttacggttctcaaaagaaagtaactgtgactggtgctctttcttctattaataatgaagaactattaaaatctccagttgcaagtatggctaatgctttgaccggtaaggtcacaggtttggccagtgtgcaatctagtggacagcctggtgccgatgatgcaactttgtatgtgcgtggtgtcggttctttaagtactgacttatctcagcctttgatgttggtggacggtgtagaacgttccttctttcaattagatccgaatgaagtcgaaagtataacagtattgaaagatgcttctgctactgccgtatttggtgtacgaggtgcaaatggtgttattctggttacaaccaaacgtggtacatcgggaaaagcaaaagtaaatttttcaactacttatgcttggcaaatgccttcaagagtaccggaatttgcagatagctatggttatgcaaatgcttataataatgctcaactacatgatggtgtctcagaggatcaactagctttttcttctgatataattgagaaattccgtaccaatagtgatcctcttgtgtatccaaatactgattggacagatatgttgattaagaaatcagctttacaaacacaacataattttaatatatcaggaggttcggaaagagttaagtattttgcttcattaggagtgtttactcaagatggactctttaaaacatttgaagaaaacggtaatgataaaggatttaagtataatcgttataactaccgtattaatatggatattaatgtaacctcgacaacctctatgcagattaatttaggaggttatcttaatgataaacaagaaccaaattacaataatggtacttacacgcagttaaaatacttatttcgggatatttataccgctgttccttttgctggtgcaggtattgtagatggtaaatgggtagtatcggatactgatcttttttctattggtaattattatgatgcattaaatacttattatgggaaaggatataataaccgtactcaaaacacattaaactttgattttcaattagatcaaaaattggattttttaactaaagggttaaaggtacatgtgaaaggagcatacaacagtggtgtaactatcacaaagcgtcgggaagggcgtgccaataagtatgaagcgatttataatacaaataatgagctgatatataaaaagagtcaggattaccaaaagctgggatattctgaaagtacaggtcaaacaagaaactggtatttagaggctgctgtaaactataagcgtgattttggaaatcatcacgtgtctgcactagctatgtataatcaatctatgacttattatccttatgaaggtagtagtccatcagaatttattggtattccaagaagttatgttggtttggtaggacgtgcaacttatgattataaaactaaatatttgctagatttaagtttaggttataatggttctgaaaactttgcagagggacaacgatttggtcttttccctgctggatcattgggatggattatttcagaagagaatttctttcagccaataaagaaggtaattaattactttaaaattcgtggttcttatggtattgtaggaaatgatcgtgttagtgattattcccgttttctatatttacctgataaatatttgattagctcaggaagttataattttggtataaatacttcaactaatattgccggagcggtagaatctaagaaggggaatcctaatgtcacatgggaaacagcggctaagcaaaactatggtgttgatatgaagtttctcaaagatcgattgagtttaaactttgactattttgttgaacatcgtaaaaatatattaaaggcacgaactgtaactcccgattacttggcagttagcttgcctattgcaaatattggtaaagttgataataagggttatgaaatcaatctaaagtgggaagatcgtatcaatgaggtgcgttataacatcggagctaatctttcctacgccaagaataaggttgtatttatcgatgagattacatacccctatgaatggatgcaaactgaaggaaaacctgttggtcagcaatttggctatgtttttgatggatattttacagaagaagaagctgccaattatgagaatctgaaaggaaatattgaaggagggattcctgaccaaggttctggttatgtacctttagctggtgatgtaaaatacaaagatttgaataaagatggaaaaattgatgaaaaagatgtaagagatatcggttatccgaaatatcctctttatacagctggtatgaatttaggcgtctcttggaaaggatttgattttagtatgacttggtctgccgcattcaaaacttctcgtcttttgagttctatgtatcgggtaccgtttggtgaaagtaataattcagctgtcatgaaatacatgattgaagatgcctggacaccagagaaaggaaattctgctaaagcacctgcgctttcctttaagagtaaatcacacaattatcaggattctgatttgtggttaagagatgcatcttacgtacgtttgaaaaatatagagcttggttattcatttccttcttcattaatgaagaaggcgcacattggttcacttcggctctttgtttcaggttacaatctgctgactttcgacaaattgaaagtaagtgatccggaagctaatccggatggaacagcctatccgcttatcaaagtcgtaaatgtaggattaaaagttggtttctaatttaataatgtagaatcatgaggtcattaagaaaattattatatacaacccttttgatgggtactttgtttgtcggggtttcctgcgaagacttggctttcggagacaagttcttgcaaaagccacctagttcagatgtaacgattgatactattttttccacttcagaatacgcccgtcgtatcttgtggaagagttatcaatatcttccttatggaatggaaacttcaggttattggacgcaaatgtggttggggactcttgaaggtttgacagatttgaactatgataacgtaggttattctggattagctaaagtttattatccgggtaattataatgcttctatagaagatagaaaaagttcatatcctacgggacagagaactaaatgtcgttttaacgatgctgattcgcatatgtggacaggtatccgtcacgcttggcttctttatgaaaatgttgaccgtgtacctgatatggatgcaactgaaaaatctcgcctgaaagcggaagctaaaatgatagttgctatttattattctcatatgttgcgtcactttggtgctttgcctattgtagatcacgctattgaccctgaagatgtgaatctaccagggagggccactttacaagctacggtagattttatcataggtttgcttaacgatgctattaactgtcctgattttccatggagaatatcagataatgatttggcaaactgggatggtcgcatgacaaaagctggagctatggcccttaaggcacgtgttttactgtttgtagccagtccattattcaatgataatgctccctactgtgatggagaagcttcatctagtttgatgacttggtttggtggatataataaagaacgttggaaagatgctattaatgcttgtgaagagtttttcactgcattgaatcaaaatggttattataagttagtagaagttggtgataatggtacatctgatgttcgtggggcatatactagtgcatattatgatcgtgggacaacagaaactttaatttctgttagaagaaatatattaaatgccaacgctaattcgatattaagcaattctattcgttggggaggttattgtcctactaaagaatactttgatatgttccagatgagcgatggtactgattttagttgggataatcctgaacaagctaagaatccatttttgaatcgtgatcctcgtttatatgaaacatttattttggatggagacaaatacaatggtagaacagctgcattgacagaagcattggctagtgatcctgtaaattatccacagggagcagactgggcacaaggtggaagcacgcatgtattgagtttgggtacgggactggcatgccgtaaatggggtttggatcggaatacggaatggaaaaaccgtcctatacaatggccgttcctgcgcttagcagaaatttatcttagttatgcagaagcgttgaatgagtataatggttctcccaatgcgcaagcatacgatgctgttgataaagtacgtgctcgtgtaaacttgcctggacttaaaaaaggattggggcaaaaagaatttcgtgaagctttattgcgtgaacgtgcttgtgagttcggttacgaagaagttcgtttctttgatttgattcgttggaagctttataatgtttttgagaagcagttacatggtttgcatgtatataaacataaagatacaggcgaatataaatttgttccatatgaattgaccaaatatccgcgtgtatggtggactagcggtttcgaacctagatggtgcttgagcgcctttccttcagtagaaatcaataaaggatatggccttgttcagaatccgggttgggaataattaattaatgatattaacagaaaatagaaataacaatatactcatgagaaaaagtatcaagttattagtagcgtgtatgttgtgttctccgttagctattgtagctcaggaacaggacagcttgtttgcacgcaaaagtaaagtggctatagagtatggacgcggcatttctttcaatctgaaagaatcgactacggcaactgcagtagcaagtgaggaggaactttcgcataagaaaagcatcaataactctaatatgctttatggcttgattcccggattgcaagtgttgcaaaattccggtaatgcctgggatgacgctgcaacattgagagtacgcggatatggaaccagcagttctactactccattagtgttggtagacggttttgaacgttcactggatcaaataagtgctgatgaaatagagtctgtcactgttttaaaagatgcagcttctacggctctttacggaatgaaaggtgccaatggtgttatcttggtgaaaacgaaacgtggaaggatgggtaagccggagattaatttctcttatcaattcaatatggctaccccacaacgtctgccggaatttgttgatggatatacttatgccaaagctttgaatgaaggattgaccaacgatggattgtcggcacgttattcggctaaagaactggaagctttcagaactcaaagtaatccggatgtatatccgaatgtagattggtgggacgaagcattacgagatcatagctatgggaacaatgtaaccttctcggcaagaggtggtggagaatttgtacgttatttcactcagttgaattatttgaatgataatggtatattggaaccgacaagtgataatgacggttactccactcagttcaaatactcaaaactgaatattcgtaccaatttggatattactgtcagtcctacaactaccgtacagctgaacctgtttggaaatttctccgaacataaccgtccgggagaaacgacatcgaacattttcagtgcattgtatcaagttccttctggagcatttcctgtaaaaacgtctcgcaatgtatggggtggtacaactgtatattccaacaatccgattgcaagtatttccggtagaggctatgctcgctctcaaacccgtaatatgtatgctgatatgaaattgaatcaagatttgagtgctcttgtgaaaggattatcagtaggctttcaggtaggtttggacaacagtgcttcttattgggacaacaataccatgaacttcggatatgaacaagcaacgatgaattgggaaaccggagaaactacttataatactttacgtaatgaaggtactctttcattcagtaaaagtgtaggatcttcggtcaatcatttcaattttggggcctatgccaactatgctaaggactggaataagcatagtctggttgcaactctgcaatacaatatggataaaacaaatgccaaaggtcagaacaactcgaaggcatttatggatgtagtggcacaggcccattatgtatatgaccatcgttatgtactggacgcatctttatccggttctgccgccagcattctggaaccgggacatagatggggaatctttccgtcggtaggtgccgcatggattatgtcggaagaagctgccttgaaaagcgactggttaaacctgttgaaacttcgtgcttcctacggtatttccggacgtgctgattatggtactgacctttatcttgatgtgtatggtacagggggaagttattatttcggaaaaaatccggcaagcatcagtggtatgaaaattactcaactgggtatcactgacatgacctatgagaagtctcacaaattgaatgtaggattcgatttcatagctttcaacaagttatctgttactattgacggtttttacgatcaccgcacggatattttagtaagcggagataatgccgtgtcttctatatttggtttgacagctcccaatatcaataatggagttgtgaatagttatggagtagaaacaagcgtacgctgggcggataaaatcggtgattttaattatcaaattggcggtatgctgactttcaaccgtaacaagattattaaccagaacgaagaatatcgccctcatgactacttgaaacgtacaggcaagcgtttgggacagttcttcggttatgaagtggaaggtatttaccagagtcaggaagagattgataaccgcggtgttaaacaaaacctttcagatgttcgtccgggtgatttgaagtataaagaccagaacaatgacggagttgttgacgcttatgaccaggtagctttaggatacagtgctatgccggaaatctattactcattcgacttgaatctggaatataaaggtttcggtatctatgctttgttccaaggaacgggaaatcagagccgtcttttgaacacttcaagtgtgtattggcctttgattagtaacagtactatttccaccgaatattataacaatcgttggactccggatactccgaatgctaaatatccgcgtctgacttcagaaggttccgccaataactatacgactaactccttgtgggtggctgatgcgtcttatatgaaattgcgtacattggaactttattataatttctcacaggaaatgatgaagaagagtaaattcatcaaaggtgccaaagtctttgcgcgcggtcacgaccttttctgtgtagataagattaaagtattagatcctgaaaatatcggaacaaatcatccgaccatgactcagtatacttttggtgttaacttatcattctaaaaagtaaaatgaacatgaagtattttaaaatcaaacatattgccttgttgcttgcggttacatccgctcctctgtacacagcttgtgattttatggattgcagcgaaacagattattattcaaagcaacaaattctggataacatggaccgtgtgaaacaactggctacacaggtatatagttatttgccgcatgacttctgtaatacatcgggagctatgcaagacgcagctacggatgatgctatccatgtttacgaatcatctgctatccaacgttttgtcaatggtacgtggtcagccaattatacggtcaatgacgtattcggtacttactacaacgctattcatgatgctaacttctatcttgagaactgtgtcggactgacgttcgatgaatggaaatattccgacggttttgctgatgattataaaagttacctgaattatgagcatgaagttcgctttctgcgtgcattctattactttgagttggtgaaacgttatcagaatatacctctgataacgaagacactgacacaggaagaagccaacgaagcagaaccttcggatgcagttactatcctgaacttcatcatcagtgaatgtactgatctggctaatgacaaattgcctgttaattataacaatatgcctggtggagaaggtaacttgcaacgtgctactaaaggtatggctcttgcattgaagtctcgtgcatctctgtatcttgccagccctttgtattctgccgatgatacgcagaaatggaaaaatgccgctcaggcagcatacgatcttatcagtcaggccggtactttaggatatagtctggacccgaaatattctaatttgtacggtgctaccaataaccaaagtaaagaagtcatcatgtgccgtcccacgggagcaagtacaagttttgagtctgcaaacttcccgatgggagttactaaaggctctactaccacttgtccgacagaaaacttggtaagtgcttatgaaatgacagatggtacagcttttgactggagtaatgcagaaatggctaaagacccgtatgcgaatcgtgacccgcgtctgggaatgaccgtagtatataatggtatggcatggcctaaaacgaccccggtagaagtgtttgaaggaggtaagaacgggcagcctataaaaaatgccacgactaccggatattacttgagaaaatatgtgaataacagtgtcacttttgaaccgggtgaaactactaccagccagcagcataactggatcttgttccgttatgcagaaattctgttgaactatgcagaagcaatggtaaatgcttatggtgatcctgactacacaggttcttatagcctgagtgcacgcgatgcagttaaccaagtacgtaatcgtggagatgtgaaaatgccggcgtatcctgccgacatgagtaaagatgcctttttgaaacgattgaaaaacgaacgccgtgtagaatttgcattcgagggacaacgtttctgggatcttcgtcgctggaaagaattagatgatatgcagaatatttataaagtgaaagtagttaagcaaactgacggtactattcaatatacgaaagctttgcatgccacttacaatattcaggataaaatgtatttctatccgatttcgaataccgaacttttcaaaaaccataaactggtacagaacacagggtggtaaatttggaatgagataacgagtatataccgatgagggtgtcagttcattcgaggaaaggcaccctcattatatttaaaacatgaatttccggcattaactaaaatctaaggtaaattatgaaatatagctacaatgtatttttcattatattatggggactttttatatcctgttcaagcgatgatcctgcggttgattctaacgaagggaaagatgataaagaagatcctcttcccgataaaggaactttattcgccgactttgaaacgtatgatacaaccccctatttctttcgttatggcaattcaggcagtagtaagatagacgattattatccgcgttgggcatattcccatatagtgatagataatccggttcaaagtgaagaaaacacttcctccaaagtgctggaatatacttcgatggaagcccggaattacggtttgaaattccgtttttccgaaacagtagatattgatgaactaagaggaatccgtttccgaatttatcaacctgccaatgtgataggaaaagaaacgtggaagggtacttccaaagcagtatctcaacaattaggagttaaactgataggaaggtttaattcggtgaatgattacgagcaggaagaaggagttttgttaaccaattcgttggttgatttcaaagaagaaggagcatggaaaacatatacgtttgcttttagtaaaagagaatacagtgctgccgctacacagttgaagaatggtatagcaggtatagtcattctgccaacgtatagttcgggagtcactttggccgagggaaataagtataaatgttacatagatgatattgaaattttataagaacggaaggagaggaaaaggatgaaaggaaaatgttttctaatatgtatgttattatgggggatgtcttgtgtaaaggctcaaacctcggacgtggataaaatgtttccgaatgtcgtgctcacacgtgaaaactatgataaagtgaaaacagcattggagaaggctgataataccgcttttccgatgaattggtatatcaaacagatagaaactcccgctaaaaatattgtagagagtaaccggaaaacgactccggttaaatctattgatgaaaatccggataagatagacattagtaatgaaatgaaagctattcatcaattatgtctcgcgtatgcttttacacaggataggacgtatctgaataaagcggttgaatatctgaaagcatggtctgaaatcaatgttgccttgtcgaaaagaaatattcatgaagaatcatataatattgctgtcgaaggttattcgttgattcgtaaagtaatcggacagtctgaccgggaattgattgatacctggctacgtaagagggcggaggtatttattaaagataatgacttgagggtcaataactggggtacttgtctgttatatcaattttatctgttcggcacggtattggaagatgaggctatagtcgataaattccgttcctcatatgacgattgggtgaagggtaacctgtttcctaacggaacgactacggatttactcggtcgtgatgcttttgcttatcatgcttatgatttattgttcttcgctcgtctttgtcatttgaaggcgatgtatgaaggttatgaagctgctgaagctttctataagaaggatgtacattggggagcttctatccggaatagtgtggttttctggaaaccttttctgttggattccaagaaatatactcaccttgaatttgtaggtacagaatatgaacccgataagaaacgttcggattacaataaagcttacaatccttcgggaactttatatgtgatcgatgaattgtacgaaatagataaggaacttaaagaggtattagattattataaacgtaatccggatgtttctttgaaattgggattaagttctttacgttggcattaatggttgtataaaataagttttgtatgaaaagaatttttatagtaattgttcttttgacagttatatccaattattctatggctactaccgaagacaatttgcattggttcaaagatgcaaaattcggtttgtttatacattggggattatattctcagacagccggtgaatggaaaggccatccaaccgaaggtggcgaacactttatgctttatgagcgtattccgttaaaagaatatgcaacaatagccaaagattttaatccggtaaaatttgatgcgaagaaatgggtacgggctgccaagcacgcaggaatgaaatatttggtatatacgactaaacatcatgatggatttgccatgtataattcagcttgcagtgattataacatagtgaagtgtactccttttgccaaagatcctttaaaagaactggcggaagtttgcaaaaaagagggaatcaagctgggactttattattcattaggacgtgattgggaagatccggatgttcctactaactggcctgtaaaagcaggccgcagcaatacttgggattatccggatgaagatagcaagcagttaccggcttatattgaacgcaaagtaaaaccacaattaaaagaattacttacgaattacggtgaaatagcagttatctggttcgatacgcctgaactggttaccaggcaacagagtaaggaattacgtgaattgattcattcgttgcaaccggggtgtttaatcaatagtcgcattgggaacggattaggagactattcaattatcgaacagaaactttctaacagcataaataataaaccttgggaggcttgcctgacgatgggtaagaactgggggtacaatcgttatgatactgtttataaaaagccggatatattaatcagaaattttgtagacattgtcagtaaaggtggaaatttattgttgaatgtgggaccagaccaagcaggatgttttccggagcaaacggatataatattgaaaacttttcataagtggctgaagagtaatggcgaggctatttatggaacaactccctggcgtatctttggagaagattttacggtaaatagagtagaagatactgaacagaaaccttttcacgatgcagtatatgatggaactcctaaagatattgtacctgatgtccgcttcaccatgagaggtaaaagtgtatatattatcgtacgtcatgttactaaagcttcttatacattgcgttccttttcttcggaaaaggataaaatcaggaaagttacattattggagaatcataagaaggtagactgggaattggatgatgacgggttaaaaataagtaatatacatcgttctactaaagactcttttcctgtttatgtgctaaaagtagaatatttctgatacttataaaattgagagtaaaggttgtgaatttctataaaatttgcaaccttttttattatatctgacataagtgaagaaaacctttgttagaatcgtaaaggcaggattatagattgattcgcctataaaaatgttgtttatgtccagtattttttcgaatattgcaaattgttagtatatttaagcgattaatttgtgattaacagaacaacaccaaataaaaaataatatgaagttacgtcatttattactgttgtttatttcttttttctttgttttgccattatatgctgaatatttcaaacatattggtttgtcggaaggtttaacacagccctctgtgatggctatttatcaggataggttgggcagaatgtggtttggaacaaaggaaggaataagccaatatgatggaaaccgtgtaagaatattcaaaggctggataaaatctgtaggtgaagaaccaccggtctggttgggcaatgaagtttcgtttatcgttggtgacagcttggataatctatatttcttaattgataagaatttaatcaaatatgacatacaaacagagaaattctcccgactcacgaatgaaagtattatcaccgcgcttacttcgtccgaaggacaagtgtggtatatgaaacatgattctttattttgtttgaaagcagataaagaaccaacttttgtattaaaaacgaatatcacttcacgtatttgttgcctgaccatgatggacgatcagattggtatcgggacatataacggagtttatctgattgatcgccgtacatatcagcaaaagcaactattggaaggggtggagatttatcgcatatttgaaagttctcaaaaagagctatggattggtacccgcatgcatggattatatcgaatgaacgacaaacaacaattgtcgaaagttccttatttgccgggaacttcggaaggtatcagtagcgaacagattcgtgattttgtagaagataacgagggaaatatatggttcggtacttttgacggacttcatcgctacagtattggtaacaaacagtattctctcattcaaattccccaatatgtgggcgggctgaatcatccctctatctttgcattgtataaagatgttgccggaactatctgggtaggtagttactatggaggagttaattatttcagccctcaacatgatacttttgtacattatgactatgggagaaagataaactcatattattcttatatcggagaaattgttattgataagaatgagcatttatggcttagtacagatgggggcggtatcacttgtgtagataagaaatggaatactcttcagcagtttacagccggtggaaaaaactctatttctcataataatgtgaaaagtatttgttatgatgaaaagaagaattgtctgtatataggaacctatttgggtggtttgtcacgttatgacttgaatacaggtcgtttttataattattggaaagaagagagtcactcttccgatatgcctgatgaaattgtttatcatgtgaagatatggaaagatcaaatatatatatctgcccataatggcttttttcggttggatactcagacacagaaattccataggatcaacattccttttgcattttatgagcatttcgatattgatgcggaaggtaatttgtatatggtgggttggaaaaatgttttgtgtactcatgtagaacatcccgagtctatagtctatgttccattggcagaaggagatagtaaagcaactcctacccgtgtgcttgccacctccgatggtgtctatatcggtacgttaggaatggggctctttttttatgataggcagacgcgtaacatggctcattatacttcccgaaacaatcagttgccgggtgatttctgctataatctttgccggacccaggatggaaagattctgataacaggtgataagggagtcacctgctttgttccttccgagggcactttcacaacgattgatttgatgagaaactttccctcgactcatattatcaacggatgtggaattttggtatccggagagggaagtatttacattggagatacaaaaggagtaaccgtattctcagaaaatgagtttaacaaaaccggtactgctaatgagaattctaacttttacttttcagaactttgggtcgataataagacgattattccgggagatgatacagggatattgtctcagtcgctcccgtacactcgtgaacttaaacttaattatgatcagaataatctgattattcattttgctttgtccgattacggacaacaattatcggaaaaatggtttcaatataagcttgaaggtttggacaagaattggattaagactaaacagacggaattgtattacactaatctggatccgggaaaatatacgttgcatgtggcttcgataaatgaaaagagcgggcaaagtttggaggaaataacgatgcagcttgtcattgcctctccgtggtatgatacgtggtgggcatggataatctatgtgacagctttcattgcgtgcgttttctattatgtatatagtaaaatagcaaaacgcacattggctctttctttggaaaaggaacgttttgagaaacaacagataaagcagcttaaccaggaaaaactagttttctttacaaatgtgagccatgagttccgaacacctctaactctgattatcagtcatattgatatcctattacaaaaatattcattgaatccttctatatacaatcagataacgaagattaggaaaaatgcgcaacaaatgaataagttgatctctgagttgcttgaattcaggaaattggaacagaattatggaacgatacaaataaagcaacaggatataattgtatttttgaaggaaatctatctttcttttgtcgattatgcacagcaaaggaatataaattatgaattcaaattaccggaattgtctgtcttatgttggtttgaaccgcaattaatggagaaagtattcttcaatcttttgtccaatgcctttaagtatacctccgacaaagggaatattattctgtcgggagagataacgaatagtgatataaaaattaatataacggataccggtatcggtatttctgaacaagataaagataaaatatttgcacgattctttcaggctgacaatcaagaaaagaaaggaagcctgtttagcggaaccggtatcggattggcattgaccagaacaattgtggaaaaacatcatggagagataacagtgaaaagtgttgttggtgaaggtagtacatttacagtgcggctgccccgccggaaagatgtattcctgaacgataagaatgtacaattttatactcaggattctgaaagtgatattatccccgattcaatgcctgtatttgtagatgaggggaattcgcccatagaacttattgagactaaagatacggaaaacaagactcatacggtgcttcttgtggaagacaatgatgagttgctccaagtgctgaaagagcttttcgagcctttctataagatcatttgtgcccatgacgggaaagaaggactcagtcagatttatgagaactctcctgatttagttatcagtgacgtcatgatgcctgagatgaccggaacagaaatgtgtctgcaaattaagaataatatagatttatgtcatatacctgtaattctgttgactgcactcaactctaccgagcagaacattgagggactcagccgtggtgccgatgattatatcacgaaaccctttcatgcacagttgttactggcacgtgccaataacctgatacgcagccgcttgctgatgcaacatcaatttgataagaaaccgatgtccgagattgatttggccagcataaatcctttggacaaagatctgttgaaacgggcttcacaggtgattgagcaacatattgacgatacggaatttgatattccggctctttgtaaagaagtaggtgtcggtcggtcattgctttatactaagttcaaagcattaaccggcatgacacccaataacttcttgctaaattaccgcctgaagcacgcagccactttattgaagcaataccctgatcttcccattgcagaggttagtgaccgtagtgggttcaatgcgcccgtatatttcagccgttgcttcaaaaaccagttcggatgtacacctcagaattaccggaaagaaaagaaacaggcagactgattcaggactgtttcttttttccgaaacaattcgttctgctattattcacaggacgaatggtgaagtccggctgagtacctttggagtaaatgattacttcttcgcctttctgtaaatctattttgtacatagattcggataaagctgtggcctcaaattggcgttttcctttgaagacaggtgaggatatgtcagtcactacaatgcaaggttcgcctgcaaggcttttgatagtgataaactcagtcttaccgtttttccggctggcagtgataagaaaagcaccttcagcacggaagtctttataagcaatgtctttccaactgtcgggaacggcagggaaaatgcgcagctttcctccccaactttgaagcaacatatcatggatagactgggcggcagataatggtgtttctatgaccgggcccgattcacgataaagtgtattgacagataagaatttagtaaacaacttgtcaaggtatgtaagcgcttcattgcctttacccaaagcggatgatatagaggatgctcccgtacatgaatatccctgatgtgccccggatttgccttgccaatagaggagtgatttctctatgaggtcgtattcttcgggattttccttattgataagatatagaggataggcagccaatagatgcgaatagtggcggtgcgagaaagcataaggaacatcccgtcctatcataagcccgttggccgggtctgtggggaacggtgtaagttcctccaaagtcgttctccaacgcgggataagcggatcgtctatgttcagccggccggtaatctcaagtaatgtccggcaaccccaagataataatgccaggtcgaagttacaatctttcgcactgccatattccggagaatatgtttggggcagatgtaccttgccgtcttttcctttgtaggtaaagtgcaggtagtagttgatagcttgtttaagtacaggaaagagtttgttgcgtaatagctcgtcatccattttgtggcgataaatcaaccataagctatggcatacccaaggcaaaagcccgacttccgctgctttgtctacaccggggattccgatttcgccggattcgcataccagatttgacgagcgtcctattgccaatgcgtctttgcgataggcttccggtacgtttttcttaaggttttctatattgttgtaaatagcattctccagagaggctgccaaatcgagatgattggatgcattgagtgcccaataggtcagttgtacgttcaagttccaccatgcattgggccatggagtgacggtcagccatgggccggtgttgtctattagtgcacggtcgccgcgcgtggcactggcaagcttatacatctgtatccaatagaaattctctttcataccatccggtaacgtaaggaaactgctcggatagtaatgattccaccaggtacggtgttgtttctgtaattttccggttcctgttgctaatgccttatccaaaatttgagcggcatccttttcggccgtggcttcgggatacgaatgagttacggtaatccagtatgtgcgttcattttttttagttcgggtttctttccatgcaacggctgtttcacctcctgcccgcaatttctgaacggatacttccggttttacctccggtgccgggttaagagagtagtcttcaggcacctttatccattttccttctccttttgcataaagatatcgcgggctttgggcggaggcaggtatccattcccaacggaagtttttctctccatcggtggcgttagtctgaaccagcattaccatatcattggcgtgtacataggcgtgcagacggatgattccttttgtggtggttatctctgcttttgtttcggcattccagatgtcaagatgcatcgttccatttacgattgtaccttcaggatgtaaggcgaagtgcccggtgagcagtcggggaatggcaaataagtccgatcccgctttgtggtcgtgtaccgagcagttgccggtttcaaaccggatatagttctgtcccggttccttataaatcataagtcccaacataccgttgcccatataagccgattcataccagtattcgggcagtatttcccagatcaaatcttgtttttgcatgaaagcaggccagtctatatccgtttttactttttctgttcgggcggatgcggatgtatatcctgttactgacagacaaaggcataaaataaaaaagcgtattttaatgttcttcatgatgttgtatgattattatgtcgcaggcaaagatgaaaattatatctgtattaatcaatattttccccgttgatttggatgatttggaaaatagatgcaactattgaggacaatttagtcagataagataaaaataaatggtgctattttgccatacattaatatcttaattagatgatagaaaaaatacttatatttgtgttctcattattttatacaattatatgtattcggtcattcagaaaaggaaattattcatttataataaagaatctatatcatgaaattgaaaaactctattcttgcaggatgtactgctcttgtggtagccacatcttgcacccaaagagctgtcgagaaacaaacatgggttgaaaaagctattgaaaacgcacacgctcaaattggattggaaattgatactattgaaagtagcggcagatttctgaatccggtgacgctcaataataagggtggtgtctattattgcggatacgctgactggcggagcggcttttttcccggcagtgtatggtatttgtatgaactgacaggcgacactgctttgcttccgcttgcccagaaatataccgaggctattagcgaagcacaaaatcttacttggcatcacgatattggttttatcattaattgcagctttggcaatggcttgcgcctgattgataaacccggttataaggaggtaatgatccaagcagcaaaatctctttgtacccgttttcgtgaaaagcctcaagtgattcaaagctgggatgtgaaaggaaatagctggcagtcgaaacggggctgggaatgtcctgtgattatagacaacatgatgaatcttgaattgttgtttgaagcaaccaaactttccggtgattctactttctataacgtagcggtgatgcacgcagaccgtacgttgaaagagcaattccgcccggacggaagctgttatcacgttattgattacagtattgaggacggaaccgtacgtcatcgccagactgctcaaggctattccgatgaatctgtttggtctagaggacaagcatgggcgatctatggatataccgtatgttatagagaaacaaagaatcgtacttaccttgaccaggcaatcaagactttcgaatttatgaaaaatcttaagaatatgccggaggaccttgttccatattgggatatggacgcgcctgatgttcctgctgccccgcgagatgcttcttcggcttctgtcatagcatccgccttatatgagatgagtacttatgacctgccggacgctgcttcttaccgggcgtatgccgacaaaataatggagtcgcttgcatcagagagctatactgccaaattgggagaaaacggacggtttatcctgatgcacagtgtaggtagtattcctcataacagcgaagtggatgttccgttgaactatgcggattattattatctggaagctttgaaacgtaaaacggatattgaaaaaactgccatttaaaaagaatgattatgaaaatgagaattgttttattagctcttatttctttttgtttcctgagtgtaaatgccgctgataagaaaaagaatcaaccggtgaacgacagaacacagtgggttgacttatgttataaaatagcgcaacccgttctggagaatatgagtaaaggcgagttgcaaaagaatatgcaactggagttgagtcctacgtgggacggaagagacaagcgggtggcttatatggaagcattcggtcggctcatggcaggcatttctccctggctggagctgcctgatgatgatacggcagaaggaaagcaacgcaagcaaatacgtgagtgggctttgaaggcttatcaaaatgctgttgacccgcagagtccggattatttgctgtggaaaggacatcagcagcttttggtagatgctgcttatcttgcggaaagtttcatccgtgctcctaaggccacttggggacagttggatgatacgacaaaagaacgttatattgaatgttttaagaaggtgcgtgtcatccgtcctgcctataataactggttactgtttcgtgacatggtagaggctttcttgctttccgtcggtgaagaacctgacggttatgccttgactaccggccttaataaaataaatgaatggtatcttagtgatggatggtattccgacggagcggaattttcgttggattattataattctttcgttattcatcccatgtatgtcgagatactggaaacgtgcagcaagaaccgttttcctaccccaatcagttataagctggcaatcagtcgtatgcaacgttttaataccttcatcgaacgtcttatttctccggaaggtaccttcccggctttcgggcgttccgtagtctatcgtatgggagcattccaatcgttggcattggctgcctggaaatatggccttcctgaaggactgactaacggacaagtccggagtgcattaagtgcagtgatgagaaatatgttttcagtagatggaaattttgatgataaaggattcctggcacttggttttgcgggacatcagccggatttggccaactattatactaataatggtagcttgtatatgacttcactcgttttcttgcctttgggtcttcctgccgatcatcctttttggagtgatccggccgaggaatggacatctcaaaaggcatgggcgggaaaagcttttccaattgatggacaccagtcattaaagaagtgatgtttcccccgtcattatccgttcaacgcgggtaatgacacatccttctaaaaaatagatagtttaatggcttgaaacactaaatatcgaaaaagaggctaacgttaggtcagcctctttttcgatataagaatttttaattttactcttccgtgctttggagcatctggaacagtttgtctaacttcggagccatgataatctccgtacggcggttcttacttctgccttctgccgtttcgttgtcatcgacaggcatatattcgccgcggccgctcggttgtatctgcaaaggattcacgttatagtttttaatcagaatacgtacgacggaggtagcacgaatcacactcaaatcccagttatccttgaattgtacagtgttgataggcttattgtccgtatgtccttcaataaacacatcaatatccgtctgtttgttcagtacttcggccaatttgccaagagcttcttcaccacgcttatccagacgggcgcttcctgattggaataataatttatccgacattgccacatatacttttccgtctttttcgcgaacggtcagttcatcgctgctgaagcctaataacgcatcttttacgctactcaacagtttccggactttctcattctgcgcattgatcatctgctgcaactcgttgatagtacgctctctttcgttcaactcgtttttcttctggttcaacagggcgttcagtttttcctgttcggtcatgttcacattcagcatactttgatactggcggatactgtttcccatttttgttgtatcacgcatgaggtttttgatttgtaccgacatttggttgcccgtgttacggcagtcggtcagtagtccttgcaaactatctttgcttgcggtagctgccagctctgcaagcatgaacttctttttcgttacacatgaagtacataataggatcgtaaggaaggtaaataaagtaattttcttcattgtgttttatgttttaaaaggatatatacaattagctttgtagaaattcacatagtttttgcacagccagtgcacggtggctgattttattcttgatatcatttcccagttcggcgaacgtccgttcatagccttccggtttgaacacgggatcataaccaaaacccgaatcgccccgtttttctctgattatctcgccctttatcactccttcaaaaagatattcctttccgtccaatatcaacgaaatggcagtacggaattgtgctttgcgattttctttgccttccagttcgtgaagcagtttgagcatattggcttgggcgtcgtgtccttcgccgcctgcatagcgggcggaatagactccgggggccccgtccaaggcttctacttccagtccggtatcatcggcaaagcaatccaggccgtagtttttaaagataaacgacgatttcaacagagcatttccctccagcgtctcggctgtttcgggaatatccgtatggcaaccgatatcgttgaggctcagcagttctatttggtctcctaagatagcggctacttcttccagtttatgagcgttgttggtaacaaataccagtttgcgtttcatcatcttattttgtttttaacggggttgttcaatacttatcgggccaatcaaagcttggaaccggttattttactttcagtttttcgaatccttcgccatatactccgataactgaactttgggagataaaagcattcgggtcgatacgtttcaccagacggaagatgtcgagtgactggcgtttcttggcaagtactaccagtacttttacattggctttactgtaccagcctgtgccatcgagcacggttactccgcgatcggcatctttgatgatacggtcggctatttcgtcatacttcttggagaaaatgaagaattggaccgattggcgtgcactgttgataatccagtcgagcacgacgccaatgatgaacagggtgacgaaaccgaagataacacgacgccagtcatggaatataaagtaacaggaactgatgatgaatacatcgcaaatcataatcattcttccgagtgtcacatctttatatttgttaactatggcggcgataatatctgttcctcccgtacttccgttatagttgaacacaatgcccagacctacgccacacatggcggcaccgatgatacaggccatgaaatcctgtccgggaccgagcagtagcggtttaccgtcggctgtcatgtccggtacttccacataattgttgaccagtagttggaacaaccagagcaggaaagtcagcataaagatagcatacgtcgtttttatactgaatcgcgggcctaatatccggatagcaaatgtcatcagaacggcgttgataatgaaatatgaccattggatagggaatccggttgagtagtagatgatagcactgataccggtagttcctccggtcgttatctgatagggcagtaagaatgccgcccagcccaaagaatagctgattagtccgagagtgatgtaagcataatctttcacttctctcattattcccgcttttgctagtttatgcattgattttaagtattaggtgtcaaagtatcaggtatcaagtattaagtattcaccttgcggatatatatttgaatcatagccgtggtgatacttaatacttattacttaatgcctgtttaaataacaacgtttacaatcttcttcggaacgacgatgatctttttgggagtctttccttcgatccatttctgtgaacgttcgtcagccaatacggctgcctggatggcgtccgaagtttcatctgcagcaaattccatattgaaacgtgcctttccgttgaaagagatcgtgtagttgattgtatcttctttcagatattcttcgttgtatgccggccattgggcgtcgcatacggaagtttcgtgtcccagtacgtcccacaattcttcgcaaacgtgcggagcgaaaggagcaagcgtgatgacgagttgttctagaatctctttcttactgcatttcaggttgaaaagctcgtttacgcaaatcatgaatgcactgatagaggtattgtaagagaactgctcaatgtcaccggtcaccttcttgataagtttgtggaggcttttcagttcttccttcgttgccggttcgtccgtcaccagatattcatccgtgcggctgtagaacagcgaccagaatttgcggataaagcggtgtacaccatcgataccgtttgtatcccagggcttagactgttctaccgggccgaggaacatttcgtacatacgaagtgtgtccgcaccgtatttctcaacaatcatatccgggttgacaacgttgaacattgacttactcatcttttcaatcgcccaaccacagacatattttccgtcttcgaggataaactctgccgttttatattcgggacgccatgccttgaatgcttccagatcgagaatgtcattggatacgatgttaacgtctacgtgaagcggtgtaacgtcatactggtctttcaggttcagtgaaacgaatgtatgggtatctttgatacggtatacaaagttactgcgaccctgaatcattccttggtttactaatttttggaatggttcttccattatggatacacccatatcataaaggaatttattccagaaacgagaataaatcaagtgtcccgtagcatgttcggtaccccctacatataagtctacattcttccagtaccggtcaattttcgggtcaaccaatgctttatgattgcgcgggtccatgtagcgcagataatatgcggaagagccggcgaatcccggcatggtattcagttccaatgggaaaacggttacattatcaatcttttcgttttctaccacgcatttgttcgctgtgtcccacgcccatttcgtagcgtgtcccaatggaggctcgcctgtttcggtaggcaggaacttggcaacttccggaagttccagtggcagacagctttcttcgattacataaggcattccgtctttgtagtaaaccgggaagggttcaccccagtaacgttgacgtgagaagatagcgtcacgtaaacggtagtttactttcacgcgacccagattatgttcttttacatagttcttggttttttcaattgcttctttgatagtcagcccgttcagggagaggtcacagtaaggagtgacgtccggacgcggagagttgcagacgataccttctttggcgtcgaaactttcttcgctgacatcacaaccttctaccaacgggcggatttccaatccgaaatgcttggcaaaggcgtagtcgcggctgtcgtgagcaggtacggccatgatagctcccgttccgtaaccggccaatacgtagtcgctgatccagataggtactgcttcgcctgtgaacgggttgatcgcatacgaaccactgaatacaccggtaacgctgcggtcggcaatacgttcacgttccgtacgtttcttagtacggtcgaggtaagcgtctacttccgctttttgtgcaggagtggttaattgtgccaccaattcactttccggggccaacaccataaaggtaacaccgaacatggtatctgcgcgggtggtaaagattgtaaattcgagatcactgtcttttaccttgaattgaacttcagcaccttccgagcgtccgatccagtttctttgagtttctttcagagaatctgtccagtcgatagtatccagtccgtcaagcaaacgttgtgcgtaggcggatacacgcagacaccactggcgcatcttcttttggatgacggggaaaccgccgcgttcgctgacgccgtccactacttcgtcattcgccaataccgttcctaattcagcgcaccagtttaccattgtttcgcccagataagcgatgcggtagttcatcaggatttcctgtttttccttttcgttttttgcgttccattcatcggcggtgaaactgatttcttcactgcaagcggcattcagtccctcgtttccgtagacagcaaaggctttttccagttcttcgatagggcgtgctttctgctcgtcgttgcaataataactgttgaacatttttaggaaagcccattgtgtccaatggtaatattccgggtcgcaagtacggatttcacggttccagtcgaaagagaaaccgattttgtcgagttgctcgcggtagcggtcgatattgttgatggtagtgatggccggatgctgtccggtctggatagcatattgctcggcgggcaagccgtaagcgtcgtatcccatcggattgagtacattgaagccttgcagtcgtttgtaacgggcgtaaatgtccgaagcgatatatcccagcgggtgtcctacgtgtagtccggctcctgaaggataggggaacatgtttaatacataaaatttctgcttcgattcgtcttccgtaacctggtaggttttctcttccacccaccttgcttgccacttcttttcaatctccctgaaattgtactccatagtgataaagtttttatttatagtgatttatactgttatttctaatttgaggcacaaatttacgtgtttattttcagataaccacgctttacctattgactttctcgtttttatttcgtatatttggggaaattaaaaacagaaaagtaatcatgaaatatataagtattattacataggttcaataggtgaatgtgcaaaattgcatatgaggataacgaatgggcaagaaactgtgaaggttcttgcccatttttgttgcaataattcgatttgagtaactgaaagtgcctaaaaatagtttttaataaacttgggaaccgtttataataaactatttcattatttattaaaaactcgaagcgggtttatgcaatatcggtgataaagtgtaaagaagaaatatcgtgaggatttgccgatttttagttttttccttatttggtaagatttgtttatacaatgaaccctttgcgtttattggtattttatttgacagtgaccgggtgcttcggcaggaagtgactatttatagttttgtttagtcgagattctgtctgaaatatattcataagagtcggtatatattttcgtgattccctgtatctttgcggcattattaaaagtataagtatgaaactgacgcacggatactatcatctgattgccatactgacggttgctatctgggggctgacctttattgcaacgaaagtattgattaatcacggactcactcctcaggaaattttcttttatcgctttttgatagcctatataggtatttgggcgatttctccaaaacacttgtttgccgataatttgaaagatgagctttggttggtggcgggaggcgtattcggcggatcgctttatttcttcacagaaaatacagctttggggattacccaagcctccaatgttgctttcatcatttgcacggctcctctgctgactacgattctttccctgatcttttataagagtgagaaggctacgaaagggctgatctatggttcgctgttggccctgattggcgtagggctggtcgtctttaacggaagtgtggtgttgaagctctctcctgtgggtgatttgctcactttgcttgcggctctgtcatgggctttttatagtctggtaataaagcggatgacgggacgttatcccacggtatttattacccgtaagatatttttctatggggtattgactattcttcccgcttttcttcttcatccgctgcaaccggattttgatgtgcttctgcaaccgctcgtattgtccaatctcttgttcctggcagtcctggcttctttgatctgctatattctttggaatgtggttttgaaacagctgggaacgatgcgggcctccaattatatctatttgaatccgttggtgacgatggtggcttcggtgctcattctccacgaacaaatcacatggattacgttaatgggggcggcttgcatcatattaggggtttatctggcggaaaagaagtaggatcattccatcttttatctgccgggaaacttagaacaaatattgatattgtgtacccaagaacttccggatttgtttcagcgctttcgtgatttgtgcctctactgtcttgacagatatatccattgactccgcgatttcctgatttgtcagattcttcgtgcggctttgcagaaatacctcacgacatttttcgggaagtgacaggatagcctcctgaattaaattattcagttcttctgtttccagtgaatcggtgatgcttacttgcggagtgtcctgtccgttgatatcgtccagtgagacagtagcctttctgtcccgcatagcgttcagacacctgtttttggcagcctgaaaaagataagctttgaaagtaagcctgatttcaagtttttttctgttttcccatacggacgcaaagatgtcacttgctatatcttccgcttcttgtgtatctcctaaatacaaatacataaagcggcaaagagcagtgaaataagtatcgaagacgtacttgaacgcctgcttatcaccattctttatcaattgcaaaaggaacatatcgtccatagtgtttgtaattaggttagtgagacgttgcaaagttaaagaatatttttttagtagaaactaaaaaaatgcttttctgaataagggtatgattcgttttttgtgtcttagtatcggtaacagttaaaaacgacagcgaagcatgaaaaaagaaataccttgggagttaatcatttccgacctgaaacaagacatctccgatgctgataaaaagcacttggaggagtgggtgtctatcgatgagaaccggaaggtgtatgaagaacttcggggagtttgggaaaaggtgcgtgctaaagttatcaattatacgccggacgtagatttttactggaaagagttgatgcaacgcatggaggagtgtgaggaggctgaacggagacaagctgaagatatggaaaggtctgaagataaagttgaagtgaatctcaaagataaggaacaacctgttcgtttgtgggctttcccccgttttcaacgctatgttgcggctgcctgcgtagttgtggctgtcttcctttccgtttctttatatataggtataaagatcggtcagccggaaatagcgcaacaaacctattccaattggggaggtaaatcggaagtagctttgccggacgggtcgaatgtatggattcattcggctacttcgcttacttataatacgaattattattcgaaaaacagaaatgtccggttgaatggagaggcttactttgatgtggcccacgataaggatcatcctttcgtcgttgaaaccgaaggaatgaaaatcaccgtacacggtacaaaattcaatgtagaatcctttctcggttcggaaaatacatttgtcagcctgaaagaaggttcggtgtcgttggagacgaaagcggaaacccgttttctgcatccgggagaagtcggtactttcaacaagcgtaacggacggcttcaaatagaaaaaggagatatcgagttggctgtctcgtgggcaagcaatcagattgtatttaaaaacaggccgttgaatgagatttgccctcttctgtccaaatggtataatgtgaagataaatctgtctccggaattgcaggaacagtacagatacacattcaccttgcggcacgaaccgttggaagaaatcatgcgaatcatgtcgcgcattcatcctatcaactatgaatttaatgatgagaatatgttgacgattttgccgaagcagaaacaataagtggtaacacacaatgcaaatatccgagttcaatatcggtaaaatgaattttttgacaaataagtaagagagaaaggcgagcctatgatataatgaagatatagaataaataagggggaagttccgcttccggctttcccccctaccaaatcaagttttttattaaccgaagaaagtgagtgaacattaaaatctgacccattttaatgcagcctccttacagttaacttttaatatcgcaaaaatatgaatttaaaaaagcattttgcacttttaacgctattattttttagcgttgtactttctgcacaagtaaaagagaagatgataacgataagcttctcgaaaattccattgtccgaagctatggcacgcattgagaaaaccagcggctataccttcttttatgatgcaacacaagtaaatgtgaaacaggaagtcagcctgaacgtgaaacaggttcctgtatccaaagcggtaggagaaatgctgaaaggcattgacctgtcatttgaagtgaccagcacacagattgccttgttcccccaaaagagtactccggcacagacgggcaaggcgactacaatcatcggtaaagttgtagacgagaacggagagcccattatcggagctaacgttttggtagccggcacaacgaccggtgtgattaccgatattgacggtaactacaaactggaagcgcctttcggatcttcgcttcagatctcgtatatcggttatacgactcagacggtgaaagccgggcagaagtctatcatcaaaatgaaggaagactccaagacactggaggaggtcgtagtggtaggttacggtgtaatgaagaagaaagacctgaccggagccgtggcatccttgaaagccagcgaccttgaaaaagaacaaccgaaaactgttcaggatatgctccgcacgggtgtggccggactttcggtaggtatcgaaaccgacacgaagggtaacaccagcatgatggtgcgtggtaaaaacaacctgcgtgcaacgagtacggataaatcttcccttgaacctctgattgtattggacggagtaatctattcgggacagatgaccgacatcaatcctaacgacattgagcagatagacgtattgaaagacgccagttccacagccgtttatggtgcgaaggcagccaatggcgttgtgctgattactaccaagaaaggaacaagttcaacgaaaccgattatcaatttcagtggtacatggggactttcaatggtgaactctttgccggaagtatacgaaggagaggatttcatcaatttccgccgggatgtggaagttagcaagaatccttcaaaagcagctaccggatatttcgacaatccggcacacatgtccaatgcggacttggcaaactggatgggaaacgataaaggcgacccgacaagtatctggctgacacgtctcgaatttaccaatacggaggtcaacaactatttggccggacgtcttgtagactggcgcgatgtcatttatcaggatgtagcgttacgtcaggattacacggtcagcgtggcaggaaagaaagacgaaatgtcttattattcatctatcaactacctgaaaaacgagagtaacgtgcgtggcggaggatacagtgctatccgtgcacgtatcaacctggagaataagatacagagcttccttacttacggtgtgaacgcacagtttacttcacgtgatgagggatatatcagtagttcatccggcaattacactactctttcacctttcggaagcctttacgaagacgatggagtgactttgaaacaataccctaccggtaacaataaccagagcaacccgttgcttgctccgactttccagaataaacgcaatgacatcgagaacttgaatgcagctctttatctgaaaatcaccctccctttgggcttttctatccagactacttattctccgcgttttgaatggacaaactatcttttccataaggcagccgcttctcccgactccggttcgcagaacggccgtgtggaacgtacgcatacgaaggatttctattggcaatgggataatatgctgaagtggaacaagacattcggcaagcacgcttttgactttactttccttgccaactgggagaagttccagcgttggcatgatgaaatgacgaatgaaaacttcctgcctaccgacgaactgggttatggaggtatcggtttcggtaccagccctaacgtatccagtgatgatgtctaccgtacaggagacgcctttatgggacgtctgcactatgtatacgaccagcgttacctgattaccgccactgtacgtcgtgacggatattcggctttcggtcttgccaacccgcgtgccacttttccggctatcgcattgggttgggtgttctctgaagagaaattcctgcaccgtccggattggttcgaatatggtaaactgcgtctctcatggggtaagaacggtaaccgtgccgtaggtacttatgctgcattcatgcagttggccccgcgcaaatacatttatgtggatccggcaaccggcagtctggtgaccgccaacactttctacgcttctactatggctaaccccaacctgaaatgggaatcaacgacttcatggaatatcggtacggacctgactttcctgaaaggcagactgagcgcgaacctggatgtatataagaagattacgaccgacctgcttgtcagccgtgagttgcccagcctgatcggttacagctccgtgatgtctaatatcggtgaggtccagaataccggtgtcgagctttcactgaactctaccaacatcagaatggataagcttacatggcgtacttctttcagcctggcttataacaagaacaagataactcacctgtacggaatcatggaagatgtgaaagatgcggacggtaacgttatcggtcagcgtgaagcggacgatatcaagaacaagcgtttcatcggacacgatattgatgaaatctgggattacaaggtagtgggaatctggcaggaagaagaacgtgaagaagctgccaaatacggtcagcagccgggtgacgttcatctgctggataaagacatgaactacaaatatgacaatacggataaggaattccagggaactacgatgccgcgtctgcgttggagtatgcgtaatgatttcacgttgttcaagaacttcaatatctcgttcaatatgtactcctatatcggacataaaaagacattgggacgttttaccaacgacaatgctttgctgaacgtgacgaaccagattaaacgtgactactggacgccggaaaaccgtaacaatgaatatccgcgtctggccaacaagaagccggcaggcgtttcatatgccatttacaagaacgcttctttcctgcgttttgataatatctcaatcggatatactttcccgaagaagctgatagagccgctgcggattcagaacctgaacgtcaatgctacgatgaagaatgcaggttatatctccggttggcccggttacgacccggaaaacagtgatgcaaataccccgagagtaatttattttggtattaacttgactttataatatctacagactgatgaaactaaataataagaaaacaggcattgcctgcatgattggagtagctgtattagtaagtagttgttcggattggctggacccgaagccactttcattctatacgccggagatctcttttgcggattacaacggcctgaagaccggaacggatatgttgaaccgtgacgtccgttactttgatttttatcccacatcgggttctgccgacccttgtatcctttccgaatatttcttttcggatataagtgtcaacggacgtactgacgcggcaaactctccacaggatcttgttcgacagattactcccagtgcttctctgacaggaaatgcaagtcagattaataactattggacctatctgtataaaggtattaaagacgccaatacattgctgacccgttcggaaacggcagagtttgacaatgaagaccaacgtaaggaaattgaaggattggcatgtttccatcgtgcttatcgttattaccgtctggtgaatcagtatggggatataccgttcatcacagaagaaatcaccgggccacgttatgatttttattcaacgaagcgtgaagcaatcttgcggtatctgaaaaacgatttggaccgtacggctccttatctgaaaaacaacgtttatatcggtatggtgactcaggctgcggcttatcacttactgacaaagatcaatcttgcattgggcgaatttgacgatgcaatcgaatcagccaataacgtcattaatgacggagtgcactatctaatgacagagcgtttcggtgttgacaagaatgacgctaccaagaatgtgatttgggacttgcatcagtctgagaataaatccttgcctgaaaacaaagaagtactttacatggtgctcgaccgttatgatgccggtgaggatattcgttcggcagccggactggaaatcaaacggcaggtgcttccctggtttgcaaaagacggcgagattaaaactcccgacggcaaaaacggatttaccgataacgatgcaaagaaaaatccctatcttgagcaatatggtcgtggagtatgtacagcacgttctacctggtatcatacgcacatgatctggacactggatgacacagatcttcgtcatgctccgggcaactggatagaaatgaccgacctgacctacaataatcctgaactcaaaggtacggaatggtacggacaaccggttcgctttaaagacgataaaggaaacatcctggtaaacgataccattcgtgactgggtggggtggccgcattataagaccaacgttgccgaccagaaagataaatggtggcgcggtggttgggccgactggtatattttccgtattgccgaaacgtatctgttacgtgctgaggcatacatttggaagggggatgcaaccagcctccagaaagctgccgatgacgtgaacaaggtacgccgcagagcgggagccgatgaacttgatgctgaccagatgactatccgtacgattctggacgaacgtgcccgcgaactgtattacgaagaaccgcgtaagacggagttgacccgtatcgcatttatctatgctaaaaccggcaaggcggacgataagggacgtacctaccgtatggataatttctccgagaaaaacttcttctacgaccacattatggatgtaacggatttctataacaaaggggtgaaaacgccgattggaaatgaatataccattgctccccacaatgtattgtggccgattgcattgaatgctatttcgacaaatgtgcagggacatatcaatcagacaccgggatatgccggttcggaaaacaatatcgagccgttggacattgacttcagcaagtaacgttttcttaatggtataacgtaccattaacttcctgtttattgggcatatatatccaccacgctgggcatatatgcccaatatgttgaatctatatatccaccatggtggatatatatttccaataaatccctcaattatatccgatatttggcgtatatttgtactttgtcgggtattggaaccaaaaaactaccgaactttcataattttttaaacgataaacgaatgaatctaagaacaaaaatcggggtcgtagcagtgctgctgtctaccctcaccgtgcaagcacaaaacattcctttccgtaaagcggaaataaaagaaacgatgaagaaagttgccgactggcaaatagccaaccccaacaagggcgccgaacatggtgacctgagctggacaaacgccgtactatatgtcggtatgctcgactgggcggaattggcggaacgtgaagacggtaacaaggattattttaaatggctcacccgtatcggaagccgtaacggctggcagccggacaagcggatgtatcatgccgacgacatcgctgtttcacaactctttatcgacctttaccggaaatataagaacaaatatatgctcaatcctaccattgcccgcacggattgggtgatgaagaacccgccgacggacgatttcaaactggattatcgcaaacctgagacactggaacgctggacttggtgtgacgccctctttatggctcctccggtctacactaaattatacgtcctgacgggtgataaaaagtatatcaaattcatgaaccgcgaatacaaagctacgtatgaccaccttttcgacaaggaagagaatcttttctatcgcgactggcggtattttgaccaacgcgaggccaacggccggaaggttttctggggacgcggcaacggctgggtactcggcgggctggcggagatattgaaagaactgcctgcaaaggacaagaaccggaagttttacgaagaactgttcgtgaagctctgtacccgtgtcgctaaattgcagaatgcggacggattctggcatgcaagtctgctcgatccggcttcttacccgtcacccgaaacaagctgtaccacgtttattgtctatgctttggcttacggaatcaacgagggactgctggacaaggatactttccttcctatactggtaaaaggctggaatgcacaggtttctgctgtcgatgcagacggtaaattaggttatgtacagcctatcggggccgatccgaagaaggtgacgcggaatatgactgaagtatatggcgtgggtgcttttttaatgggcggatgtgagatttataaaatggccagataaacaagaactcataatctaatggtaaaaaatatgattgtatttctgctcctgttactgggagcagttatgaatgatacgtccgcacgtgatgtcatttctttcaataccggctggcaatttaagaaagggtcgttttctacggaccctatgcgtgcttccgcacaatgggacggcaagtgggaggaagtgacaattccccatacctggaatgcgaaagatatgcaagtgaaagctgatgcattctacgaaggtgtaggttattacagaaagaaacagtttttcggaaatgagttggcgggtaaacgtgtattcttgcgttttgaaggagtaggggcttgcacagaagtctatgtcaacggaaagttggtgggaacgcataaaggcgggtatagtgccttcgctttcgagataggcactgccttgaaactgggggctgagaacgagattatcgtgaaggctgacaatacggcccgtcccgatgtgattcctgtcaatcacagtttgtttggggtgtatggcggtatttaccgtcccgtatggttgattactacggagcagaataatatcacagtgaccgattgcgcctctcccggtgtgtacatcactcagaagaatgtatcaagacgttcggcggatataactgttaaagtaaagctggataatggtagtctggctcctgcgcagcttgttctggagaacagtatttatacgcaggaagggaaaaaggtggtttcccaacgtctgccgcttgagttgactccgcaaggaacgcaaagctatgtatcaacattcaaactaaagaatcctcatctctggcaaggtagggaggacccttatctttacaaagtagtctcccgtctgttggcaaatggtgaggtgattgacgaggtcacgcagcctttgggtgttcgtcattacgaaattgttgccggaaaaggtttttatcttaatggagagaaatatccgatgtatggtgttacccgtcatcaggactggtggggcctggggagtgcgctgaccaaccgtgaacatgattttgacctggctcaaattatggatgtcggtgccacgaccgtgcgttttgctcattatcagcagtcggaatatctttattcgcgttgtgatacattgggcttgattatctgggcggaaatcccctttgtcaaccgggtgacaggctacgaatcggagaatgcgcagacacaactccgcgaactgattcgtcagagtttcaatcatccctccatttatgtgtgggggttgcacaatgaggtttatcagcctcacgaatacacagcgtcattgactcaatctcttcacgatctggcgaagacggaagatcctgaccgctacacggttgccgtgaacggttacggtcacgccaatcatccggtgaatcagaatacagatatacaaggcatgaaccgttatttcggctggtacgaaaagaaagtgcaggacatcaaaccgtgggtggaaggactcgaaaaagactatccctggcagaaattgatgttgaccgaatatggagccgacgccaaccttgaccatcagacggagtatctgggcgatgcgttgaactggggaaagccttattatccggaaactttccagaccaagacgcatgaatatcagtggagtgtgatagctgagcatccctatattattgcttcttatctatggaacatgttcgactttgccgtgcctatgtggagccgtggcggtgtgcctgcccggaacctgaaagggctgatgacctttgaccggaaaataaagaaggactcttactactggtataaagcgaactggagcaagtctcccgtactctatctgacgcaacgacgtaacacggaccgcgaacggaagcagacttccgtcactgtttattcaaatatcggaactcccaaagtttacttgaacggcaaagaactgacaggcattcgtaagggctatacggatgtacattatatcttcgaccaggtgacacttgaaaaaggaaaaaacaaaatcaaggctgttgcggtatataatggaaaagaatacgttgacgagatcgaatgggattatcagagtgaaaagaaacgtgatgcggatgcgcacaaaacaaaaatgaacatgccgggtggtaaaacccggcttatggacataaaaaaaggagcaacgccttgctccaacctttgttaaccttaaatctaatactatgaaaaacacattgcaaagatacggactcttaggaaattagcaaattatccaagtaaaatactatgttttataacacgttttaatagttttctcctgtttgttaagaaaaacgccgttcttttttaaaggtatgcaacactaattttgataattgaatcggtggattccgttgattctctgccgaaaaaccgttatctttgttccgataatcacagtatatactcaataaaaaaagaaaaggagagaaccgtgaacgaagaagaaatcgtgctcacccccatgatgaaacagtttctggatttgaaggcgaaacatccggatgcggtaatgctgtttcgttgcggtgacttttatgaaacatactctacggacgccattgttgcagccgaaatattaggaatcacactgacaaaacgtgctaacggaaaaggaaagacgattgaaatggcgggatttcctcatcatgcgctcgatacttatcttccgaaattggttcgtgccggaaaacgggtggctatctgcgaccagttggaagacccgaaaatgaccaagaaactggtgaagcgcggcattaccgaattggtgactcccggtgtctctatcaatgataatatattaaactataaggaaaacaacttcctggccgccgtacatttcggaaaggcttcctgcggggttgctttcctcgacatatctaccggtgaatttctgactgccgaaggacctttcgactatatagacaaactgctgaataacttcggcccgaaagaaattctttttgagcgtggcaagcgccttatgtttgaaggcaatttcggtagtaaattcttcactttcgaactggacgactgggtgtttacggaaactactgcccgcgaaaaacttctgaagcattttgaaacaaagaatctgaaaggattcggagtagagcatttgaaaaacggtattattgcttcgggggctattcttcaatacctgacaatgacacagcatactcaaatcgggcatattacttcattggctcgtattgaggaggataaatatgtccggctggataaattcacggtgcgcagcctcgaattgattggcagcatgaacgatggcggaagcagtctgctcaatgtgattgacaggacgatcagcccaatgggagcacgtctgttgaaacgttggatagtttttccattgaaggacgagaaaccgatcaatgagcgtctgaatgtggtggagtatttcttccgtcaaccggactttaaggagttgatcgaagaacagttgcatcttgtcggtgatttagagcgtatcatctccaaagtggctgtgggacgtgtgtcaccgcgtgaagtggttcagctgaaagtggctttgcaggctatcgaaccgatcaaacaggcttgtcttgaagcggataatgcaagtctgaaccgtattggcgagcggttgaatctttgtgtttctattcgtgaccggattgcccgggaaattaataatgatcctcctttgttgataaataagggcggagtgattaaagacggtgtgaatgcggatttggacgaattgcgccggatttcgtattcgggaaaagactatctgcttcagatacagcagcgggaaagcgaagaaacgggtattccgagtttgaaagtggcttataataatgtattcggctattatatcgaggttcgtaatgttcataaggacaaggttcctaaagagtggattcgcaagcagacgttggtaaatgcggaacgttatatcacacaggaactgaaagagtacgaagaaaaaattcttggtgccgaagataagattcttgtgctggaaacgcagttatatacgaatttggtacaggcattgacggagtttatcccccagatacaggttaacgccaatcagattgcccggttggactgtctgttgtctttcgctaatgtggcgcgtgagaataactacatccgtccggttattgaggataacgacgtattggatattcgtcagggccgccacccggtaattgagaaacagcttccgataggagagaaatatattgccaataatgtgatgttggacagcagtacgcagcagatcatcataataaccggtcccaatatggcgggtaagtcagcgcttttgcgtcagacggcattgattacgctgttggctcaaatcggttcgtttgtccctgcggagagcgcccatatcgggctggtggataaaatattcactcgtgtgggagcaagtgataacatctccgtaggtgaatctacttttatggtggagatgaacgaagcggcggatattctgaacaatgtttcttcccgaagcctggtactatttgacgagttggggcgtggtacctctacgtatgatggcatctctattgcctgggcgattgtggaatatatccacgaacatccgaaagccaaagcacgtactttattcgccacgcattaccacgaattgaatgaaatggaaaaatctttcaagcgtatcaagaactataacgtatcggtgaaagaggtggataataaggtaatcttccttcgtaaactggaacgtggtggtagtgagcactctttcggtatccatgtagcaaaaatggcgggtatgccgaaaagcattgtgaagcgtgcgaatgagattctgaagcagcttgaatctgataatcgccagcagggaatagcaggcaagccgttggcggaagtaagcgagaaccgtggtggtatgcagttaagtttcttccagttggacgatccgatactctgtcagattcgcgatgaaatattaaatttggatgtaaataatctcactcctattgaagcgctgaacaagttgaatgatataaagaagatagtcaggggaaaatagcggattattaacgtgttcacaaatagtatatagaacgttttctgagatctggaaaacgatttgtaagtataaaaggcgtttcctttaagtgattggaggaaacgcctttctagtatgcagtcgatttttatatatcaggttcaggctacttttttcttccggtcgtagaaaaacatgaagtagatgccgactataacgaatggaatacttagccattgtcccatgttgaacatcatgttgttctcgaaatcctcttggttctccttcaaaaattcgatgaagaaacggaagacaaatatgtaggtcaggcagagcccgaagaagaagccgcgatgcagtttcttgctgtaattcttatacaggtaaatcatgatgaagaacaagataagataagcgatcgcttcgtagagctgtcccggatgacggggttgcatatctacccgttcgaaaatgaatgcccagggcacatcagacggcttgccgatgatttcggagttcatcaggttggcaagacggatacagcaggcggtaattggagtagctacggcaatcatatccagcacgtccatataatgaagttttgttttgcggcaatagagccacagagcaataatcagtccaagtgtccccccgtggctggcaagtccttcatatcctgtgaatttccaaccaccggcaggcaggaatttaataggtaacagcatctctacaaaccctttaccgcttgtcagatactgtcccgggtcgtagaacaggcaatgccccagacgtgctccaatcagaataccgaaaaaacaatagaagaagagggggtcaaatttcttctcatctatttttttatcgcgatactggtagtgaacaatgacgtaagccagaaaaattcctactgcccacaatagcccgtagtaacggatagaaaggccgaacaggttaaatagttcgggattcggattccagttgatagataataataaggtattcatattggataacggtttacggtttggtgaattagtatttagtgaatttttcggctaccatccggtaagtaggaatatcaatcccttgttcttccgcagcggtaatcatgtcgaataacaatccttgtatctccgaatcatgtccccgtgccaggtctttctgcatggaagcggtactttccgggtcgagtttgtcgatgactttcagattatagcttatcgggtcttcgggaaattctacacccagtttacgtcccagttcggcactctccgtagaaagtccgatgaaggtatcgcgcacctttcccggtttctgtacctcgcccatggggacgtcatagtaagctccggtgacagccattgccgagatgaacgaccatttaatgaaggtatcccgattgatatccggagagatttccgctttgattccgctctcctgaagatctttctgaacggcttccagtattcccggggcaacttgtgtccctttgtgggctccgtacaccaggcggaaaatttttcccatttgagtgatctctcctgtaccggatacgaatccgacaatatagatgcaaccgtcgagtaccgtcactcccggaacgagacgttggatacgcggtcctgttccgtaaacattcagaataggaatgacgattgtcttgtcatgtgccgccctctttatcagttcagtaatcgagtcgacagaatatcccttgacgcagacaaagattacgtctgcctttccattgaattcttctgctgttgttgccgggatagcaagcgtgtgctctcccttcaagtccgatttcaatttcaagccgtttgtctgtattgcctgcaaatgagctccgcgggcaatacaagtaacgtcttttccggcaagcgacagaaatcctgctatactgcctccaacgcctccggttcctgcaatgagatacttcataataattacaatttgctgattacaaatgcaaggttatcgcgattatacgttgaaacggaagtgcatgatgtcaccgtcctgcacgacgtattctttgccttctacgcccagttttccggcttctttcactgctgcttccgaaccgtaccggatataatcatcgtattttatcacttccgcacggatgaatcctttttcaaaatcggtatggatcacaccggcacattgcggagctttccaacctttctcgtaagtccaggcacgcacttcctgtacgccggcagtgaagtaagtttcgagattcagcaatttataggctgatttgataagacgtgctacgcccgattcctccaagcctacttcggcgaggaacatctgacggtcttcgtatgtttccagctcggcgatgtccgcttctgtcttggctgcaacaaccagtatttcagcattctcgtcttttacggcttcacgtaccatatctacgtatttgttgccgtttactgcacttgcttcgtctacgttgcagacatacattaccggtttgctggtcaacaggaacagttcatgtgcaatcttctgttcatcttttgtttcaaaagtcacggtacgtgccgatttgccttgttccaacgcttctttatattgaaccagtacatcgtaagcctgtttggcagctttgtcgccacccgtttgtgcttgtttctgtaccttttggatacgactctcgatcgtttccaagtctttcaactgaagttcatagtcgatgatttctttgtcgcggacaggatttacacttccgtctacgtgtgtcacgttatcgtcgtcgaagcaacggagtacatggataatagcgtctgtctcacggatattggcaaggaacttgtttcccaatccttcacctttacttgcaccttttaccagtccggcgatatctacgatttctacggttgtaggaacaatccgttggggatgtaccaattctgccagcgcattcagacgttcatcgggaacggtaattacacctacattgggttcaatagtacagaaagggaaatttgccgcctgtgctttcgcattcgacaaacagttgaaaagtgtcgacttacccacgttcggtagtccaacaataccacattgcaatgccatattaatctattatttctattattatcaataggatacatatatatgaacaatgatttggaggcaatacccggataaaaaagagtgtttgttaccaagttgttcatttttgttgggcaaagataatcattttttgagctaataaaggaaacttggtatactttctgtcttttccccttattccggcttacttttagtatggaaagtaaagtcacagaataaggggattttagtattaattattcgtaaggcggcacttcggaaatactaccataccggtgatattcgaaagaaatgctttgttccttgaagtagcgaataagttcgatgcgtccctgtttcataggaggcgctgccacaatatacatattggtttccgcggcacgttcatacatacatttggggatattcggagaacaagtacgtactctttcatagtccggcatcactttcaggaagtcctccagcgattcctttcgaagcggccagccatattgggtaagtgcggcagtacggtcatccgaggggtcgaagctgatagtgagaggtgttctacatagttccgaggcgtatgagatcatattgacctctctatctgtgtcttccggaaaaagacgtagaatcatgcttttcaaaggtaagtaacggaagacattctgttctccgtatagcttattaacatccctcgggtccataaattcttcctcacaagcgtcgaaataactgtctatgtaatcagtctggctgtccggcttgtctgtaatttctacaaaacaggtgcaataattgggacctcccgctttgataccgcctccgaaagcagacagtttcattccaccgaatggctggcggttgacgattgctccggtgattccccggttgatatacaggttgcctgctattacggagtttttccacagcttttgttcctcttcatcaagactctgtaatcccgaagttaacccgtaatccaggctattgactaacttaattccttcttcaaggttctcgatgcaggcaacactcagcagagggccgaataactcggttcggaaagagaagttttccggtttcactccccatttcacggtcggagccagcatatattctttctcatcgatgaaacggggaggaaccagccacgattctcccggttcgaggttgaaggcttgcagcaacttgtcgttcttattggtaatcatcggaccgacaatatttccgggattccagacactgcctactttcaggctcgttgtcgcatctttcagtttgctttggaagttcttgtcttcatagaccgaacgttcgaccaataacagagagcaggcggaacatttctggccggcattaccgaaggcggaagcgacgatgttcatgatagcatggtcacggtcgcccgatgcagtgaggataatgacgtttttgcctcccgtttcggctgatagcggagttaccggattggctcttgcgatattctgggcggtgtctgttcctcctgtcagaatgatatgcttgattgcaggggcggtagtcagcactttcagcgcttcccggttggtgatgatgacttgtaaggcctctttcggtatacctgcatcccaaaaagctttggcgaacatccaggcaaccggagccgctacggtggcaggtttcaggataacggtgtttcctcccgccagtccggctactataccgcctacgggaatggcacacgggaagttccacggtgaaatgaccaatatggtacctttcggttttatctctatatcatctaatgcggcgaatttcttcatcgctgtcgtgtagaaacgggcataatctaccgcttccgatacttctacatcaccttcaatgacagttttaccggttacggcacacatacaacctatcaggtcacccctcatatcagcgagccggttggctgcttcgtacataatccggtggcgttcttccagtgtggtttttctccacccggcaggatctgtctcggcaatttcgataatcttttccacttgagcactgtccgcctgtgacatttcacagatacagacctcgtcattctggcaacggtcgaggtatttgtagcggtttttgcatactactgtttccgcacctatctgtaaaggaatgatttccggttcttccgttccgcttttcttccatttggcaaagatacggcgcacccattcctgattttgtgacaagtcgaagtccgtatccggttcattctgcattgtgtccgatggggcgacgggagtgtacggaagattacggttctgaacgcgtggagacacatgcgtgaggtgatctttcatagcatatgcttcttcaaactgctttgcgaggaagtcccactcttttgtatccggtttcagattgaaggagtgagtcaggaaattgtcgggtgccgtattttcgtccatgcgacggacaagataagagacggcgttcaggaaatgttcgtttttcactaccggagtatatagaatcacccggttgccgagcattgactgcgctctccaaagatgattcgccattccttcgagcatttcgaaggtcatatatccggttgtcccgtacttctgagccagcagataagcataagcgatcgagaacagattatgagaagcaaccccgagatgtaaaacccgggcattttcgggcatcagtccacgttccaacaggcacagataattggcgtcaacttctgttttggaaggacgaatcgggttcggccagcctttcagggaggagataaccgtttccatttccagattacagcctttcaccagacgcattttgataggagctccgcctccgtctacgcgggctttggcaaattccagcaactcggtttggaagtcgtatgcatccggcagataagcctgtacgacgattcctgccgaatagttcttgaattgcggcaggttgagtactgctttgaagaggcgcaatgtgaagtgggcgtctttatattcctccatatccaggttgatgaacttggagcgttttattccgtcttcgtccgtataaggaaaatcaatggctttctgataaagcgcggacattcgtgaaacgagttccgggaaactttcttcgtagttcagagcgtgtgtctgcgcgtagattcccgatattttcactgagatgtaattaatgtcgggtgattcaagagcttccagatagtgatgatagcggtgatcggcttctccgttgccaagcaccacctcgcctaaaagattcacgttctgcccgattttctctttgaagcgggtagccagatgcttcgtgagttgcgggcgttcctcattgataataacttgcgaggtatccatgcgcaggcgttttttgataatcgggatagcgataaagtcgaaatgatgtccgaatgcctgatacattttgaataagaaagcatcccgtttgttcagaaattcggggacaccgtactggtcaaggagagtcttgatacgtttggcgagtatcttccggtcgcggatttgcgaggattcgtcgagcatcttcacgaggaatttcttgtcttgcgggcgctgcaccatgacggcatatttatgctgttccaggcgttcggctttcgtaatcgtttgttcacaagtattatacagtttaagtacccaatcctgtacttcggtaagggtcggttgatattgtttgtccataagaatctgaattatgtaaatggagaaaatgtgaaaaaagaatctcaaattgcaatttacatagtacggagggtaggactaaacataacagcacggtagcgatgcagggtttgcaacgcttgctgcgagaagcagtcgaacagatactgttgtttcatattcgtcgtttttgaaggtgattagaaacgaaagactcacacttctcacaaagataaaaataaattattgattttcaagtaaaaggggaagaaaatacaattgtgataaattctaatatgtatggtatgagttgatacaagacgcgagcgaaataaattaatcttaatctctctaagatttagttgttcggatattattaattagtactcgttatgcatgactttattaactatgaggagtaaatatgtgctaactttgaattagttacctcctttagtatctggcctgatatttcttataaaaaatcagaaacaggatgaatccggtcagtgcgaaaggaacacctgtgagggcggggtaacgatagccttcactaacagtcaatccccctgcataagcgccaatggcatttcccagattgaatgcgacctgtacgcaggcagcccccaacatctcgccgccttttgccacacggataatcagtatttgttcggggctggatacggcaaacaaccctgccgtgcaaaggcacatcagtatagcagccgtccatttgtagggagaaaggaagaaaatgagaagtagcataaggcatattaatgcttgtgcggcagttcccacttttccgggtgtatagcggtcggagaggcgcccgctgataagatttcccatgaccataccgaatccggcaagaatcatcagcggagtaatactttcggtggagaaaccggaaatattcgtcagcatagggttgatatagctgtaccaacagaatacgccaccgttgcctaacgccgtagcaccgagaatgagccagggagccggagtcttcaagaaatggaattgtcctttaaagccggtatccttcaagccttctacgtgaggtacccagcgccagatgtaatacaggataacgattccccagatgccgaccaacaggaaagtggcacgccaggaaagcatagtgctgagagaagttcccaatgggacaccgaataggttggcaatggtcattccggcaatcataatcgaaacggcttccgaacctttccctttatcagccagtctttcggcaacaatggagccgacgccgaaatatgctccgtgcggtagtccggagatgaagcgcgcagcaagcaatatccaataattgggagctgttgcagcacagatattacctatcataatcagggtaactaataccagcagaatatgtttcaacggatatttgcgggctaatgtcaacacgggggcacccacacagacgcctaatgcataagcggaaatgaaatgtcccgccatagggatactgatccctaaatcttttgccacatcgggcaaaatacccatcattacaaattcggcaatacctaatcccagggtgccgaacgccaatgcgataagactctttttcataccaaacttaacctgatacctgtaactttttacctttttcttttttgcgggtgcaaaggtaaaacaaaatcgggcagagtgagttcggtgtgaaatattttgatttaagtcaatttatacaatgctgcgtatgtaagactatggattttaataattgtgtttataataatattattgcggttttttttattaatagagattgccttttcaattgctctttcctgaatgtttaagaatccagtctgttatatcttttagaacttccgggctaatggtttcttctagctgcccatactccgccaatgttcctttttcacaggtttgaaacagatgatttaagttcgggtaggcttttaccgttacattcttattcccgttctcgctgattctttgttggatagccgtaaggttcatagccgcctccacttgaatgtccttttctccgtttaaggcaagtaccggacattttatttttttcatggctttagccgggtcatatctcataaaatgaagataccagggggaggtcatggaacttatctgggaggaaatctgctgtacggtattcaagtctttcagttgttcggacgacatggttttggtaacagttgcatataactctttttgaagttcatctgtggttttgtctgcttgttgcagtatggcatacctgtttcgtatcgacggtttcgttccttgccagaacgcatccggcattccctgggatttagaaatcatctctacttgtttcagcatcaggctgtcacctcttacgccggctcctgccaatgaaacaataaacgcaatcgcagggtctttggcagctacgatgaatgctatgattccgcctgcgctatgtccgataatgccaatcttctttgtgtttatttcttttctgccgcgcaggtaattgatggcagcttccgtgtctgttgcgaaatcctcgttggtggctgttgcatggttgccttgtgaggcggctgtgccacgatcatcacagcgtaatacggcgattccgttcctcgtcagatagtcggcgatgactaggaaaggcttgtgtcccatgatctcctcatcccggttctgcgcaccgcttcctgtcaccaacactactgccggaaatttatttcccttttcgggaagagttaatgtccccgcaaggttaattccgtcctgttcgtttcttactgtaacttcttcacttttataagggaaaggtggttgaggttcctgcggacgtttgggatggcttgcttctcccttttccaggttcaatgggataggcattccttgtgtgaatgttccggttatcgttttgtcacttttcaattttcctttgtaggaagcatgaataacaggtatctgaatagttaatatggaatcactgaaagaggtagcttgtgtctttatgccgttggctccctggtcgggactgtcgagcgttgttacataagttccttgagccgcttggttgatatggaatacgatagtcagcgacccggtgggaacagtcagttttccgtgccaagttcctgagatatcttgcgcggatgcggaagaagataagaacagtccggtgaataatccggtgataatagtagctatgtagacagttttcaatgtgttcataagagagagattaatagtgaatgtaattgatgcatatcagatgattcgtacaaagataacgattattctgacataaaaaataagacattactcaatcttgttttaagtcgagtaatattttattcggatgagatgtgacatacggttaccggagtgggaccggagaagaaaatgttcgaacgaagccgataaaatagaagaagtttgcaaaaatatactcatatctgtattcaaactcatataaaaaaattatttttgctcattcgattgtatggcaatcctgcccgttgcttgataaaagtatatgaaatgaggaaaaattgtggataatagagaattaaatatcataaatcgttttcttcatggtgatcatgaagcctactctctgctgtacagagagcatattcaggagcttttctcttatggcaaagctctgaccggcaatgatgagcggttgaaggatgcgattcaagatgtattttataaactattatccaaccctgccgcattgaaggatgtgcagaacttaaagtatttcctttttaaatcattgaaaaacagactgattgatatactcaaatcagagatgcgccagtcccagtccggtgaggcagctgcctacgaacagattgacttcaccataaatgacgtcactgtactggattctctgattgaggaagaagaacgccttgaattaagccggaaaattaaatcgttgttgaacctgctgactccccggcaacgggaggcagtctgcctgcgatatatatatgatatggagtatgatgaaattgcggatttgttgaatatgagcaactccaaatcagcgagaaacttagtatcccgggcacttgaacatttacgtaaagaagaccttgaacttcttattatcctcccttacactatcaatctaataatttgaaatagtgtccagtactcttctccttcccgcaaggaggggaatggagatgccaccgacttactaaattaccatcaaatttgaagaagaaccaaaaaaagttcttttttttaatggcaaaaaaagctggccgtcgtctttattataaacaagccttaaaactgtttattgttaacctgtatttaaagaataaataagctatgactattgatattaaatacgagaattattctgtcaaggatttcttggaagacgatttgtttctccaatggcaactggcgccgacagaaacactggatgagttctggaaacaagtactacaacaatatccgcaccaggaagccaatctttccgacgctgtccggaccttgcattcagtaacgatcaatcacgtttcactttcccgtcgggaagaagataaaatgcttcaaaatatatatgcccgttatcgcaggcatagagtccgccgctttatttattggagcaccagtgtggcggcgagcctgatactgctgtttcttttggtttctccgctgagggactttacgggagagaaagtcaatgtgatgctgaccgacgtacagtctgtgcgactggatacgattcaggatgtgcaactaataatcggcgagaagaaaacgatagctatggcggaggatgcggatattagttggacgaaggaagatgagatagaggtaaacggacgttcgtccaactcgacttataaatcacggatagatgcggatgtgacatatagcactttgctggtaccttatggcaagcgttcgtttctgacattgcgggatggcacaaaagtgtggatcaactccggtacagaggtgagatttcccgtcaatatggaaggaaaagagcgtagcatttatgtcgacggagaaatctatattgaggtggctaaagataaggaacgtcctttctatgtacatacttcgggatttgatgtccgggtgtacggtacaaagtttaatgtaacttcctataaggcggacaaggagaagtcggttgtgttggtagaaggcagtgtttcggtctgttccaaagaagaaacaaaagagaaggaggcgaaagaaatcttcctgcatcccgatcagatgtatcatacaacgaaccggggacctatgattacccatgtaaacgcacttcagtacattacctggaaggacggaatctggcaatttacgagcgagagtctggaaagcattgcactccggttgtcacgttattatggagtagatatacattgtgatgagaagacggctgtgaagtcatgtacaggaaagctgattctgtttgacgatgtagacaagacattacggattatagaagaaatatttggtgtgcggtatgaaaccaatcaaaatgaaataatcattagtatgaacccttaaaacaagatagcctatggtaaaataaacggaataaaaaaccggataatatggccgtattatccggtgtaatttagttcactaataaaacattaaaagcaattctaaacaacaatcaaatgtatggaaaaaaatgctcatttgaaattaacgaatacttatttatataaaaggatgttgaacattcctcgaattgttttgctctttttatgtgtgtctttcaccgttccttcgttggcagagaccactacgatgcagttaccgcagctttcgctgagtctgaataatgtgacgatacgtgaagtatttaacataatagagaaaaatacggagtacgtatttatcttttcggacgagttgcttaccgacttgaatggaaaagtcagtattcatgtaaataagcaaacgctggataaaatattggataaagttttacagtcgacaggtttgacttataagattaccaacaggcaggtcacggtgagtaagaaaagtcaggcagtcgtccagaaaacttctctgaaggtgacgggacacgtgagcgacgaaaagggagagcccctgatcggggtaaacatacaggaagaaggaaccaacaatgtggttgtaaccgatatgaacggaaacttctcgatgtataatatatccggtccttcttctgtcctgaagtttacctatatcggatttattccgttgagggtagtggtaggaaagcagacgaatctgtcggtaaagctcgaatccgatgtgaaaggtctggaagaagtagttgtggtaggatatggctctcaaaaaagagagagcgtcattggagctattaccactatgaagcctgccgccttgcagattaatcagagccgttccgttaccaatgcattggcaggacaggtagcgggtattattgccgtacaaagaagcggggagccgggcaatgacgcttccgacttctggattcgcggtatttcatctttcggttcgggaacgactccgctggtgctggtcgacggaatcgaacgtagtctgagtaatctttctccggaggagatcgagtctttctctgtcttgaaggacgccaccgctacggcagtctatggtgtgaagggagccaacggagttatcctgatacagaccaagcgtggccagattggtaaaccccgtatccagataaaggctgattatggtttctctgctccgactatgttgcctgaatttgtcgatggtgccaaatatatggaagtgatgaatgtcgccagccagttctcttcggggaaagatatgtatacgcaagctgctatcaatgccacccgcaacggtacggaccccgacttgtatccgaacgtaaactggctaaaggcagtgacaaaggattatgtgccgagcggacgtgtttcgctggatatcaatggaggtagtgagcggttgcgttatagcttgattcttgcctactatggtgaaaaagggatgacggttacggacccggacgtagaatatgacgcttccaataaattgtcccgttacaatatccgtaccaatctggatatgaacctgactccttctactgaaattaatgtaagtctgggaggatatatcctgaatcagcgcacgccgggatacaccacatccagtgatgaaaacccccgtactccttttactgatattatcaaactggcttttaaaaacaccccgattgtacacccagtgatttactcgaacggacaaattccggcaaatacatcgcagaccaacccgtgggctgccgctacacattcggggtttatctccagctatatcagcagtttacagtccgttttcgccgttacacaggatattggtaagttatggcatcccttgaaaggcttgaaggcgaaagctaccttctcattcgacacgtatgcctggaactcattcttgagaaccaagaaacagaccacttatatggctaccgggcgtgatgcggacggcaacctgctgacgagcgtcaccaatgaaggggacgattatttgaaatattcgaaagaagcgggtggtaaccgtactatgtatatggaaggccagttgtcttacagccgtttgctggcggatgcacatcagatagatggtttgctgctgtacaatatgcgcgattacgtggatgcggacgctacttcggctatcaattcacttccccaccgcacacagggaattgccgcccgtctgtcttacagttataaaggcaggtattttattgagggaaacttcggttataatggttcggagaacttcagcaagggacataaatggggattcttcccttccgtagccggtggttggcttgttacgaacgagaagtttatggaaagcaccacttccgtattgtcaaaattgaaaatccgtggttcttacgggttagtgggaaacgatcaattgtcggggcgccgttttgccttcttgtccactatcacctccggaaccggatatgtttatggaaccagcggtaatcagaccattaacggaagattcgaaggtgacttcggtattgaagatttgtcctgggaaaccgtgaagaaaacggatatcggcattgaaatcgggctttgggattgcatcaatatacaagccgactatttccacgagaaacgggaggatatctttatgcaacggaagaccatacccgaaactgccggattcaacaagaacccctgggccaacttcggtatcgtgaagaaccagggattcgacgctagcctagagatgaacaagagttttggaaaagacttcttcctgtccttacggggcaacttcactttcagccgtaacaagatactggagtatgacgaatccgaggcgatgaaacagaccacccgtgcgcgtaccggaaatccgctgaacacgtattatggattgaaagcggtcggcctgttccaggaggaagactttaaggcggacgggacattggttgacggaatccccaatcatacgttcgagcaggtgaagccgggagatatccgttatgaagataccaatcacgacggcaaggtggatacttatgattatcagcctatcggtcgtccttctgttccggaaattgtgtatgggttcgggttcagcgctcgttggaaaagctttgatttcagtgcgtttttccagggttccaccaatgtttccaatatgattcagggagatatgctgattcccggtagcggtggcggcggattgggcaatatttatgccaattgtgatgaccgttgggatccgaatgacccgtacagacaggtattttggccgcgtttgtccaccaacaagagttccaacaatatgcaatattctacctggtggctgaaagacgcttcctatctgcgcttgaagaatgtcgaggtgggctataccttccccaagaaatggcagaaggcggcaatgatgcgtgatgcgcgtattttcttccggggcagtaatctgctgacatgggccgcattcgatatgtgggacccggaaatcggttccagcgacggaatgaaatatcctctgatgaaggtttattcgtttggttttcaagtaacattttaatcttacgtacaatgaaaaagatacatatgaaacagtatatccgaaccttgatgctggcggttgcccttgctccggttttctcgtcgtgtgattatctggataaagaaccggatgatatgttgacactggacgctgtgtttgacaatgcagattatacaaagcaatggttggcaggtgtttacaatcttgttcccgaccctttgtgggaatatatgacttatgaaggatacggatactatatgatgagcgacgaaactcaaatggcttcttcattgagccagttcgggtggagtaacctgatgaatgtacagaagggaagttggactcccactacgattgttcccgggaagaacctttggctggagacttatcgtaaagtacgtgcagggcttatctttatggaaaatgtaaaagaaatcccgaaccagcggcagacagccgaattggtggaacgctataagaacgaagtacgtttcctgatggcatattattattcgaggatgttggaggtttacggcccgtttcctctggtcacttcgttggtagacgtcactgaatccggtgatgtattgcagaaagcacgtaccccttacgatgagattgtcgattatctggacaatgagtttatggaactttccaaagtattaccttcttcttatgacgatgtgaatgtcggtcgtcccacttccggagcgtgtctggcattgcgtgcccgtatgttgatgtttgctgccagcccattgtttaacggcaatgaggatttcagggatgtggtcaataaagacggcactccgcttttcagccaaagcaaggataacagtaaatgggagagagcggcaaaagctgccaaactggtgatagatatgcctgagtatgacctatataaagagtatttggacgacggttccattgatgcgctgatgtcctgcatcaatctgtttctgaccactcccacaaataataaagaaattatattggcttatcccggaaagacaaacgggctttatgagtaccatttactacctcgcggttccggttgggcaggatgtatcagtgctacgcagaatgtagtggatgctttctttatgaagaacgggttgagcattgacgcgccgggttccggttatgtggaaagtggctactccggtgcggacacttattatgatacgaaatacctgtatggcagttcggagaaaaaagctggattagtgaccacggcaggaacctataatatgtacgtcaaccgtgaaccgcgcttttatgcgaacattcgttttcacggtgaatattgttcgttcgacgacactaagagaacacataacttcctgaacgaaggaaaagacggaaaaccttctcatgatagtccgatagcgggttatcagattaataaagcgcttaatccgtctaccaggcatggagttgcctatccgtataagccgggtattatcgtgcgtctggcagagatgtatctgagctatgcggaagcattgaacgagtatgatccggggaatgcggatatcgagaaatacatgaagttgattcgtgagcgtgccggactgcctgccttgcaatccggactgtcacaggatgcgatgcgcgatgcgattcatcacgaacgcagagtggagtttgcctttgaaggcggaatgcgttatatggatattcgtcgctggaaagaggcggagaaagttttcgaaactccgatttcgggcatgaacaccgatggcaagaccaatacagagtacttcaaacggacagagatacagaaacgggttttcttgaagaagatgtacttgtggcctatctatcagaactatctggataataacgagaaactggttcaaaataaatattggtaatagaaaaatgcttatgaaaatgaatatcagttatattttatgcttgttcctggctgttttttcttcagcttgtgacgatgacaaaacagatgaaaacaatgcgaaacaagtgaccgtgacaatttcaccttccgataaagtgattgtggaaggtgagggtggtgatatttcgtttactgttacaccgagtgacccggctgtggaattgagatatgtctccagcgtagaatggatgaaggcggcggctggtggcggagcctcttggagtgtggcggcaaactcttccgaactaagcagggagggacgtatctatattctgaataaggcgtcgctggctcgtctggatacgattaatgtaattcaaaagtccgtcaatggcgaaatacaggaacatccgacggtttcatttaccgaagcggatgtgccggtttctgttccttttgccggaaactcgtatgtgacttatccgaaaggttctacttatatcgacaattataccggaaagtttaaagctacctgggcggatgaaacgattgtcagcagcacttacttctatgtgggcgaagcgggcgacttgaatctggcggctgtaggaagcaacgaaaccggaaacagtgttgtacgtttcaaagtgcaggataaggtgtataatattacaatcagcggcccgacttccaagatatacggcattgctacgattccggtagagaagccgggatatatccgggtggatatgcaaggagtatcgaagagtggcaagtctttcggtgacatcaccggttaccggattggcggacaggctgctttgggtaccaatcattttgtgacggaagagaagatgaacgagggagacaagaactgctacttctaccgcagaggttcttccgtacactggttctatacacagcccacgggtaatgccgaatatttctataatgaagtattggtgacaccggaaaatgctctgaacagtacatattatatgatgaacggtttctccgaaggatatatgggtatccagcagactacttcgggcgagcataaagtcttgttctctgtgtggagtccttatactaccgatgatccggaagatataccggatgaaaagagagtcaaggtgttacggaaaggagcgaacgttactatcggtgagtttggtaatgagggcagtggcggacaaagctggctgcattataactggacagccggtacggtgtacaaagctcttgtacgggtgaaacctgacggaaatggaagtaccgtctatacgggctatttctatgctgacggtgaatggaagctgattgcttctttctcgcgcccggaaacgaatacatggtataaaggagcttattcgttcctcgaaaactttgacccgatcaactctatctatccccgttccgtattgtataagaatcaatggatgaggcttgcttccggcgagtggaaagagattaccggtgctaagttctcttgtgacgatacgggaagaagcggattgagatatgactattccggttcggtagaccaggcgaatggcggatttgtgttgaagagtttcggattcacagacgatcatacggactatgggacgatgtttacccgttcttccggtgggactgctcctgacattgatctggatgcgttagagaatattccttctgttgaataaataagtttggaacaatgaaaagaataagatttatatatggcgcaatgttgcttgttcttgctttggcaatgaatgcgtgcgacgattattattcggtagctgttgccggtgatcccggcgtcactccggttgtactgactacaccggaagagagtattacgcttcccgccaaggatgcagcgggggaggtggagattgtaaccaatatggagaactccacgatttctattgctgtgcccgccgatgcgaaaagctggtgtagcgcagcgctttccggaaacaagatagcggtcactttggtggataatccccggacgattgcccgttctacgattctcaccgtcaaggtattctcgattacctgcaagatagaagtggtacaggaagcaaaggcaccggaaccgatctatccgatagaaggaacttataagttcaatattccttctgtcagcgacttcgatgctacgaagatttacaaagtaatggacggtaacctgaaggttgcggaaatctgtctggaatatctgaagaatgacaatattgcttcaagggcagtcgttgtctataccggcgaaggtggggcggccgactataccagaggatttgttgcttatctggtggatgatgaaggcaatgtctcagaagctatcgagaatggaggaacagcttcgttcgactatgcggaaaatacgcttgactatgtggccggaacctcggaagctgtacacacggtttatctttcttcttatggcattacgaagaaggaaccggaagaggctgtaaaagaaactgttcccgaaccgtatctggtcagcgatatggaaggtaattcttatccggtagtcaaaatcggtagtgaagtctggttgggttccaatctacggacaactaaatatagtgacggaacggagattccgttggttcctctggcttctttggataagtctgttgcttgttgtacgtatcccaatggaagtgcgtccattgacgctgccttatatggatatttgtacacgagtaaagtcgttgcgcaggaagacctgctggcaggcagcattgtcgacggtatgtggcgtatttctactggaggtggaacgaatgctgccggtttaatgggaaatgcaaccgattggcagcgcctgttcaagtatatcggaaaggatcagttaggtacattgcttgtatcgggatatacatgggataatggcggagcaggtgagtttgatattaattcgatttcaaacttaacaggtttgagcatagtagctgccggacagatatacaacggtacttctgtctggagatattcaaggcaagccttcttcttctatggaaatgccggacgaggatataatttatcggagaaagacgcgaaagctgtagaccaggcaggagtacgtgaatggcctcatgccaatgacgcttgttccattcgccttgtccgtgttgacaatcgccagtgataatactactatataattatataatgacttttaaatatgaaatatatgaagaaactatctctttttattttggcctgtatctgtacattgggttcttatgcagatgatgtagcggtgtttaatgcattagtaaacagacttcttcccaattactcgtcccaaatcaccggcaagaaactgccggaaggaaagaacgattattttcaactttcttccgttggggatagaattgagattgccgggaataatgcaaacagtatggctgtcggactcaattactatctcaaatattactgcaatacgaacgtgtcctggtttgtggacgaccatctggatatgccggcaacacttccggcagtagataagaaggttacggtagacgctcgctgcaaggaccgtttcttcctgaactactgtacttttggttatacaatgccgtggtggcaatgggaggattgggagcattttattgactggatggcattgaatggtatcaaccttccgctggcaatcaccggtcaggaatctatctggttgaaagtgtggacaaaactcgggttgtcggaaagcgaagtacgcaattatttcacaggccctgcacatttgccgtggcaccgtatgttgaatattgactattggcagggaaatctgccgatgtcctggctcgacggacaggaggagttgcagaaaaagattgtagcccgtgaacgggagctgaacatgaaacctgttcttcctgcttttgccggtcatgtgccgcaagaattgaaacgtatttatcccgatgccaagataaccaaactgggagcgtgggcaggctattccgatcaatacgcttgtagcttccttgacccaatggacccgttgttcacaaagattcagaaaatgtttctggaagaacagaactctatttacggcaccgatcatatctacggcatcgacttgttcaatgagttggaagcacccagctatgagccgtcttatttgagacgtgtcagccgacaggtgtaccaaagtctggagaaagcagataaaaaagctgtctggctgcaaatgacctggctgttctggaatgaaaagaaagactggacgaatgagcggattaaggcttatatcactgccttcccttccaagaaatcgctgcttctggattattactgtgaacggcacgaagtatggcaacagaccgataaatattttggagttccttatatctggtgttatcttggtaactttggcggtaatacggtattggtaggcaatctatacgatatcaacaagcgtctcgaaaatacatttgctaatggcggcaagaacttcgaaggactgggctctactctcgaaggtttcgactgtaatccttttgtttataattatgtgttcgaaaaagcttgggatatagatatacataaagacgtcccgcgttggacggaagaactggctgtacggcgtatcgggagggataatgcgaagggaaaaactgcctggaaactactgattgacagtatttatgccgatccgagccgtcccggacaatgtgcaatgttgagtatccgccccactttcggcaagtttaaaacttattatgcgaatccccgtttcagatacagtaacaaaacgctcttgtctattctcggattaatgctcgaagcggacggcaagggtacttcctattcgttcgatgttgttaacgtcacccgccaacttcttggaaactacttctgggctgtattcaaagactacgaaaaggcttatcagaaaggcgactttaaaaccatgaaagctaaagagcaacttatgcttggcattttgagcgatatggatcgtgtattatccacccagtctgctttccttatgggaaaatggatcagtgacgcccgcaaactgggagcaaatgaaaaagaaaagctctactttgaacagaatgcccgtaacctgctgactacatggggagaaaaggcttcgctcctgaatgactatgccagccgttcctggtcgggactgatttccactttctatgcggaacgttggaaaatgttttttgccgcagtcgatcgtgccgtccttgcggggcagaattttgatgatgcgaaatacgaggactacaagaaggatgttaccgaatacgaagaacgttggtggaaagactgtatcggaactttccccgaacaacctgtcggaaatagtgtgattatctcgaaagagttatatgacaaatacaaacctctgatagaggaaatgtaagataggtagaagttttttattcatgatggcgacaaatatctcccgtagggatattgtcgccattttgagttatagagactcccgttaaatgtacttggatatcagaaccttcttctatttgacgtactcttactttactaaagacataaagtttgagttctgtaaattaatgtgttctgtttattccgtagcaagttttagggaaacgtcatcaaaccaataaactacattttctgttggcgttgcgttataaccggtcagttggttattggcacctgcgcatagcttgaatacaaacttgactagcacattgacgggaatatccacagttacagagtactttttccattctttgcctgcctgattgattactatggcgagtaaggaacaggataagggtaagattggaaaaggtaaaaagataacagtgcgtggggtggtcagagacgtacaggctactcccatagaaggagtccgtatttattcggtaggaaatgagaaagaattggcagtgactaataagaaaggggaatatgtgctgaagcaagttgcggcagatgatgtgctgattttctccaaagcaggtcatgtgtcgagaagaatgccgatggaaggacatccggttttgaatgtccggttataggtgcactgttcaaagcatattcaggataatttatgagatttgttaatgaaggctgcctttattttgctgtcaatggactaaaaggctatctttgtttttatttaatagattaatatttgataaatatgaagatgtgtagtgaagtctttcagtttgaaaaggaactgaagtgggagaacccgggtccgggaatccgtcgtcagataatgggttatgacgaacagttgatgatggtaaaagtgcagtttgaaaaaggagctgtcggcacaatgcacgaacatcatcacagtcaggctacttatgtggtaagtggaaagttcgaattaacgattggcgaacagaaagaaatactatcggcaggagatggctattatgtggctcctaataaacctcatggctgtgtttgtctcgaagcaggcgtgctgattgacacatttactccgatgcgggcagattttctgtaagacagatgtggtatgaaattaccacatctgtggtatttcgcctgaacagaatccgcgctatctttgtcatatattaaaacgtatgaatttaaaacggatatatatggagaagatagcaagaaaattgacggacctggttggtaacactccgttgttggaacttagtaattataataagagtaagaatttgaaagctcgcctggtagtgaagcttgaatattttaaccctgccggaagcgttaaagaccgtattgctttggcgatgattgaagacgctgaggtaaaaggtgttttgcaagcgggagctactattatagaaccgactagtggcaacaccggagtaggactggcttttgtggctgctgccaaaggttataagttgatattgacaatgcccgacacgatgagtgttgaacgccgcaatcttttgaaagctttgggagcagaattggtcctgactcccggtgcggatggtatgaaaggagcaattgccaaagcggaagaactgaaagcggcaactccggactctgttatcttacaacaatttgaaaatcctgctaaccccgccatgcatttacgtactaccggcctggaaatatggagagataccgaggggaaagtcgatatctttgtggccggcgtgggtactggcgggacagttagcggagtaggtgaagcattgaagatgcgcgaccccagtgtgagggtggtagcggtagaaccgtctgattcgccggttctttccggaggaaagcctgggcctcataagattcagggaatcggtgcgggtttcattccgaagacttacaaagcttccgtcgtagatgaaattattcgggtgcagaatgatgatgccattcgtacaagccgtgaactggcgaagctggaaggattgctggtcggcatatcttcgggtgctgctgtttatgcggcgacagaactggcaaaacgcccggaaaatgaagggaagatgattgtggcgttgctgcccgatacaggcgaacgttatttgtctactattttgtatgcttttgaggaatatcctttatgatacactgaattttagaaaaaagagagagaataatcgggtggttatttggcaaaatcgtatatttgccaagtaaccatttttatttaatactatgttaaacaatactttagggattttagtaactattttcttactattttccgcctgtaaagacgaagaaccctcaatctcttcaacgaaggaattgctgaacttttctattttgaaaagtgataatcaaggtaaggtcgcaaatgatgtggaagcctctattcaggggagtgtgattacattgccattggataagtatgatgatttgaaatcattaattgccgtattcgaatataatggaaaatctatcacgataaatggagttgagcaggaatccggagttacctcaaatgattattcgcagccattggtttttactgtggaagcagaagatggcagtaaacagcaatatacagtggaaattgcattgaaagataccggagtgctttctgctttccgctttttgaaaaagaataatgcattcttgactgctgatgtttcctcttttattggagaagaaagtataataccccttgttacattctcacaatccgagcttatccctacatttaccacgaatgctgtaaaagtactggtggacgaggtagaacagaaaagtggaatgacaaagaatgatttttcatctcccgtagtttatcagtttataatgagaaatggggagacttttcaatatacagtaaaggctgaattcttattatctgctattcctgaattgactattacgacgacagatccgtctatagcggaaataccaagtaaggattattatctggagggtactttggctgttaacggtagagggggctatgaggattatacagggaaaaccgaggtgaagggacgtggcaattcaacgtggggatatcctaaaaagccttatcgactgaaacttaataagaaagcagagatctgtggtttggggaaagccaagaattatgtgttgttggcaaatcatcttgatcctacgttaatgcttaactcggttgcattcaagataggtcggctgctggaacttccttttaccaatcatgcaattcctgtagatgtggttttaaacggaatttataaaggttcttacttgttgaccgaacagatagaggttaaagaaaaccgtgtagatttggatgaaaacaacagtgtcatgtgggaacttgattcttattgggatgatgagcctaagtttaaatcgactgcatttaacctccctgtaatggtgaaagaccctgatttgaccacagagcaatttgaatattggaagaaggactttaatgcattcacgacacaatttgcaaaagaaccgttagaaggaaatagctatgtagacatgattgatattgaatcggttgccaaatttctgataacctttaacttggtacacaacatggagataaatcatcctaaaagtgtttttctccataaagaaggaaatggcaagtatgtaatgggacctatctgggattttgattgggcgtatgattatgaaggtacgagtaatcattttggacgttacaacacaccgttattttcaagtagcatgaatggagtcggtacggcatttttccaacgctttctacaagatagccgtgtgaaagcgatatataagagaacttggcaagatttcaagaataataagctagatgcattgttacaatatgtagatgattatgctgtaatgcttaaaccctctgtggaaaggaatagtgaattatgggaaaatactcgttcattcgatacaaaagtgaaagagttgaagacgtggttaaggaatagagcagactatatagatagtgaagtcagtaaactttaatagaatcaatctgttgaactgatagatgaaaatagatatctgaagaaccggtaataatttctgtttcactttttagtgaggaaaacaaaattattaccggttcttatggatttatattattgattggggtttattgcacttcaaaacttcctttcaaccgtatatcttgtgatgaagctcctatcattattgaaaaactacccggttctaccgtaaactgattgttcttgtcccataaccccaagtcttgaggagtaagggtaaagctgattgtctgttcttctcccggttgcaaatgaatacgttcgaagccacgtaacaccttgtcgtaggtagtcacactgctgaaatcatcccgaatataaagctgaactacttcatctccagctcttttcccggtattctttacgatacacgaaagggtcatgttttcttgtggacctataaccggtttggagatcttcaaggctgaatattcaaaagtagtgtaacttaacccatatccgaaaggataaagaactccgtctacacggactctcccctttgaatcggagccgggtttgaatggaaatgcaaatggaacctgtcctactgacttcgggaaagttacagccaggcgaccgcccggattgtaatctccgaaaaggactttagcaatagcattccccataaattcaccggggaaccaggcatgcacaatagcgggaacgtatttgttggcccagttgattgttgctgcccttccgtctaccattaccaaaactactggctttcctgttgcatatacagcttccagcaactgctgctgacgcccgcagagatcgaggctggtacgggaaaattcctcccgaaccgtcttctcatttccgcctaatacaagaatagcgatgtccgaaacttttgccagttctactgcttcattaatcatagcttgttcctgtgtatccaaaggaacattgtataattcactttctgggaaatacttgtcaatgatgttacatccctttgcatagctgacttctgcattaggcagatattctttgattccctgatatacagtcttgataggagcatgggcagggccgtatctgcacgtcagttccttcacttcttctgcattcggaccgataactgctattttgttgaggctcttggacaacggaagcatctgattctcgtttttcagaagaacaatagactctaaagccgctttcatagatacctcctgatgagcggcattgtgtactactgtttctggatgacgatcatcacctgggtacggattatcaaaaagccccaacataaatttgacacgtaagatttcacctacacgttggtcgagggtatgcaaagagatttttccttcgctgattgcacggcgtaaagggaggataaaatcttgtggcggggtgaagttggtgcggatattcagtcctgcatttactacttgtgccgccatttcttcttcagtcggggtaatgcggtgttttgtatgcaggaattccactgcttcactgtccgatactacatatcccttgaacccccattgttgacgcagaatttcagtaaggaaatgataactcccggagacgggttctccgtcataatcattataagagctcattacccctaaggctcctgcttcctgaattcctttgcggaagggttccaaataaagagtcttcatctcacgcggagccacgtgcgggtcggtacgtgtacctccatcacgtcctccaaccgggatactatagacggcaaaatgtttcggagtggctgccagcccttcggcttgcagaccgagaatcatttgttttcccagttcgcctgccagataaggatcttcgccataactctctactacccgtccccagcgcgggtcttgggcaatgtccagaatcggggcgtaaatattggtatatccgagcgcttttgcctcatcagcagtgactttcgcaatttctcggatcagtttcttgttccacgtggcaccttgtccgcattgggcaggaaacatggtagcccgattgtggcacaatccgcgtattccttcattggtaaagtcaacgggaatgcccaaccgtgtctgttctacaaaccagcgttgtatttcgtggcggttctttacactgttggcatacggataagaaagctcggaaccgaatttacccaatccgttcgcctgttcgtcaatattcccgataccgtctttccagatttcctttgaccattcggcagtgggccatgcatctttcaatacccgccccgaaccgtataaagtagccatttggcaggttttctcttccagcgtcatttgcgacagcaaatccgcaacacgggcttcaataggagcggcagggtcttcgtatacgtccttgactccgttcttattaaagtcaatccaattcttcttgtatatgtcttttgtactgccggcaaagatgttgccgacagacagacacaaggtaagtccacatactaattttttcatatctatggcttttcatcagctcgcaggccgaatacttttcccgtcatccggtctaccggtactttccatactttaacattacggacagccggatcggagtaattaaattcattattcgtataatgacacatgataatgtccaatgcgccacgtttttcttccatgtcttcaacgaactctacttttccgcgacacatcgcactttcagaacgcatactgtaactgcaagccactttttcgtgctgatagacaagcttgcgtccgagactaaaagtgatacagacattattattgtgttccaacatttccactttactgccttcgggcccggagtggagatagataatgccgtcttcataaccgaagttcatcggaactacgtatggattaccttccatatcgactatacctacaaaacaaacgtcacaatgaagaataatagactcgattctttgtttgtcttcgatgataaaggttttcataatggttgttagcttcccctttgtggtgaacttatttttctattaattcaaaatccaattgtttcttctcaaggttggcacgtgctacgcgaacggtaatagcatctcccagactatatatcttgtttttacgacgtccgcgaaggcaatagttcttctcgtcaaattcgtaataatcatcatccagatcgcggatgggcaccaaaccttcacatttattttcgttcagttctacgtagagtccccattcggttacaccggagattacgccatcgtaaatctgccccaagcgttcgctcataaattctacctgtttatatttgatagaagcgcgttcagcgttggcagctatttgctccatgttcgaactgtggtcgcagaggtcttcgtatttggcttctgatacgctgcgtcctccgtttatgtacttcgtcaacaaacgatgtaccatcatatccgggaaacggcggatcggtgaggtgaagtgagtgtaatattcgaatgccagtccgtagtggccgatgttatgcgtagagtaacgcgctttctgcatggcacggatagaaactgtttcaatcagattctcttctttcttaccatgaatatcgtccagaaggtggttaatagactttgaaatatctgtttttgtaccgcttgtacgtactttatagccgaaacgggcgatgaactgcgacaagttttccagcttttccgggtcgggcaggtcgtggatacggtaagggagcactttggctttcttattcttcggcacacgtcctaccttttcggctacggttctgttggcaagcaacataaattcttctaccagcttattggcgtcttttgactccttgaagtaaacgctgataggtttccctttctcatcgatctcgaacttcacttcgtaacggtcgaagttgatagctcctgctgagaaacgtttttcgcgaagtgctttggcgatagtatccagtgtgagtacttcttccttgaagtctccttcttttgtctcgataatttgctgtgcctcttcgtaagtaaagcggcggtcggagttgataaccgtatgaacgatgcgtgaatccttgacttcacctttttcggtaatattgaagattacggagaaagccagcttttcttcattcgggcggagggaacagatgaagttacacaatcgttcgggaagcatcggaatggtgcggtccaccagatagacggaagtggcgcgtttttctgcctctttgtcaatgattcctccttctttcacgtaatgcgtcacatcggcgatgtgtacgcctacttcccacaatccttctttcaatttgcggatagaaagtgcatcgtcgaagtctttggcatctttcgggtcaatagtgaaagtggtaactttgcggaagtcctcacgtttggcaatctcttcggctgaaatttcggcgggaatcttgtctgccgctgtctctaccgacttcggatagacataaggcaaaccgaattcggcaagaatggcgtgcatctccgtagtgttttcaccggctttgccaagtatatcaatgacttgtccgataggattttttgccttgtccggccattcggtcactttcacaattgctttgtctccggttttaccacctttcagcttttctttcgggataaagatgtcattggcaagtgtgcggttttccgtcaccagaaaagcatacgacttggctacttccagtgtaccgacaaatgtatcgttggcacgttccagtatttctattacttccccttcggcatccttgtttttacgtttggcgtagaaggtgatctttactttgtcgttgttcatcgcatgggccgagttgcgttcggccacaaagataggatcgccccctccttcggggatgaaggaattctttccgttacttttccgttggaaggtgccggtcatctctgttccatgattgttgagacggaactttcccttttctatttcgctgatatagtcatcatccagcatttcgtgaagaatatcgacgcatagcattttctgcgggtgagtggtgagatgtaactctgagaaaatatatttcatgctcagcgtctcgctttgtttggcatggaaaaagtctatcaatagcgcggctaactgttttttactcattctcttgccggctttcttctctttcttttctttctttttcgccataatgtagtcttttaaaaatatctagttacaaagatataggaatattttccttatcgaaactttgaggaaagaaaaataactttgcagtcttgtatttgattttccgtaataggtcaggttggttctgataaggtatattacaaagttggggataactcataattttatcgttgtatttaagtggtatttaaagggtatcgggttttttttacgggttgagtgcgacaaataataattgagaaaagcaaaatggcttttgttttatatttattgtatctttgtggcattatcaagaaaatgtttagtgaggtacttttattaatattcacgcagaacctagagagtaataatggagagtgttttaattacgggcgcaagcggttttataggaagtttcatcgtagaggaagcgttgaaacgaaggtttggtgtgtgggcagggattcgttctacgagcagtaagaaatatttaaaaaaccggaagattcattttctggaactggactttgcgcatcctaatgaacttcgtgcccaactctccgggcataaaggtacttataacaagtttgattatatcattcattgtgccggtgtcaccaaatgctctgacaaaaagacttttgattatgtcaattatctccagactaaatattttatagacacgctgaaagcgttgaatatggttccgaagcagtttatatatatcagcacgttgagtgtattcggtcctgtacgtgagaaggattatactccgattgaggcggatgatactccggcgcccaatacggcttatgggttcagtaaactgaaagcggaactgtatattcagagtattcccggttttccttatgtcatttatcgtcctacgggagtttacggacctcgtgaaacagattatttccttatggcgaaatctattcagaagcatgttgatttctcggtgggtttccggcgtcaagaccttacttttgtatatgtgaaagacattgtgcaagctattttcctgggaatagagaaaaatgttacccgtagaacgtatttcctgacagacgggaatgtgtataagagtcgtgcgttttcggacctgatacaaaaagaattgggtaatccgtttgttcttcatctgaaatgtccgttaattgtgctaaaagttatatctttgctcgctgaatttattgctacacgttccggaaagagcagtacactaaattcggataaatataagataatgaaacaacgcaattggcaatgtgacatcatcccgacaattaatgaactgggatatgcgcccgaatatgatttggaaaagggagtccatgaaaccattgcctggtataaaaacgaaggatggctttagacttatttaagcgagtagaaacccggaaagggttgtttgctgtggagaagattacattgatttataatctgttgacctctattttgattctattcctgtttcagcgaatggatcatccatggcacatgttgctggatagggctatgattgctgcaatgacttttctgttgatgtatctctaccggcttgctccctgtaagttttcggcgtttgtacgcatcgtcattcagatgagcctgctttcttactggtatccggatactttcgagttcaaccggttctttccgaatctggatcatgtcttcgctatcaccgaacagtttatttttaatgggcaacctgctatctggttttgtcatacgttcccgcatcttctggtcagtgaggcgttcaatatgggatatttcttctattatccgatgatgttgattgtggcgttattctatttcatttataggttcgagtggtttgaaaagatgtcttttgtgcttgtcacttccttctttatctattatctgatatatatattcgtacctgttgcaggacctcaattctattttcctgccattggatttgataatgtttctaaaggaatttttccggctatcggtgattatttcaatcatcatcaggaattgcttcccggtccgggctatcagcatgggttcttttatagtttagtggaaggctcccaacaagtgggcgaacggcctacggccgcatttccaagttcgcatgtcggcatttctaccattctgatgattatggcatggcggggcagtaagaagctgtttgcttgcctgatacctttctatatgctgctttgtggagctactgtatatattcaggctcattatgtcattgatgctattgtaggctttttctccgcattcttgttgtatgtggtggtaacttggatgtttaaaaagtggtttgcgcaaccgatgttcaaataaaatagcattgctccataatactatcttcaaggatgcaatgctataaatatcgtatttaatttttcgggctactttctctgttggtgagtatttcattaaatatctgaaacagctcctctttggtctcggcacgtaacatagcgatgcgggtgtcacggaaattagggattcctttgaataacgggcttgcagccaagtgacggcgcacgtgcaagatacctttgcgttcgtcgagtaggtttacactgtcaatcacttcctggcggaggacttccatacaccattcaaaacttagtggcggcagttcctcgcctgtctccagataatgcttcatctctttaaatatccatggacggccgaagctggcacggcctatcataacagcgtccactccataacggtcgaaacactccttgcagcgttgaggcgttgtcacatccccgttgccgatgatcgggatatgcatccgcggattattttttacttctcctatcagcgtccagtccgcttctccggtgtacatttgtgcacgggtacgaccgtgtatggttaatgcggcaataccgcaatcctgtaactgttctgccagctctacgataattttgttgttggcgtcccaccccagacgggttttcaccgttacggggatttttaccgcatccactacagcacgggtaatctccagcatttgagggatattctgcaacattcctgctccggcaccctttccggccactcttttcaccgggcatccgaagttaatatccaaaatatcaggctgtgcctgttccacaatctttgcggcttccaccatggtttccgtatctttgccgtatatctgaatggcgacgggacgttcttcatcactgatgtttaacttctgcgctgtcttgctgacagcacgtatcagtgcgtcactcgatacaaattcagtatataccatgtccgctccgaactttttgcacatcaggcggaaagccgggtcggtcacgtcttccatgggagcaagcaggataggatgttttcccaagtctatatggttaatcttcatatacgattttgttatttgctgtttatgattgaagtaacttcttcttttcgctgcaaaaatacggaaaaaagcctacctttgtacgcattcatttgcttaactgatacaaataagtatatattctatgagtcttagtttgaaagattttgaaattatggctcctgtaggttcgcgcgaatctctagctgcggccattcaggcaggtgccgattctatctatttcggtatagaaaacttgaatatgcgtgcccgttcggccaatacgttcacgattgatgacttgcgggaaatagcccgcacgtgcgatgagcacgggatgaaaagctacctgacggtgaacaccattatctatgataaagatattcctttaatgcatacgattgtcgatgcggctaaggaagcgggaatttcggctgtgattgcggctgatgttgcagtgatggactatgcccgccggatagggcaggaggtgcatctttccacccagctgaatatctccaatgcagaagcgttgaaattctatgcccggtttgctgatgtagtggtactggcccgtgaattgaatctggaacaggtagcggagatttaccggcagatacaggaagaacatatctgcggtccgagtggcgaacagcttcgtattgaaatgttctgtcatggtgcgctctgtatggctgtttcgggtaaatgctatctttctttgcatgagatgaaccattctgccaaccggggtgcttgtatgcaggtgtgtcgtcgttcttataccgttcgtgataaggaaacggatgtggaattggatattgataacgagtatatcatgtcgccgaaagacctgaaaactattcattttatgaataagatgttggatgcaggtgtgcgtgtgttcaagattgaaggtcgtgcccgtggacctgagtatgtgcgcacagtggtggaatgctacaaagaagctatcaaagcctatctggaagatacctttactgatgaaaagattgcagcatgggatgaacgcctgaagaccgttttcaaccgtggtttctgggacggctactatctcggacagcgtttgggagaatggacccgcaattatggatcggcggcaacggaacgtaagatttacgtgggaaaagggatcaaatacttctctaacatcggagtctccgagtttttggttgaagctgccgaggttagcgtaggcgacaaactgttgattacaggaccgactaccggcgctgtttttatgacattggatgaagcgcgtgttgatctggaaccggtgcagaccgtaaagaaagggcagcatttctctatgaagtcggataagatacgtccgagtgacaaactgtataaattggtatctaccgaagaactgaaaaagtttaaagggctggatatcgaacagaaaagaggctagctccggtcattattctctaatctttaattcacgataaatgaactatatctatgaattggaaatgaaggtgcgtgattatgaatgcgaccttcaaggtattgtcaataatgccaactatcagcattatctggaacatacccggcatgaatttctgacctcggtcggcgttagctttgcagcgcttcatgagcagggagtcgatcccgtagtagcacgtatcaatatggctttcaaaactccgttgaagagtggagatgaatttgtatccaagctatatatgaagaaagaaggcattaagtatgtgttctatcaggatattttccggaaaagtgataataaagtagtagtgaaatccactgttgaaacggtatgtgtagtaaatggacgtttgagtgacagcgaattgtttgataacgtctttgcatcttacctgaaatgaatagctccgaagaagaacaaatttatagtattgctttgacaatggtgcccggtatcgggcatattggagcgaaacatttgatggacgaggcgggaagtgccgggttcatattccataaccgcgaggcacttcttgaatgtgtttcgggaataagtcggcgtgtagtgaatgcgttggattgcccgcaagccattgaccgtgcgaagcaggaatttgattttgttcagaagaataatattcgttgcctgaccataaccgacgaggagtatccttcccgattgagagagtgtgaggatgctcccgttgttcttttcttcaaaggaaatacagatttgaatgccctccgtgtcgttaatatggtaggtactcgtcatgccactgattatggaacccgtatctgtgcttcttttttgcacgatctgaaagtactgtgccctgatgtcttggtagtcagtggcttggcttatggaatcgatataaacgctcatcgtgcagcattagccaatcagctttctacggtaggagttcttgctcatggcttggatcgcatctatccctatgtgcatcgaaagacagctattgatatgcttgataatggtgggctgttaactgaattcctgaccggaacgaatcccgaccgccataactttgtcagccgcaaccgtatcgttgccggtatgtgtgacgctacaattgttattgagtctgccgagaagggtggttcgttaattactgccgaactagccgaaggctatcaccgggactgctttgctttcccgggacgcctgaatgatgaatattccaaaggctgtaaccaactgattcgggataataaggcttctttacttctttcggcagaagattttgtatcggcaatgggttgggatattgctgctcatccggcgaaagtggaaaatgtacaacgcagtcttttccttgacttatccgaggacgagcaaaaggtggttgatattctggagaaacaaggagatttacagattaatacattagttgttgaagcagatattcctgtacagaaaatgaatgcaattcttttcgaacttgaaatgaaaggtgtaattcgtgtattggtgggaggaatgtatcaattattagcttagtttatcataaacataaaaaaaggagcaacgctttgctccaacctttgttaaccttaaatctaatactatgaaaaaaatcacatgacaaatgtaagccttcattatatttcttccaaataattctgttgcatttgtttctcttttaaattctttcactgattttcactgttatcggacacgatgcacttctatcccacttattggaaggtttttgagtatttcaacgagtaatttttctcataaaaaaataggattttttttaatctttgaatatttaaagtatatttgcgctatgtctatagaaaatgaaaagcatggctgcctctagtgaaatggatgatattgctttgtggggccttttgataaaaggcgatcaaaaagcattggaaatactttatcaaagatattattctcttctgttgaattatggtttgagatgcagtacagataaagaattggtcaaagattgtatccaggatctttttataaacttatatcagaatactcacattaatgtgacaaacataacagtccgttcttatctattaaaagctttaagaaataatctcacctataaattagcaactaataaagaagcggattcattagatgactcagtttttcatattccgctcaatgaagatctatttgaacagttatttcctaagaatgatcatgatctgcaactggcccgtcgtcttttggaggcaatctcacagttatctccgaatcaaaaaacagttctttatttacgttacgtgcaggaactctcatataaggaaatagcggatgttatggatatgaacatacaatcgtctatgaatttgtccagccgggctttagctaaactgcgcactctagtaactcaagatgaatacttctttggtgtatggcaattgttttttcttaaaataatattatctctttgaatgggaaaaaatattttctttgtaatttgttgattattatatagatatatcctttttctgactctattgtttttttctgcaaaaaaaatgctgtaaaagtgagtaggtttttcttttaattccattctaattataaaagaggataaaaatgaaatatagtaaaatagatatcaggaatactgtacgcaatcttatagattatttcaagatgcaaaacgaagttccttctcaaaaggaaatagttgaagtatggagtaaaataaaagaaggagttgaaaagaaaaaacaaagaaggaaagaacgatatatacttgtggcaattacttctgcagctgcttttatagggtgtatatggttgggaattgaatggtattcttttaataataaatcggatatatccgtaatagcagcacaaatgtctaatgaatctatagaaggagaggatattcgtttgattgtttctgagaaagaagttcatcatgtaaagaaaggagctacagtagcttattcacaagagggaattgtgagtgtagatgaagaaaaggtctctaagaatactacaaaagatttatacgaccagattattgttcctaaaggtaaatatacccgtttgattcttgctgatggctctagtttgcatattaatgcgggtacgaaagtgatttatcctaaacgttttgagaaaaacagacgtgaaatctttgtagatggagaaatttttattgatgtgaaacgagatgaatcagctccttttattgtgaaaacggcacaatttgacgtacaagtattagggactgcttttgatataaaggcttatagcggcacatttgaaaatgcagaagttgtcttagtacgtggtaaagtaaatgtgaaaagcaaatcgggtaaggaactggttctttcacctgataataaagctacaatattgtctgatggtctgatcgaagagtcttctgtaaatgcggaagaatatgtactttggactgaagggatattgtctctgaataatgatccgctgaatgtgattttagccaaactgggtcgatattacggagttgatattaattgtacagatgatatttcaactataaaaataacaggtaaaatagacttggagtgcggcgtagaagcagcattgaaaagaatatctgctacaggagggttctctttcttgaaacgaggggatacctatatgttaaagcctctagagaaaattgtacaatagaatttgaaaccgaatgtttaatcttaaaaatgaatacgtatgatgataacatgaaaagatttgtctaattagaaaatccgagtaatactgcacatattacccggataaagtgaaaaacaccgagttactggtattatatcaatcttacaaaattatggaaaaaaagttgaaaaacgcaatcataatgaatcgattaacgaaaattatgtttgtactgggatttctattgacttcaatgtggagttattcgagcaattccgtatatgcacaaaatcaaaaattctcttttgaatttaaacaaacctctattaaaacgatttttcaatacattgaaaagcatagtgagtttatatttatgtatcgtacagatctgctcgatacatctaagaaagtctctgtgaaagtagaaaaacagagtatagaacagatacttgagcaagtgctgaaaggaacatctgttgtatatgaaataaatgatcggcagattgtcctaaagaaaggattggaacggtcggaagaagttcctcagcagtcaaggcagaaaaaactgattcagggacttgtcaaagacgataaaggagatgttattatcggtgcgactatcaaagtaaaaggaacaaccataggtactactaccaatatggatgggctttataatttgtcggttccatcagaaaattcaattttgatagtttcttacattggttacgctacacaggaaataaaagttggaaaccgccagaatattattattacattacaagaagatgccaaaaacttagaggaagttgtggttacagcatacggaaccggacagaaaaaggctagtatggtaggttcagtgcaatctatacgaccggccgatctgaaagttcctgcgtctaatctttccacttcctttgccggacgtttggccggtgtgattgctgtgcaacgtagtggtgaaccgggagctgatggcgctaacttttggattcgtggtgtctctacacttggtagtgcaagtacttctccgctgatcattattgatggcattgaatcaactacaactgacttgaatgctctcgatccggaagttattgatggattctcaattctgaaggatgcaacagcaactgcaatgtatggtatgcgtggtgctaatggtgtgatgattgtgacgactaagtctggtgctgctttggataaaccgattattaattttcgtatggaagccagcatgtctacgcctaccagcatacctgagtttgtagatggtgttacttttatggaactttataatgaggctgtacgtaatcagccggcaggaaaagaagcttatacacaagaacgtattgacggaacccgccagggactgaatccttatattttcccggatgttgactggtatggtgaaatgtttaaggaccgttcattcagtgaaacatttaattttaatattcggggtggtggtaaaaaagttgattatttttccagcgtctctgtaggtcatgagagtggtatgttgaaaagtcgttctaaagatttcttttcattcgataacaatattagtcgaatgcgctattcttttcagaacaatatcaatgcacgtttgggtaaaacatccaaattatctttgagattgaacgtaatgttggtggataaacgtggcccgaatgaaagtacaagtagtttgttctctagcgtaatgaatacaaatcctgtagatgctccgattatgtttccggatgatggaacaacttcttatattaaatggggggtacctacaaatacaacagtgaatccattagcaacaatggtaaatggatatgatgatacgtttcagagtacggtaacagcttcattgaattttgaccaaaaattggatttcttggtggatggtttgacttttaaggctatggcttctttaaagaatttcagccaatctgttcagacccgatattctgattggaataagtttaccgttaataactggtctctcaatgatgatggtacttataatatggaggtgattcaggaaggtgctgaagtaggaactgagcttaaaacaaaaagtagtaataccggtgatcggcgtatttacttacaagcgatgttagaatacaatcgtacattcggaaagcatgatgtgggggctttgctgatttataatcaggatgaatatatggataataacccggggacagacttattagtagctcttccgactcgtcgtcagggaattgcagccagagcatcgtatgcatacgacgggcgttatctggctgaggtaaacttgggatacaacggctctgagaattttgcaaaggggaatcgtttcgggctttttccttctatagctgtcggatataatattagcgaagaaaaattctttgaaccattaagaaacataatttctagaatgaaagtcagagcttcgtacggattagttggtaatggcaatattggcggacaacgttttacttatttggcagatgttgatctaacgggaagtcctgcttttacgactggtattaatatggacagaacattgaaaggaccttcatataagcgttttgctaattatgatttaggatgggaagtaggaaaaaaatataatatcgggctagatatgatgttttttaataatctgagcctgacggtagatgtatttcgcgaagaccggacagatatttttcaggagaaagcaactattccttcttatttaggagtatatgggactagctattatgtcaatagtgcggctgtacgcaatcaaggtattgatgcttctgttgatttcggtcatcagttcaacaaagatttcagtatgacatttaaaggaacattcacctatgctcacaatgagattagggcatacgaggaatcagtaggagatcgtactaatctttctagaattggttatagtacttctcaacaatggggatatgtttctgattatttgtttgccgaccaggctgaaataaataatcatccgactcagttgattggaggtactgttggaccgggtgatattaaatatgttaaccaacctaatgtgtatggagtgtatgatgatgttattgatactaatgacagggttcctattggtaatcctactactccggaaattgtctatggctttggtccatcgttccattataaagggttcgatttctcatttttctttcagggaattgccaaaacttctttatttatgagtggcctgcagcctttcggtaccacaatggataacaagaatgtacagacttttatagcagaagatcattggagtcctgataaccaaaatatatttgcgaaatatccgcgtttgactattgaaagaagtgcaaataatgctacaacttccacttattgggaaagagatggtgcttttcttaaattgaaaaatgcagaaattggatatacctttaagtctatgcgtttttatttacggggatctaatctactgactttttctaagtttaaattgtgggatcctgaacaaggaggtggaaacggattgaaatacccaacacaacgtgtgtttaatataggttttcagatgactattaaataaactttaaatataataatatgaaactgattaataaatacctgatttttctctgtgtctttgtatattcttcttgtgattatttagacattgtaccagatgagaagcctaccgaggaagatgcgtttaagaatcctcaattggtagaacgttatctttattcctgctatgcttatattccaaatcccagacatggaactgccagtttggattttcttacaggtgatgaggttgttactccttgggaacacgaaacttttggaaagttcgctcagggtaattatactccaagtaatccttatataaattattggcatgatttatttaaaggtatccggcaatgttatttgttgaaacaaaacttaagtaatgtaccgggacttagtgatgagttaaagactgcgtatgatgcggaagctgattttttgattgctttttatcatttttatttattacgtacttatggtccggctgttttggtgaaagaacttcctaatgtatcttctgctgattcccctgaaactatgctgggacgaaattcgtatgatgaatgtgttgcatgggtagcagaacaattaaagaacgttgcaagtcgtctgcctgcgcgtcgtactggggtcgattatggaagagctactggtgtagctgccatggccattcgtgcacggttgttgttatatgctgcttctccgcaatttaatgggggagaaaaatttaagtctttatatgagaattttaaaaatccggatggcacacagttgattagtaccacctatgatccaactaaatggataacagctgctcaggcatgtaaagaagctattaattgggcaaaggaagctaattatgatctgtatacagctaatgctaactctttgcctaattatcctgagcctgtagatttgatacagcgttctttacgtttgacatttatagataaggataatactcctgaagtgatttgggcattttgtactagagagtcgtccaatagcgacctccaagggaagactattcctcgcttaagtactacagcttatgggggagtggctccaacgttgaaacaagtagaacgtttttatacagaaaatgggcttccgattgaagtggatcctacttatgattttcctaaccgatataatatagctacctttcctgttgaagaaaatgataagaatggagaaggagaaagtcttaagttacatatgaacagagaaccacgtttttatgcttggattgcttttcataacggctattatgaagtatcgggagaagatgatagaaaagagttttcatatgctccggtatggaaaagaggaaaagataaaaagtataagcaattggtgcaatttatgaagacacagaacatgggaataaccaatgataataaatatggaactaaaacgggttatctaaataaaaaaggtgctcatccgggaacaagtgcttctaaatctactggctttaaagtgataaattatccgtggcctatggtccgcttggcagagctttatctgaactatgcagaagcttgtgtagaatgtaatgatttaccggaagctaagaggtatttgaattatgttcgtgggagagctggaatacctactgtggaagaatcctgggatggaatagcagaacttacacagaataaactaagagagattgttcgtcaggaacgtctgatagaactttatatggaaaatcataatttttgggatatacgtcgctggggaatagcagagacattaggtgagcagccgaaaggactttctgttcaggctaaaactataacagaatttgccaaaccggtatcagtagatgtgcaacgtcgttttattccggctcattatttaatgccgcttcctatcagcgaaattaataagaatcccaatatggtacaaaatccgggatatgatcaataattgttatacaaaaagattctataaaatgaaagtaataaaatatatactacccctcctctgtttaggggtgattattacagcttgtaattctgacgatgaagaaagtattgccgctactgaagtccagaacttaacaacacaaagtgctcccggttccattacgttaacatgggagtatgccggtgaagaagatgctaatactactcgtttggttgagatacgttattatgatcctgctgtaaagaaaaatgtcaagaaaacgataagcagattcagtaactcttttacgatagataatgcgctcaaaagatatggcgaatatgagttcgaggtacaaccttttagtacaacttttacgccgggagtgatacaacggataactggcgttgcagaacgagctccggttattgatgaaaaaacatctacggagttggctataaccattgataacttgaccttgggagggtttaagcccgatggcgttactactattccgcagtctagctgtattggtgacggtaatggtccggaacgcttgcttgataacaatgctagtactttcttaaatactgcatattccggagtacctgcagggacaacctactatttggatattgtatatccgaagtctcagaagtatttgaagttctcgtatataaatagaagtgctggtagttttccggcagcaatagaatgctctgttaaggtaaatgagaatgatgaatggactctggtgaaaacattgacaacagtgtccgatgggttacctgaagctgcatcagcggcatattcttctgaagtatatgaagctcctttcgagttcaattatcttcgttttcatgtaaagaagactcatacgggtaacgtgaatttttcaatggcggaatttcgtatttacaatgtggaacgctatttttatgacccggaagcaaccgaagaataaatgagtttatagcatatctttaaggaggatgcattaaaggcatcctccttttcaaaacgttcatattatatctatatcatgaaaaaaagaatattatttttttttatgctgttctttttatgcacagtggtaagtgcctgctccgatgaaaatggtaaaggagttaatactactacattagaaatagccgaacagtttgtagatttcaaggagaatggagaatcgcaaacgcttgcaattacaaccaaccaagaggagtggagcgctactgtagaaagtaatggtaagggctggtgcagcattcttcctgatattaatctggggaatcataaacttactatctctgttactcccaatacgggaaaggaacagcggagtactattattactgtgaaagcagcggagttatcgaagaaaataactgtgcgtcagttggggacggataaaggtattttaatttctcctatgatgaaaacttttactgcggaaggaggaaaaatagagtttacagtaacagcaaatgtagagtttgaaataataccgactgttgattggatcacattgccggtcattacccgcacggcagaatatgtgactacagatcatacatattttattcaacgtaataaaggggaaaagcgtacgggaactattacggtaaaagataaagcaagtgatttattttcagagttaattatatctcaagaggctttaggaggatatgaaagtggtgaatctaatattcaaggtgatctattagttccggtttccacaggtagtgcagtaaattctttgggtaaagtatctcagttggggtcttcaggttttcataggacttatgatggaagtaaagagaccggatatcattccaatacatcagaagatgcttttcctaataattggccgttgacattaacttttgaatttacggaacaacctagaattgattattgcgtttgtcattcagcgagtagtaatatattaaaaaaagcagagatatttgtatctactgaggcagaaccggaatacacaaagttaatggatgtcgacttatccggaagtactgtggcacttattaaatttcccaacccgattattaatccgaaagggattaaatttgaggttacagagtcatcgggtaaatatcttgtgataaaagaaatggagttttatcgtcagaactcggataattatgatccccttaatttgtttacggatattacgtgttctgagttaaaaccgggaattaccgagaaggacatagatgcatgccctgacccgcttttccgtaatgtagctttttatctctctatcaataaatatccgcgcgagtttcgtattcaggagtataaagcttatccacatccggaattattccgtaaagaaaacaagacaagtgctgaacacgacttactggataatccgactggaatttttgtaaataaaggaaaagaagtcgtagtattggtaggagacagtcatggatatcagctttcggctcgcatcttaaatctgaatgtacctggaggggatggatttagtaataactattcttatcctttgtcggaagggattaatcgttttatggcggatacagacggattggtctacatttattatcatactcctgaatatagaaatgcattaccgataaagatacatatcccgtcaggacaagtaaacggatattttgactccggaaaacaccaaccttctgattggaaccgtttgttaaatgctgcagtaggaccgcattttgatgtgcttggtgagaaagctcatttgatctttccggtagacaagttcaaggcaaacactccggatggtaaggctttaatagatgcttatgacaggttggtattacttgagcaacaatttatggggctggaaaaatatgatcgaatggatccgaatcatgtttgtttttctgtcatgtataatgatagttatatgtattctgctgctaatcatacaggatatgttgctagtacaatgaacatgatgtgtgacattagccaatttatacaatcactttggggaccggcacatgaggtcggacattctaatcagactaaaccggggttatgttggcatggaatgggagaggtgacaaataatattcactcactatatgtacaaacctcctttggaaatccctctcgcctacttgatttgtataatgggaaaacatataccatatatgagaaagggctatcagccttcttcacacaacgtcgtccgcatgttgtgaaagacgacaaggtggatgaattaaatcaattgattccattttggcaattgtatctgtacaccaaggctatggggaacgaggacttctataaggatttgtatgagttggtccgtactcgtccagataaggcaactccaggagaaagccagctggaatttactgttttagcttgtgaagcggcccaattagatttaaccaaattcttcacccgatggggctttttcgaaccggtagatattataaaaaatgattatggggaaaagcaatttgtagtgactgaagaaatggtcgatgatacccaaaagcgtattgctgcattcggattttcccaaccaacgaaagttgtggaatatatcactgatgtcaatattgattgttatacaggtaatagtggcattataaaaggtactgctcaaagagaaggtcaaaaaattataatgatcaattggaggaatgtagcagtttacgaagtttattcggacggtaaattatgttttgtatctccagcctcctcttttactgtaaatggaaacttaggaactaaagttcaagtctttgcagtgtctgcaactggagaaaaagtagaagtaacattttaataattatattaattaataaagaacaacatgaaacatttttggacaggtttattagccttaggggtagtcggatgtactgcaccacaacaaacacaaaaggataatatatcgggaatttatcctaaactggctttttataataatgagggcgagtgtggaacaggtgcagtggttccttgggcaggtagtctatgggctatcacctatggacctcatttacctttcgggtcatctgataaactatatcagataacttcggacaagaagatgactgtccgttcggaaagtattggaggaacacctgctaaccgactgattcataaggaatcaaaccaattgaatataggtccgtattttattaacgagtctggtaatgtcagagttttgccttggcaggaggctccgggacgatatactggttcggctcgtcatttgacagatcctgccaataagatttatattggcacgatggaagaaggtttctatgaagtagatgttaatactttgaaagctaaggaattatataaagatagtaatgaagcatggcgtctatatcgtaaagacgctaaaaatacccccaaacccgtagaattactgccgggagcgcatggtaaaggattgtattcaggacaaggagtgatggtattctcaaataacggagagaatagtgccgctgctatggagcattttgatgcgttatccggttcattatcagaatgggacggcaaagactggaaagtcgtacgtcgtaatcaatttgtagaattgaccggtcccggcggtatatacggtaacacaaatccggaaacggatcctatttgggctacaggctgggatcataaatcagtgctacttggagtaagagattcgcagaaaggatggaccttttatcgtttgcctaaagcaagtcattcttatgacggtgcacatggctggaatactgaatggccacgtattcgtaatgttggtacagatgatcaaccggattatctgatgactatgcacggtttattctggcattttccaaaaatgttcaccgctgataattctgccggtattcgtccccgttcaagttatttgaaagtgattggagactttgcccgttggaatgatgaattggtgtttggttgcgatgattctgcccaaaaagaatttttaaacaaacgtaaggcaaaaggaaatatagaaggtccgggacaatccaattcgaacctgtggttcacgtctttgactaaacctgatgaattaggacctgctacagtagatggagccatttgggagaaagaagaagtgcaagcaaatatttattcggatccttatatgtttgccggttgggagcaacgttgttgctggttgcaaaatgatggagggcaggatataacctttacgtttgaaatagatcagaaaggagataatgtttggaaggaactgactgctgtacaagtaaaagcagggcaatcggcttatctgccttttgctgctaaagagcagggagaatggattcgtgtgaaaatagacaaggaaagtaatgtgtccgtaagtttcgtatatactacagttgatactcgttcttccgcttcttcttccatattcaacggattgtcaaaagtatcggaagaaaatactcttggaggattgttgtacggccttggcaagaatagaagagctttaggtgtattagcttccaatattgaaaacggtaaagtaatagaaaacgggtattatgagatgagcgatactttggcattggtgcgtaaggatgatactcagactgccgattttattcgtgagaaatttgcgatacctcatcaggtagttactattgacgaatcatcggttctgatcgttgacgacagacaaagacgttggcgtttaccgttgggagacgaaaattacactaagttgattggacaggatgtggtacgtatttgtcgcgaagtggctacagaacgtgacttatttaattgtcatggtactttctatgaactacctgctgaaaatgcggatggttatgccaagattcgtccgattgcttctcataatttccggattaatgattatgcctcttaccggggaatgttagtgatgaccggtattgaccctaaaaaggataaagataatgaacatatcatcgtgtcggaagatggtaaagctgccgtatgggcaggtgctattgatgatttgtggagtatgggcaaaccgacaggcaaaggcggtccttggaaaaacactttagtaaaggcaggagaggtgtccgatccgtatctgatcggcttttatgataagaagaatttaaccttgtcacataattctcaaaaagatgtaacctttaccatagaaattgacccaacaggtaatgggaaatgggtgaattatactactttgactgtaaaacctggggagaagttggcttatgaattgaaagctccatttcaggcaagatggatacgcttctcgacagattctgatactaacgctactgcatggttggagtataaataaaaaatatatatgaaaaagattcgaataaatttatttattatttgccttttaggcgtattggcagaagtctgtgctcaagaaagtacatggcgggaaatgccttatttcttaaaaggatatgagaaacaatataaaaaatctccgaaagaagctgccttgtcatggtttaaagatgcccgttttggattatttgtacattgggggccggcttctttatacggacaaggcgagtgggtaatgtataataaccggattcccattaaggaatatgaacagaaagcccgggaattcaaaggagataagtttaatgctcaggattatgtgaatctggctttagatgcaaatatgaaatacattactttcgttattaagcatcatgatgggtttgcattatgggattcgaaagcatcagactataacagtgtgaagtatccttcgggaagagatttcttaaaggaactgtccattgcctgtaagaaagctggattaggtttatttatctattattctgtcgggctggattggcatcatccatattatattcctaatacgatgtatgatccggcacgtcctcattatacgaagactccggaggaatataaatactctaagccggaagactttaaacattatatgaactttgcaaaaacacagattatggaactttgtacgatgtatggtcctatagcgggtttttggtttgacacagtcggaggggtttatcaatattcggacctgttcaatatacaagaagtatatgatatgattcatgccatacagcctcatgcattagtagtgtttaaaacaggtgcaaatgggaatgaggactttattacaggagagcgtcactttggttctttggcaccggtgttcaagagtgtaggattacctaaaaaggtccaggatgctgctgactattcttggcaaaacaataaggctaaaccggctgaattgaatatcccgatacaaagtttaggttgggggtatcacagtagtcctaaacagcgtcagaagtcagcaaaagaggtaatggacttattggattattgtgctaaagtaaatgcaaacttattgctgaatatagggcctcgtccggatggaacgattttggaggagaatgtacgagtattaaaggaagtagggcggaaattaaaaaaagatggatttccgcggcttaatactaaagattatatgaagtaccgggatagtgccaaacaagaacgtccgaaagaaaaggagaaccaaacggctaattaggaaaagccttttgtaaagtaaataagaacgtaatggcagatatttgtagggaacactataatatctgccatttttataaactgattatttagaataaataaatatgataaagagagtctgttattttttagtatttggttattgttatctgtttctataacgaatgtataggcgtaaaaataatcaaacatcttttcaataggcaaaatttcattttcattgttcgttccggtccttacgtttgtgcagaatgggaaatgggaggtttatattttaggatcagatggcaaacctgtcagccgtgaatcatggaaagtgatatatgctgatagcgaagagacggaaaaaggtaattatacagcggataaagtttttgatttacaagagtctacctattggaaaactgtcgataaaatttcttatcctcaccaaattgttatagatttgggtgagaaacagaaaattacgggtttccgttatttaccccgtgcagagaaaggtgctccgggacaaatcagaaagtataaaatatatatatcagacggttttaaactttagataataattagttatatcatgaaaacgaaaaagacattagcaatggtaggtatatttttgtttttagcaattagaccttctgttgcctcttcatttaccgaacggacttatttattgcccactagattggagggaagttgccggccggtgcttctgctgagtggaacttgggatttcaaatactctcccgaaagtcgctggacaagtattcaagtccccggtgaggcagctatgcaaggttttgccattgaacatgacaaaccatttttttataagaaagatttcacgatacccgctgattatgcaggcaaacggcttatattgcggtttgatggggtatatagccatgccagattgagtgttaatggaaaatttgttcgtgaacatcatggtggctttacccgttgggagacggatattacttctttcgtacgtatcggaaagaagaatgagatacaactggcagtagtggatcggctagacgaaatttcgtatgcttccggatatgctcatcatcctataggtggtatccttcgtgacgtaaccttatttgcattgcccgaatcccatttatatgacataggtgtggagactcatcttgattctttatatcaagatgcagatttacgtttcttttgcaagttctccgggcaggaaagcacggaaatggagttgcgtttgaaagataagtccggaaagtatgtaccattgtcgcagtcccgttttgcattgtcggacggacaaaatattttttcgttacctgttaaaaatccgcttaaatgggatgcggaacatccaaatttgtatgaactggaaataattgtttttcagaatgggcaagaaacctctcggtttagtcgcaatatcggttttcgtgaagtcaagattataaaagaccgtatgctggtcaacggtcatcaggtgaaattgcgcggtgcctgccgccatgatattcatccaactttggggcgtaccactactttagagctggatagtctggatgcggtactgttcaaacaggctaatatgaactttgtccgtacctcgcattatcctcctactgaacgttttctggagttttgtgaccgttatgggatttatgtggaaagtgaaacggctgtttgttttgtagatacatatcgtcagaagaattataagcccggcaggtcgcaaaatgatccggcgtttgccgaacgttatttggggcaatgccgggagatggtaaagagtcttcgttcccatccgtcaatcctgttttggagtattggtaatgaaagtgtttacggaagtaattttcagttatgttgggattggataaaggcgactgataccactcgccctgttatttttagttatccgggttcggctgtagaaaaaaaggcagaaatatttgatatcttaagtatgcattatcagaatgtatatggaaatgtagggcagtggggaatgtctacccataattttcagggacatggcataccggctttatttgacgaatgggcgcatccggcttgctatacatatgccacattacaaactgatcccaatatccgtgaattttgggggaaatctcttgatatgatgtggagtggattgtttaatgctccgggaggtctgggaggtgctatttggggatatgtggatgagactttctccttaccggaacctaaattcgggacttcattctggaaagaattcgcacgtactgccaagccgctggattatcaaggaaattgtgtgggatatggtgaatgggggattgttgatgtatggcgtcggcaaaaaccggagttctggtcaactaaaaaggcttattcacctgttcggttacttgtggaggataatctttcatttactaccgggcaaaaattgatgttggctatacataaccgatttgaccatacaaatttgaatgaaattcatgctacctacacttatagaggtgtgacaaaatctttggaattgcaaccggtcgcacctcatacgaaaggtatgatagtcattcccgctgagcaatgggagaatggagaaactttgcaggtcgagttttttaccgctgctaatgagttgattgatgtgtatcgttttgtattgggaacggaaaagataatttacccttccttgctcgccggacagaatttatccgtaacagatgaaggtgacaaagtgattgtacatggtaatggttttgaaatacctttcgataaagaaaccggattgattgtcaatgcaacagtaggaggggaagtaattattgaaaaaggtccgttcttgaacttgtatgtgaatttgaaccacttgacaggggctgaagtacgtaaaacggctaaccattttgccacttctgatattgattggaaaaagaaatcttttgattacagtcaacaaaaggacgaggtctgtatttctcttaccgggacttatcgggaagtgaatgttgattttgatataaaagtaacctcggctggtgaattgtctataaactatcggacagagggtgttcctaacggattcttacgtgaaacaggattatctttctatttatctcatagtatacatcagttaaattggaggcgcaaagggtactggaattattatcctataggagcatttgcaggaaatgagggtgaggcctcgctttacgaatcgcagcaaaagggatatggtgagaaacctgttcagtcctggcaggttgatacgcacaattattactattgggctgacgccggtgcgaattgtaaggaaccactaactcaaatggcaaaaggtatgaaagaaaatatttattattattcactttctactggggcagaaggtgagcatcaattatcagttatttctcaggatgcttcagtggcttgccgtataaacaagtgtgccaatgaacaattgatattatatgctaataatcgttgggattatcctgagatagcatgggggaattattgtaaaactttggaagtattgccttgttacggccggattgatataagggttaggtagtagggcattggaatttgtagaacaactatgaattattgaactttattgacgctgtatatgaataaataattaatgtgtaatttattggttatcaatagaatattattaatttcacgcttcgttaatcttcaacagcccgaatgacttgacaaacgcttttttatgttgtatatttgtagatataataacaacaataaaactacaatttaaaacttaaaaagtgaaatgagaagaatcttagcttttgccgaacttgccgtgatgtacttccccggatgtactaccagcaagaatgcggtacgttgtctcagccgatggattaaaggttgtaacccgttggtcaaagaacttatgccgacagggtatctgccctacaatcatcgctatctgacgatgaaacagtataagattataacaaaacacctaggtgatccttatgaggattagggtataaataacccgacaaagagcttaaggctgcaaacttttaggagttttgcagccttttttgttgcataaattcggtccggaagtgcttaaatgctatatgaaagtttataataaactgtcgacccgtttataataaacgatgaaggtttttattataaacttaagaatggtttttgcacaaatgataaactattttcaatagaagatgaatgggaaagcatagattctttttatttgtcattttataaagtaacttttggggacagtcttcgtatgaaaaaagaatacaagatattctttatattggcaatcataatattattttaggttttttgggggcattctcataattattttatggatgcaatcaaagagtttgtattatctattttagatttttgtcagttagacttaaccgattgagaaataaacttttagcgaactatttgagaagtagcggtaacgagttagcaaccgtgcgaatttcagcgttttgcgttgctatgctgtcaaataactctttcatttgcaaatatagggatttttttcgaaagtacgaactatcggtggcagttttataaaatcagctggcgaaaaaacaaatagaattttccaaaatagctttggataagccattaacgaaatactttcttttaagagcacagtggtttacccaataaaattatatacctttgtgacaagttaaagaagatgtcgcaatgaatcggataaaagaaacattgattgaggcgggtattagtcaaactgaattggctaaacggcttggtaaaggttttaacatggtcaatctatacgctacgaacagagtgtaaccgcctatacccgtactatacaggatagcggaaatactgaatgtggatgtgcgtacacttttgtacctaacgaaataaaaaaacagacatatggcaaatactaatctaaaggaagctaaggcggctaagaatgatgagttctatacgcaatttcatgacatagagattgaaatgaacgcctatcttgaatatgaccccgatgtgtttcgaggaaagattgtgcttcttccttgtgatgatccagaatggagcaactttacccgatactttgctgccaaattcgatgagttgggcttgaaaaaactgatttctacgagctatgcgccggatagcaaaaaatacaaaacgccttatcagccctctttgtttgagcaagaagcacctcatttcgacccgtccaaggcacaggtgaaaggtaagatattcatcttggaacgagacaaaagtggggacggacgtatcaatattgatgaccttgagtggaagtatatggaaggtgacggagatttccgaagcaaagaagttaccgagcttcgcaatgaagcggattttatcatcaccaatccgccattctccctgtttcgtgaattcttggcttggattgtggaagccgggaagaaatttgctgtaataggtaatatgaatgcaatcacttataaagaggtctttccactgataaaagataacaaagtttggttaggtgctacaggaaatggaaatgatatggtttttggtgttcctgaaggagctaaagtggatgagaaagacagggctaaagctgcaagattaggatatgtaggcaattataccagattgggcaattcatgttggtttaccagtattgaacatggtcgtcgtcacgagccattgtcactgatgagcatggcagacaacctccgcttttccaaacataaggaactgagaggcaaagctgcctatgaccgctacgataattatgatgccattgaagtaccttttacggacgccattccgtcagattatgaaggagtgatgggagttcctatctcatttctgattaaatattgtccggagcaatttgaaatcttagggataaccgataggcaaaacacatcttgcttaagaaccaagaaatacacgaatgttgacagccaaaatacaacgacttgaatgcgagaagcgttattaaagatggcagaagatatattcctatgtatgcccgattactcatccgtaaattataatctgatatgtctgataagtactcttgcatatacttgggtgtaatactttccgtcaactatataataagtctcattttgaggaactttagaatgaagcaataccgctccatcattaagtttcgtcactttggattctttcccatggtggtctatttgaatttgctcgggataaatcttagaagctattccataccaagttttagttatccctaagatttcaacttaaaaataaagacaaaatataatattatgactcagcataatgccatcaagctttttgaaaccaagaaagtgcgtactatttgggatgacaaagaagaaaaatggtacttttccatagtggatgtggtggctgtcctaaccgatagtcctaatcctcgtaagtattggagtgtcttgaaaacacgtttaaaaaaagaagggagtgggaggtgtgaagtgaccccaaaaatttggactggttaaacattatccagttatagaaagagttcggtattgtactggactctttccttttaaccgggacttgattcttttattattataataatctatatattcttccaaagcctttgtgaagtcttccggagactcgaacttttcagcgtatagaagctcagatttcataattccgaaaaaattctccatcatagagttgtccagacaatttccctttctcgacatactttgaattatatgatgtccttcaagcc

SEQ ID NO: 2973 - DNA, 119670 bp, Unknown
  gut microbiota DNA sequence
ctttccgcatttcacttttttgtagtaactttgcccaacaaataacaaatatatgcccacattcgttcaaattcttgattttataggcacatttgcctttgctattagtggtatccggctagcttcggcaaagcgattcgactggttcggagcttacgtcgtaggtcttgctacggctattggtggtggtacaatccgtgatgttctgctcgatgttactcccgggtggatgacagaccctatttatttaatttgtacaggcgtagcattgctttgggtgatttgtttcggacgctggctgatccgcctcaataatactttctttattttcgactcgatcggtctggcactgtttactgttgtaggtgtaggcaagagcattgctttgggctatcctttctgggtggctatcatcatgggtagcattacgggagcggcaggcggtgtgattcgtgatgtctttatcaacgaaatcccgctaatcttcagaaaagaaatttatgcaatggcgtgcgtagtaggcggcatcacttactggctttgtcatgtcgcaggcatggagtcgtacggatgtcaattggttggcggttcgacagtttttcttgcccgtattctcgccgtgaaatatcacatctgcctgcctatattaaaaggtagtgacgaagtggaggcaaacgagaacaaagagcaatgacggaaggaagttggtttattcttccttcacgtccagttccccctggaagcttatggattgacggttttgcatattgacgtcaatacttgtcgaaccatttgaatatactttcactctgaaatcaaacttatcttccgggttgcgggcggtgaatgtgattactgaattgcctttcttgtccagtttcatgttatactctttaagaggggctttgaaattgagtccattgcctcctccgtaagggatactgtaagcccgaccataataaggtaaataggagattaccgaatcgtttctgatttccagtgagtataaactggtcaatggaatagaccggccgcgcataggcatggcggtattgacgtctatcttataattctctgaaacaatcagttctttcacagcttctttcttctgttcctttttctctttcttgctttgagccgaaagagtagggagaccaactagcaaagctagcaacagcataaggatttgttttttcattttcatgtcagttgtatttaggttgatatatatgtataacaatcaaatatactaaaaagtcaggaactcctctcttttctttaatgaaaattaaacagaaatcctgacctttatcttatatttcagaagaacttagaactgttccaatatctcaatccgcttttcaatgggagggtgcgtagcaaacaaaccgctgaatttgctatataagcctttggttttctttttaggattttgaataaataattgtgctatgtctttccgttgcactgcttctattgccggatcggcggatattttacgcaaggcactggcgagtgccagcggattcttcgtcatttccgccgaccctgcatctgccatatattcgcgtttgcgtgaaatggcaaaacgcatcaggctggcaaaaaggaaaccgatagcagctatcagtaaagcgataaatatgaagatgaaaattcctccgctacctttactattgctacgtacacgtatatgtgtaatcgcatagaaggtgatttccgtcagcatggagaagatgccgacaaacacgatagagattatcagcaaacgtacatcccgattgcggatatgagtaagctcatgcccgattactgcttccagttcctcgtcattcagcttctggatgatgcctcttgaaagagtaatagtgtatgtgcggtcattgataccgcttgcaaatgcattcagtgaatcatcataaatgatatttattttcggcatgctcatgccttgagacatacagaggttttctactaaattataaacgcgtttgttctctttgcggtctagtggtttggaacatgtggcagaattaatgatacttgtattggcccaataggcaatgagaaaccaaattaccaccactcctaaagtatacggtagagaagagagaaagaaatgattgaccataggcatcatttcaatctccatactctttccgtatccgaagagaacgagtaagtaacaggacagataaaggagtgctgttaccaaacaaggaaaaagtagtaataggaatccggaacgtaagttgttccggttctgttgtgtttggattccgacgtattgcatcgcgtgtttattttttgcagttgggtgggacggtggtgttcggattagaaactaattttgggtgcctgttccagattagcacgttcgttctttcccaaatcgaacataatttctctttggaatccggtcattcccgcaataatgtttgaagggaatgtctgaacggcattattatattctttggttgccgagttgaaataacggcggacagcagctaacttattctctacatcagcaatttcttcctgtaattgcaggaaattctggtttgctttcaggtcgggataggcttccaatgtgattttcagtcctgacagggccgaggatagttggttttcggcggctatcttttcgtcgatagttctggcactgaccgcaccgttgcgtgcctgaatcacccggtcgagagtttctttctcgtgtgcggcatatcctttcacagtgtctactagttgagggataaggtcgtgacgttgtttcagttgcacgtcaatgtcggcaaatgcgttttcacgattgtttctgagtttcaccagggagttgtacatggatgcgaaaataattcccaatagtacaataatacctacaataataagtatagtcatagcctttcattttatttaaatatattaatcaaaagtaggctatttgtttttttctgccaaacagaacagaataaaaatcattaattaccacctgaaatctatccaaatgcacccgaaaactgtcatttgatagaattaacccctaagaaatgacgaatttccccctgtctggtattcaaaatacctttaaacttgcatcatcgagaaaaacgaaatattaaccataaaacccttaaagtatgaaaagtttaagtttcagaaaagatttaattggagttcaggaggaattgcttcgttttgcgtataagttgactgccgatcgtgaagaggcgaatgatttattgcaagaaacatcattaaaagcattagataatgaggaaaaatatgttccggacacaaatttcaaaggatggatgtacacaatcatgcgtaacatctttattaataactaccgaaaaatagtacgtgaccagactttcgtcgatcagactgataattattatcacttgaatttaccgcaggactcgggattcataagtacggaaggtgcctatgacttgaaagaaatgcatcgtattgtcaacgcattgcctaaggagtataaggtgcctttttctatgcatgtatccggatttaaataccgtgagattgcagacaaattgggccttcctttgggaactgtgaagagccgcatattttttacacgacaacgtttacaacaagaattgaaggattttgtataaatggggataatacattcaaacaagcttattgataatgcaaggagcaacgaagtagacttcggttgctcctttattttttcttcttctttatctctttctttgcggcttttccctccggtggaaacttggggacgagattcataagccgtaatatttgcttctgccgttttaatatatacgccgaaggtttcgccgagttaaaccgtatcggattcgggagagtggcggcgattagtgcacattgacctttggacagcttggcagctgtagtgttgaacttatattttgcagcagcctgtgcgccataaatccctttacccatttcgattgagttgagataaacttccataatccgttctttcggccagaatagttctatgagaaaagtgaaatagacttccaggcctttccgcacccatgaagattgtggccataggaatacattttttgctgtctgctggctgatagtgcttgctccacgtttccgtttccttgtttcattttctttcatcgcttttttgatttccacgaaatcgaatccgttgtgttcggcaaaacggttgtcttcggaagctatcactgccattggcaggctaggagatatcttatcaaaagaaacccacgtgtgcttccacgtgggtttatctcctgaaatgatctgttgaacacctcgaatgaccattaacggagtaatataaaccggcatgaaccgataaataatgaccgtcagtaaggtcgatgtaaaaaagagaatcaacagattgcgtgtataacgcagaatttttttaattagaagctgcctgtgcatctttaatcatttgctcacttgcgtacatgtacacttctacacgacggttctgttcacgacctgcggctgtatcgttgctggcaacgggatcgctttcacccataccttgcacgcctttaatctggttggtagaaacaccgcaacttaataagtaactggatacactctgtgcacgttcttgtgacaggttcaggttcttttgctggctttgtgcggcagtactgttcttccagccctgattgtcggtgtatccatagatagatacatccatatctctgttctggttgagcacattgttggcgaatttgcttaatgcagatttagcagcagcactcagattagcattacctgttgtgaaaaggattcctgaatcgaatgtcactttcacggcttgcaatccgttgttgtctgttatctgttctacttgtgcgccttcaatttgttttgcttctgctgcggccttatccatttttttaccaatgagagcacctgttcctgcacctaccgccgtaccgatagcagcaccgatagcagcgcctttacctttaccgataacaccacctaggatagcacccaatgcagcacccgaaccgccaccaatagcagcacctttaccagtgttattcatacttgcacatccactgaatatcatggttatactcataaagagaaccataaatttcatcttgttcataatgttgatgttttaattgtttaataataatctgtttttatattttaaataacaacgcaaagatacatattatttgccaaggtgatactttttaagttaaaataactcgcacactcttggcagagtgctgaaaaatgtcgataaactgttactttccgactacggacgggaggttcaggcatttcttcctaatgatgataaaccagcttaggaggataagtcctttggcaacagttgtgacgctgactgcccaccagataccttctactcccatgcccattcgtacaaatagaatggcaagcgggatacgcatataattacatccgatactgataatagcaggaggtacggtacgcccgataccatagaatactccttgcatggtgatttcgagcatcatgaaaagctgggaatacccgtcaatgcgtagaaatacacctccggcctcataggctgcctgctcgggtacgaatattgaaaagacttcgtttccgaagaagatgaatagcagtgtacagaaagttccgaagattcctgtcatccataaggtggtataccatgctttgagcactcgttcggttcgtccggcagcatagttttgggcgataaaagcactgagtgcggttgagaatccttgtgaagtgttccaggtaattgcttcgatttgtcctccggtcgtgaaagtcattaagccgatgtggccgccttgctcagaggcggtacggcagaggaacatattgacaaatgcaaacagggtattcaatgtggctacgggtaatcctagttttaggatacgtcgtgtgtatctcttctttaattgagtgaagaaaggaaatccaccgagcagtgagtcttttcggaaacgtagttggtagatgaagatagagaaaacagtagcttgtgaaatccaggttgcataagcggcaccattggtctccaaaccgaaaccgaagatgaacagaggatcaagaatgatattcaaaagaagtccggcaccaccgatatagaacgggattttacttcgtcctgcggcattgtagatacctgtaaaggcggcggaaaggaaaataaacggcattccggtagagataatccgtagatattctattgcattggcggtaatgtgtacctcaagttcgtagatacagatgatgggttctgcaaggatgaaaagtaatccgccccaacagagagaaatgataagtgcaatcgtaatgttatgggaggcaaagtgacgggcatcttcttgattttgtgcgccgatagattgtcctacactgacttcggaacctaccttatttaatagggagatagaaccggacatccatgtcaggattccgacagaaccaatggctgctacggcttcactacccagccgtcctacccatgccatatccgtgagactgtatgccatttggataaatgacgtagccatgataggcattgctaaattgaatagttgacgattgattggcccgtgtgtcaggtttttaattccttgcatttctttttctatttaaaaggaggcgcaaagatacataaatttactatcttcgcacattaaatcattcattaatcaaagtatacagatactatgaaacagaaattttctattcttttattcctgttgcttttatggttcacaggttctcaggcggtagctcagaatgctccgaacccttttgatattgaacaaccttcgcttcgcgtatttcttccggcgccggaattggctacaggtcgtgctgtagtggcgtgcccgggtggtggatattcgcacttggctgtagaccacgaaggatatgattgggcaccgtatttcaacaaacagggtatcgcattgatcgttctgaaatatcgtatgccgaatggtgaccgtacacttcctatttcggatgccgaggctgccatgaagatagtgcgggacagtgctgatgtatggaatctgaatccgagagatatcggtatcatgggatcttctgccggtggacatcttgcatcgacaatcgcgactcatgccaaaccggaacttcgtcctgatttccagattcttttctatccggtaattacaatggataagtcgtatactcacatgggttcccataacagccttttgggtaaggatgcttctgctgagttggaaaaggagtattctaatgagaagcaagtgacaaaagaaacaccgcgtgcttttatcgtttatagtgatgatgataaggctgttccgcccgctaatggagtgaactattatctggctctgaataagaatggtgttcctgctgttctgcatatttacccttccggtggtcatggttggggaattcgtgaaggtttcctttataaggatgagatgttgaacgaactgacttcatggttacgtagtttcaaagctccccgtaaggatgccgttcgtgtagcttgtattggcaatagtattacgtatggagcacggattaagaatcgtgatcgtgatagttatccttctgttttaagtcgtatgctgggtgacggttattgggtaaagaatttcggagtaagtgcccgcacgttactgaataagggtgatcgtccttatatgaatgaaaaggcttatcaggatgcattagctttcaatcctaatgttgtggttatcaaactgggaacaaacgacagtaaatcgtttaactggaaacataaagccgacttcacgaaagatatacagactatgattgatgctttcaaggcattgcctgcccaaccgaaaatctatctctgttacccttctaaggcataccaagctaatgaaagtatcaatgatgatattatttctaaagaaattattccgatgattaaaaaagttgccaagaaaaacaagttggatataattgatcttcatacggcaatggatggaataccacaactctttccggacaaaattcatccgaatgaagaaggtgccaaaataatggcaaaaactgtttacgaatcaattagaaaatagaagcatatctttttactttgattatttagccttctaaaatgctggtaatcatacgaaaaactatttaagcaaatatttgtaaatgttatagccactaatactatagaaagtaggtattagtggctattcttcttataatatgctaaaaaagtgtcattttgaaagaatgggaagcctgtaatatctaattttgtgctcgtgaatgtgttgaaatgattaatggataatgtctttacttcatcaattatgagcaaacaacaagattttgtgttcttatcaaagttaatggctaatgccaatatggggtggtgggaagctaatttggcaacggaatgttatacctgttccgaatatatatctgagattctgaatttggatgaaacagggactattagttttgaggatttcaataaacgtattttgaatgaagaacaaggtccgacaacggttcgctctttcgatgtacagtcgatgtcggaagtcgtttatttattaaaaacccaaaaagggtcagtttggatgcgtagtaagatttgttttcgagaagtagatgataagggaaatacgattgtgtatggcattgcagaaatgcaggacggaccggatactgcaatagcttgtcaggctttacaacgtagcgaacggcttttacataatatttataagaatttgcctgttggtattgagttgtataataaggagggagtattggtcgacctcaatgataaagaattggatttgtttcatgtagatagtaaggaggaacttctaggcatcaatattttcgagaatccagttttcccggaatagatgaaggagaggttgaggaataatgaggatgcggactttacctttcgctatgatttctcaaagttaggagaatattattcgaataataaggcggaaggtacaatcgatcttgtgactaaagtaactactttgtatgatgagaatcataatccggttaattatctgctgattaatgctgataaaacggagactacggttgcttataataagattcaggaatttgaggaattttttgagttaataggtgactatgcgaaagtgggttatgctcattttaatattctaagtaagcagggacatgcacagaaaagttggtataaaaatataggagaagagtctggaactcctttatccgagattattggtacatataaatcttttcatcctgatgaccgtgatttgattcttcagttttttgaggaggtacaaaaaggaaatgctgataagttaagtcataaaatacgtgtctttagggagaatggagagtgtacatggacgcatgttaatctctttgtcagaaaatatgcaccccaagataaagtcatagaattgattagtattaattatgatattacagatttgaaacagataggagaaatgctcgttaatgaacgtgatagagctgaagcttcagatcgtttaaagtcagctttcttggctaatatgagtcatgaaatccgtactccgttgaatgctattgttggtttttcaagtctgttggccagtgcggaaaatgtagtggaaaaggagctttataattctttaattagtcataataacgaacttttgcttaatctgatcaatgatatcattgatttgtctaaaattgaagccggatatttggagttacatcagaattggtttaatcttacggagcttcttgatgagtgtgtggcagaatatgctcgtcttcttccttctggtgtggaacttctgaccagttatccggaacatgatgctttggtggaacttgataagttgcgtatcaagcagatattgaataattttctttcaaatgctttgaagaatacgattcgtggatatgtggaagtgttttatgaaatagataagcattgcgttagaattggggtaaaagataccggtcgtggtattcctcagaatatgttggagaagatatttgaaagatttgaaaaagtggactcttttgcacaaggtgtggggttggggttatctatttgtaaatctattgtcgataaaatgaacggacgaatacaagtatactctcagctaggattgggcactacttttattgcagagctaccttgtcattccatattagtcaatgaataaaaaacaattgatgtttctgtggttttatacctgtttgcatttattcattcggatatctcattatataaattagccagtttgttatatgttcctctgtgcaggcatgatactacttttcgggcaggaattccccgaagagtaatatcatctttcctctgtaataattttgctgatttaaatccgataaccattctaatattttcttcagtcagattttcataatcaggatacttaacaaaaggaatatctgttgtagctgcatcttgttcttcaaacaaagaacttattttcataaaactttctctaatagcctgtgacattcttagtatatctgtttgttattcaataattaaggtcggttgttcggcttgtggtattggctacactgaatttgggctgatagataatacctattttcctgaatatcctaaaagtacgacttatcaacgacgacttctaccgcttgtaatgatgaaatcaagagaaagacaaagaataaatccctgataatcattgattatcagggatttattctttgtctagtgatccgcctggggctcgaacccaggaccccaacattaaaagtgttgtgctctacctgctgagctagcgaatcaatccttgttactttctttcgaaatgcgggtgcaaaggtagaacatttttttataactccaaaggatttcaaacatttttcttatctttgtgccattatcaacaatatacattattaatatatggctgctgacgataaaaaaattatcttctcaatggtaggggtgagcaaagcattcactccaaataaaaatgtgttgaaagacatttacctgtcattcttttatggagcgaaaatcggtattattggtctgaatggttccggtaagtcaacgttaatgaagattatcgcaggtttagagaaatcctatcagggagaagtggtcttctctccggggtattccgtaggttatttggcgcaggaaccctatcttgacaacacgaagacagtaaaagaagtagtaatggaaggtgtgcaacccattgttgacgcactgacagaatacgaagaaatcaatcaaaaattcggtttgccggagtattacgaagaccagaataaaatggatgctctttttactcgtcaaggcgaattgcaagatattattgatgcaacagatgcatggaatctggatagtaaactggaacgtgcaatggacgcacttcgttgtccgcctgaaaatcagtctgtggcaaatctttccggaggtgaacgtcgacgggtagctctttgtcgtttgctgttgcagaaaccggatgtgttgttgctggacgagcctaccaaccatttggatgcagaatctatcgattggttggaacaacatcttcaacaatatgaagggactgttattgccgtaacccacgaccgttacttccttgaccacgttgccggctggattctcgaactagatcgtggtgaaggtattccatggaaaggaaactactcttcctggctggaacagaagacgaaacgcatggaaatggaggaaaaaactgcgagcaaacgtcgtaagacgttggagcgcgagttggaatgggttcgtatggctccgaaagctcgtcaggcaaaagggaaagcccgccttaattcatacgacaagttgttgaatgaagacgtgaaagagaaggaggaaaaactggaaatctttattccgaatggtcctcgtttaggtaatagagttatcgaagctaaacatgtggctaaagcatacggtgataaactgctgtttgacgatttgaattttgtgcttcccccgaatggcattgtcggcgtaatcggtccgaatggtgcaggaaaaactacacttttccgtttgattatgggactggaaaccgtagataagggtgaatttgaagtaggagagactgtaaaagtagcctatgtcgaccagcagcataaagacattgacccgaacaagagtgtttatcaggtaatttccggtggtaatgatttgcttcgtatgggcggacgtgatattaatgcacgtgcttatctttctcgtttcaatttctccggagccgatcaggaaaaactttgtggtgtgctctccggtggtgagagaaatcgtttgcacctagcaatggctttgaaagaagaaggtaacgtgttgttgctcgatgagcctaccaatgatatcgacgtaaatacactgcgtgctttggaagaaggtctggaagactttgcaggttgtgcagttgtcatttcacacgaccgttggttcctcgatcgtatttgtacacacattctggcttttgaaggagactccaatgtgttttactttgaaggttcctattcggagtacgaagaaaataaattgaagcgtttagggaatgaagaaccgaagcgtgttcgttatagaaagttaatgaccgactagtgtaaaataatagattgaagcatttctaatgctttctgtttcaaaataaaaggctctgcaagttatgtagagcctttcttgttttataacgcaataaaacgtttatctctcttaaaattttgtagtataattgtaacgtaagtctaaataatattaattatatttgtgcacagtttttaaaagcaaacaattagtataaactaatcaattacattatgttaaaaagaacgcggtcttttttggtgctagtaatgttgctaatgacagtcacaatgagtgcacaggttaccacagccactatgagtggtaaagtgacagcacaagatgaaccgattatcggagcaactattgttgccattcacgagccttcaggaactcggtatggaactgtgactaatgttagtggtcaattcaatttgcaaggtatgcgtactggtggaccatacaaggtagaaatttcttatgtcggttatcagacagctatttacaaaggaatcaatcttttattaggagagaattatgttttaaatgtttctttaaaagagagttctgaactgttggacgaagtggtggtgactgcttctaaagaaagtaacatgaagtctgatagggcaggtgctattatgaatgctaatcgtgatatgattagtaacaccccaactatttcccgtagtattagcgatattatgcgtctttctccacaaggtgctgatgttggtaatggttttgcagtcggtggtggtaattatcgccaatcatttgtgacagttgacggtgctgctttcaacaatacattcggattgggaggtaatcttccggctaacggctctccaatttctttggatgctttggaacaggttacagtagctgtaaccccgtttgatgttcgtcagagcggttttacaggaggtgcaattaatgcagtaactcgttctggagataaccaatttcgtggaactgcttatatgtattttaataatgagaatctaaaagggagtaaagttgatgattatgaacttttacgttctaaagctcaatattatacttatggtgcaagcttcggtggtccgattataaaagataaattattcttctttgtaaatggagaatatgaagataatgtaacagcgggatcaaactatcgtcctcgtactgcacttggagaaagctatagtggtggtaatatacatcgccctctccaaagtgacatggatgatatgcgtggtttcttactaaacaaatataattttgatccgggaaagtataatgactattcaacggatacccctgcttatcgtgttatggcacgtgttgactggaatgctaatcaaaacaataaagttagtttccgttttaccaagacacataccaaagattctaacttccctaccagttcagtcagtccattatctacatcagctctttatccgggaggaacatccactgaagtcatagatggtaaacctgttggtaccattgctcctggacagggacgtacttctaaatatgcgcttagcttttcgaattccaactattatcaagtgcgtgattttacttctgttgcaggtgaatggaactctcgtatggctcaaggagcaatgaataatatgctacgttttgcatattcttatcaagatgagcctcgttcgtttgatggtcctcttttcccaacagttgatattttgcaggatggtgctgtatatgccaattttggtgcagacctttttactgcgggtaatctgcgtcagacaaaagtattcaccattacagatgagtttaactggaacgtaggtattaataagttcatggccggtttccaatatgagcatacaaaggctattaatggttatatgctgggaggtgctggttactatgtttattcaagttggagtgattttgtaaatgatgagactccgaaggcctttgctataacccattcaaattcacctgatatgtctcaattccttgcagaattgaaattccaacaatattctttatatttgcaagatgaggtttctgtttcagaaaactttaaagtaacaggtggacttcgttttgaactaccgacttacccttctttaaagaataattataatgaagaatttgccaaattagattttggaggtcagcattattcaacagaccaacttccgggtgcgaaagtatcagtatctccacgtgttggttttaattgggatataacaggagatcgtaagtatgtacttcgtggtggtacaggtttgtttgttggacgtatgcctttcgtttggttgatttctgctgtcggaaattcaggcgtgggacaaactacctattattatacggatgctgctactgcccaatataaacctcatttccatgcaaatcgtgatgagattttgaaggacttgtatggtggtcagacgcattcaaaagtagagcttcctaaagatccgacaattattgataaagatttgaagatgccttctacttggaagacctcattagctcttgatatgagattgccgggagatgttaactttactttggaaggaatttatagccgtgattataatccggttgtgataactaaccgcggttatgaattgcaagaggcaaaattgactctttctcccaatgatgttcgtgatacttataagatatataacagcggtcggaatgtttatcttttagagaactggaaaaagggtgcttattactattctatttcagcgcaattgcgtaagaactttgattttggtttagatttatcatttgcttatacacattcaaaatctcgttcatatagtgatggtattggtgaccaagtaacttctgcctataagactaatacttattcggtaaatggtatcaatgaacatgaattgggttatggtacctatgtagctcctgatcgtatcttggctacaatcggttataaaaaggaatatggaaagcattttgctactagcgtttctttgttgtatgaaggaatgcagatgggatattccgggtcatggggatatagccgctactcgtatactttctctagtaatgttgttggtgatgcaggcgctaatagtttattgtatattcctgcaacacgtgaagaattagatagctggaagtttagtgatgctgcttcttatccggctaaggagcaaagagatgatttctggaattatattaaccaagataaatacctgaagaatcgcaaaggtaagtatgccgagagaggtggagctgttatgccatggcatcatcaagttgattttaaattgaatcaagatttctatttgaatgttggtggaaagcgtaacttgctgcaagtaggagttgatattaaaaaccttcctaacttattgaacaacagttggggactttataagcaggtaatcaattcgagcttgttgcaatataaaaacggagaatttactatgaataagaatgcaggtgagacattgacaagcacttatcgtgatttccaaagttttaaatctacttattcagtacagtttagtgtacgttatattttcaattaagacaatatagtataactgaaaattaaaagcaactaattcataacgatttagttgcttttttgtttttattgctgaatatctagttgagtcccattacaaagaacaccttttatagcttcatcctcatcaccaccggattatgatcactatattcccagtccggtgagaaataatccaaacctttcagttcgggcgagtgaagaatatagtcaattctcaacaggtgcttaaaatatttgaaagtatacatatatccgtgtccgccggtctgaaagccgtcttgcaatttatcacctttcacggtgtggtaaacgtaagaagaagggagtgagttgaagtcaccgcagacaagagtaggatagggggaggcagacaccagttgattgataagattagcttgtactgcacgtttccggaagttctcatgcaggccgtcggcgagcgtaagggcggcacgtttggctctttgagagttgtcttggcgaagttctttttccagtttgcgcttattgcggctcacttccgtagtttgcaggtgattattaaacagacggatcatacgaccgttgacttcaatatcacaccagagactacaattaccggagttgggataaataatcagatgctcctttttgatagaataacggctgaaaacggcaagttgtaaaagatgttgtccttcgggagaagaaggaatataatgataaggccagtcagacaacgcagtacatagactgtcgacgccaaactcatcatcaataccgaactcttgaaaacagagaatgtccgctttcagatttctcatctgtgcagcgatctccttacatgaatacccggtgtgttcgcggttgaacccgtcaacgttgtaagtggctacggtcaacactccgggagtatatgcgttaactttgactgtcggtttggaagccggatcgagaagcgggaattggagaacacagttgatgtaaccccaattactgaatatggcaattagcggaatgaaaacccagcatcgccaacgaatcgtccaataaacagcagacgccagattgaccaacaaaagtatcggtagtcccaaaccgataaaaggcataaacttgaaactgtccggtgaagcagtaccgttaaatgctcctgctattgtgacacccgccaggatacacgataaaagaatagagatgtagtaaaatagtctataaaaggctttcatctttccttggttatgtttatatcactcttgtattttattatttaattctggagacagccatttattgagcatttttttcaattccgactgcacgatcggcttggatatgaaatcactacatcccgcttctttggcagctttctggtcttgcggataagcgtatgcactttgaacaacaataggaacggtggcagacagttcgcgaatgattttcgtagcttccagtccgtccagattcggcattttgatatccattaagatgaggtcaggtttcacttcatcatacattatgacggcttccataccgtcgtgtgcatgaaccaaccgataattcttgccaaggatagcattcagcaaatcatagttactgtccgtgtcttcggcaatcaagatgcaggcttgtttctcaggaatttgttcctgtggtgtttcattggagggttgttcagtcaggtcagaaggttgagaagactgcgaaagttgtgaggactgcgaagacagtgaagattgcataccttctgttgtgtccgcaaccttctttataatattataaggcaacgtaaaattaaacgtcgttcctactccaaattcagagttgacggtaatctttccacccagtcgttcaacgatcgacttacagatagacaatcccaatcccgtgccctgcgcatgattattcagcttggcaaaacgttcgaacacacgtcccaccttttccggttcgatgcctgtgcccgtgtcggtcacatgaaaaacgatttggtcgccgacccgtttgtatccataactaatgctcccttctttcgtgaatttggcggcattgccaatcaaattagaaatcacctggaacacccgattcttgtccgtttcaatcatcagactttcgtccgaaggctcgtgaacgaggctcacgcctaccggcatacggaaaatatgagcgtcgtgtacttccctgcataagttgtgcaggcttgtaggtcctatggtaaattcgataattcccgattcaattttcgaaagatcaagaatctcgttgataagatccagcaggcgaccattattagactcaacgataccataatacgtctttctttcctcctcatcattactttcggcgataagttgcgagaagccgacaatggcgttcaaaggagtacgaatctcgtgactcatgttggcgaggaaagccgattttagcttgtcggacatttccgctttctcttttgacgattgaagttcacgtttgatcatctccagttccgtgatatcccattcgatgctgacgatgataggagaggacaattcatccccgtccacccggattttccgtttgtcgaggataatccggttaccgtttttatccctcccttcggtcgtccaatgcaatccctttccggtggttgccacttgtatatcctcctgtctctttttatcggccactatgggcggataatagtcaaagtcattctttccgatcgactcaccgacgcagagatcacggttgtacgactcacggttacggtagagataccggaaatcattattgatctccttcaccacaattcctgcaggcagattattgatagtagtatccataatcaagttgagtcgcttgatttgcgcctcataccggattcgttcggaaatatcatgtgcaaacgaccagtaactttcttctccggaatcattggtcacattatacattgtgccttcgtatgccagaatatccctgttgattttcgaaggatgatgagcgataaaattgctgcttccgccgtgcatgatgtccttacaacgttcgttccacgctttctgcgtaggcatatctgcggcaatatcataaattttcagtttacagatatccacattctcgcaaatcccgtgattgtggagaaaacgccggttggcaaagatgatcgtaccgtcctctctggcggcaaagatactctccttggcgttgttgatagcgtgcgtcagcgtattgatatcgtttctgcggcgctggatatcggtgatattctggatatatccctcgatcgtaaggctgccgtccgggagttcctcacgcagataagcctggatacgcatataatatatctctccgttcacctgtacgcggtagctgatactgtccgtattgagcctctccagatttctaagtttccagttgataaacgtctgccagtcttcttcaacgatatactccctgtatttctcgaaagaaatgcttcgtaccgtttcttcgcacaacacgccggtatgtcccagataatgaaaaacgttttcattcgtattgtacacccactgaccgatttgcgccactttctgtatctcccgcagcgttcggttcgcttgttccagttggcgtttcacgttgcttctttgggtgatgtcgcgatactggcagagcaccatgtcatcataaggatgcatgatacatttaaaataataaacatcttcctttagtaccagtttgaagtttttactgacgctctttttcccttcaagtaccgattggaagacaggaacaaccctttcccgcgtatattcgggcaggagttcaaatatgttttttcctagaagtatctcatcctgtaagaaccataggtcacaatgaggatcaatgtctatgcaaacaccattcttgtcgaccaacaacattgtatcggctgtcagtttcaatatcctttgcgcgttatttgtatcatgtaatgttctgttcatgtccattcgattagatgattaagactattgcatcttacaaagataacaaaagatttgattatttgtttttatttttctgcccgcttcgctttttcccaagtcccgctccctcttttcttcttcagatagcggattcctctcaagacatttatattcataaagaggaagtaataggggataaacagcaatttattctttatctgtctggtagacagataatatccccagtatcccagtccgtagaaaaacacctgtaacacgagcaggacgccgtagaacacaggcgagccgcccgtcagcaaaatcgcaacattcagcgggagaagtgcgaacaatagaaaaggtgtgacagaccacctcaacacccggtgcgacgtgtactgaaaactaagtaccccgtagcggaaagggttcagcaatgggcgaagcctacggattgactgcaatcctccggcagcgatacgcaccttccgtttttcctcctcgcgcatatcggccgaaccgttttcaatggcgtaagcattcgtacaataagcaatgatataccccttcatcgtgatacgcagtgaaaggatgaaatcatcaagcaacgtgtccggctccattgtctcaaacaattcccgccgcacggcaaacagctctcccgcagctcccaccgccgaatacaaccgtgcatcaagcgccttcaacgttgattcatatttccagtaaataccttcgccaccggctgccgccccgtccttcgcttgcacggcaatccgtttttcacctgccacgcagcccactttcggattccggaaagcaagcacaatctcccggattgcctcccggttcaccattgtgttcgcatccgtaaagaccaccaacggggtgtcaaccagtgtcatgccgcgtgtcatggcagccgtcttgccctgccgtagcggttggaagtgcaccgttgcctttcctgcccagcgagtttgcaaacgctcgttcgttccgtcatcactgccgtccgtcacccaaacaatgcgcaacttatccgccggataatccaggtccaggctattctccattttctcgtccactacatcttcctcgttgaaagcagtgatgaacagtgtcacttctggcaattcatcgttcgatgcaggtaatgagtatttcaccggtttcacgaaaagctctttcagtttgacgagaatatagagcacgattccgtagcccagatacgtgtagaacacgacgaacagggcaaaccagaaaataacttcgagacaaagagtaagggtatcattcataacttcaatgtataattaataaaatgagttatattatcacattattgttttatttgattcgctttagtagttcatctttcttattcgatttcttcagcatctttacaaagtagagcgcatccgttttggctgacgcatccgttggtttcgcttcatgccgtttgacgaaattctcagcgtgttctgtcagaaatttcctgcaatcaatatttaacataagtccttcgttttcgccataatttgcgtacgatagtccggttacagtaacattagattcaatggactttatattttctgccaacattccggggaggttgaccgtaatggaagggtaatagaaattcatttcatccggtagtttaacggtaagtataaatatatgctcatctgcttttaccattctaatctcactatgttggcgataaaaattatattcgtaaaactcctcttgattgggcatccaaacattatcagctccgtcttttccataagtatcattgagccagagcaaaaagttagcccaagaagcgtccgtaccatgtacaccgacattgatcgcagcccgttctttcggtatacgatgtaattgtttttcaatctccttcttcagactttcgatcgaatagaatcccctgttgagtacaaccttctttaagtcgttggtcagttgtgcgggatataaagcaatgccgtcatcagaagccattgtctgtaagaaagtatttatttgtgcagctgtgagatactcatttttgccactcggtttcgttaacattttgcattctctatctgctaatttctctttaataatagtttgggcaatttcataatggttaaggaggttctctactgataattcctcattatcaatatccatatcgtgcatagcaatgcctacgccataattcagcatctctttgacatctccccaaaccaatccggatttcataaagaagcgataatattctttcgtatttcctttatatatttgtgtcttcgcattcatccagtcccactcaggagagagggtgatggtgaaggagaagcgtacctcgtttccggctccgtccgtatttcccaagtttttttcgagataataaatatcaggtggaagatcatcatattgtaaatgcccgaactggtagaaataactagctgacaatggcttaccatgaatagcagcccaagtccatgagaacgcggattgcttacagtcatcttgagtaagcatgaaaagccaggatttattatactttaaaggaggaatgaccggttcatttatgttttcttcaggtaaaatactgttggttttcagggttatttctactgcatattccccttcttcggagccaaatggatagaaaaagtctgtatctgcaacaatatcttgccttccgctgttttgtccgttatttccatttgcttcttcttcatccttatctccttggtacagattctgtttcttaatacaggaagtactgatcagacataacatgaataacatcaacaccacttttgtttttcctaaaaacagtcggctgcttagtctgtttttctccagcagtttgatcacttctatgcatagaatgattgataagacagaaattacaggagtgatgataaagttaaaccagaaaaaacctgcccccaatagattgaatttttgaagtacatttccttcaatcagtatatgaagcgtataaattccgagtgtatatgtccccaccttctcgatgacatgaaaattggggcgatagagacgctgcaataataagaaaatggagaagctgcctgtcatacctatcagatatcgataagaaacaattgacaatctttccgtggccggataaaaaacgaactgttcatccagataattataaagtcccattcctgtgacgtatatatacgattctttctgataaaaaaacaataggatgatgaaagccgttaacgaaacggcaagtaagcgtgtgtgatactgtgaaatcgtgtcaatatacttatgcatgaaatagcccatccaaaaaaatggatacataaacttgtccaaatgtatccgtccgttgtccggtaaagccagaaaaagtaaaaaagagatgatgaaagctaccatatccttttttaatatcttcatgctgataatggccaatgtgaaacaaataaatacagaacgcaagaaccagaaacgagtaaaggtttccatgattacagattttactataccggcaggtgacggtatagttccgtctgccagtatatatccgatatgaatggccactaataccagcgaccaaccaaaacatggaatgatgagttgcttaaatcttcgtatgatattgctcgtcaacggtttgccaatagaattactgaagaagaaaccactgaccaacataaagataggcatgtggaatgaacagataaactgatgtacaggatttaaccagaattcatcgccgtctcccatattctggatagtatgtccccaaactacaataaatatgcagattcccttaatgaaatcaatatattctatacgtttgttctttatcatttgtttttcttaataaggttactgtcttcgtctttatactctttctttttaaagaatatgcctcctatattttttattcccttgattgtgcgtactttgaaactattgaacaagctgccgtcggctcccactgttccatatcctgttactgcacgtgccttacggttgcggataaaagcgatttttccgaattgcttcagttgcaatgcgagatatccgtcttccccacggataatatccgttcggattcctgttttcctggcatattttgtgtgatacgcaaaaacgagtcctcgcacactcagttccggtcgtttgaatgattgggcccataaatgcacgtcgcgagtagcttcataaatttttaatcccagccatgagtgctccttgtccgggatataactccatagcgaacttgcggctactataccgggacgttcgagtgcatctaccattgtctccacatatttaggaggatacatggtatcagagtcaatattaatatgatatttacctcgtgccttgttcagtccgcagaggcgggcaaatccgcaactatgctgtgcttccgtatagtaaggcacaccgcacgcctgaaaaatctcagctgtcctgtctttcgattcattgtctactccgataatttccacgggatatttgcattgcatatcactcagcgaccagaggcaggcaagcagatgcttctcctcattatatccaatgagtgagacggtgactaagggacactcactttgtaatttcgcaatgttatggcgtacctcttcgattacagctccgggagcctctgcaaacggtttctcatagacctgtaaatacttgttataccacgtcataataattgtttgttacttgttattaattgcaaattttcttttttatgatgaatggagtgcatccctctttctacttttctggaagtgaatcaaacagttctttccattgtagggcgatatgttctatcttgaaccgttgcacgtcggtgtgggcctgttggcccattttttgacggatatcttcgttttctatcagatagcagattttttcggctaacccctcaatgtccccgttgtccaccagtagcccattcttgtcatcggtgattatatcacgtggtccgcatggacaagcaaatgagacagggggcactccacaggccattgcttcaataatgaccattccaaaaccttcataacgtgaagaaagaacgaaaatagagctctcacaatatttttccacaatatcttctacggtatgttccagtatgcaactggaagtaacgttgagttcgtcaatctgctgctggagtcgctgtcgcataccgtcgccataaatccgtagtgtccagtcaggatgccgtttgttgacaatactccatgcaggaataagccgatcgaatcctttttgcggtacgtatcttcccacggcaatcacttgcttttgtgaaacatcggacaggcgtttcgggaaaaaaggaagcggattgtaaattactgtcacattgtttaattcagtccattcgacggcatcttcgtggcttaggaccacaaaccgtttcaactgtcttaattgccggatcagctgtctcctccaatatattttcccgattttttggataaagctgggaagacggttgttcttgaagtcccggtagtttgatttattgaaatggatttctccgattttagtgctgccgtctttcattttattgacgaaattgatgtcgcgtcgaagcaacgaaatcgtgatatccgggcagatagtacacaggcactcattcaatttctttttgaagagccgttgtttattgtaatatttgaagaatcgtttcagcagaggatacccgtatagttcgtcgtagttgatgtcgagctgatgtatggtaatggaaggatgtggcgggtaatagggctgtttatctttcccgtcagtaaggataatatgtatgtcatagccgaaatgttcggcaaaatagtttgcttttaacgtaagtacccgctccataccgctcggataatagagagaaggaatacagtaggctatttttttcgttttattcattagatattgtttgtttttttactctgttttttcactgtttccgcggaatccccattcttatattgttcaccaccttctgcatctgggctttccacgagagcggccggacagattcccgtatttcgggcggcgtcacgcttaatgagcgctgaaattcgatcagccgggcgatgtcaataggcgattcgtccgcaggaactttccatacgtatggcatggagtcgaaatcctcgtccgtttccgagtatgtgaaagctagtccgcgggcggcatattcgcggtttttcaacgtcttgatataggtgatcccgcttcggtggcgtcccaggctgccaattgcgaagtccgcttgctcgaattgcgcatccagctcttcactgtgcagaggtccgtgcaggaggacatacggttctagatgattgtcacggataagaggtagaatatcttcccgttcccgttcgccagaaagaggtcctacgatatggaagtaaaccttgtattctggattggtccggtaataatcagccagaccgctcactagtcggtcgaatccgtgccagtaatgcacttcggccacgccgatcaggtgcagttcgtgcgatgtatcgttccgggtgtgcttcatggggatagcgtcaaaatctataccattggagatacggatcgtccgtcctccgaaaatcgtgttcgcgttggagaaggtgacgatgccgtccagtttcttggccagcaggcggcggaagcaacggtcgatcatcaagtaaaatttcattgagcgcgaaacatattcttggtcatacgggtaggtcggtatttccataatcacctttgcgccgatatttttcaggcgtttcaccatgcgcagcgtgaaagggttggcattgtggtgtgaccggatatataccagtttgatattttcgcagcgtgcatactcgatgattggtgcgtaataaacgtgtttccacattttggacgtagttcctgtcccaaagtcggcaatgacctcgtcgtctactattaggcggcgttcaccatgaggagtaatatcataataacacaggcgaacgtccactccgcattctttgagagctttcacctgatagtgtattttcttactaattccattggctttgtcgaagccgtggaaaattaggaacaaggctttcattcgttctttcagtttctgtatatcgtttattctgtcctcttatttcttttttctcactatgccctgcacttttccgataatatcaaattcgtgcgtagcctgtatatatcctccaaagataataaaactaattatacctttggcaataattgtcacaaaaatattcattccttccattgcatactgcatgggaaggaggactaacgctattaaaccgctgaccgccaacggagaaataagctgacgtatgaacggccacaggcttcgccggaatgtcactcggtacatctgccagtagcattgcacgaagttgacggtgaatgtcactacgatgcagtttgccaccgctgacagcgtgccgaagtagaaaatgccgagcagcatacccgtcacgttgagcgcggacgagaatgctccgcagacgaacaggcttcgcgtgtcacctgccgcctggaagatagatcccgacgaggagaggacgatctggattccgaccgaaagtgccagtatccggaatacgggtatggaaggcaaccactggttgccgaaaataatcagtgtcacttcttctgctgtaaagaaaagtagcacactaagcggaagtccgatgaaagagaggaaacggatgatacgctcgtaagaggtaggcagtttctctttatcgtcttgtaaatcactgaaaatagggtgcatcaccggagtgatgacctgtgtgatgttctgcaaagggagcatcatcaagcggtaggatttttcgtaatatccgaggtcggacatacccatatatttaccgatcagcagtttgtctagattgcggctgaaatagttaatgacgttgaacaggaattgataagcggagtaggaaaaaatttttcgtagtgccgtcagtcccagcgtgtagcgtaggtgttgtggatagtgctggaaggaaatagtaaatatcagtacactggaaagtattgggttgataatcagtgcatagatccctgctccacagagggcggcagtcactgcggtggcaccaccggatatctgtatgacgaaactgcggatcgcgataaatttgaactctttattccggtaaaacaaagctccgggcacgatagtggcggaagcaaaaaagagattgatggacagcagttggcacaacgtccgtaggatatcgctctcgtaatagtcggcgatgagccacgaggcggcaaagaatagcatgctaataccgattcccgtccagacggtgaatgagaaaatatccgacaactcagcttttgttagcgatttgtgctggataatggctggtgatacgcccatgtcggttaggaggttgaagaaggcgataatcacggaagcaatcgccactactccgaaatcgtccggcgtgagtaaacgtgccaggactcccgccactacgagggaaatgacgatgccgctatatttggcaagtgcagtgtagaatactcctgagaataactgtcgcttgatattgttaaccattgattgcgtttttatatgcttgtacatactccagtcccactttgcagatgttcatctctttcatggcatacgaatagttcctttctccctgtccctgtattgagagtcggcgggcttccttgagtgcccgcaggatgtcttttttattgttggggcaaaacgtcgggttgccagttgcttcgagcagttcgccgatgttccccactttcggacctacgacgactttgtggtagaggaaagcgagggggacgttgccggagttgaggatatcttttcgttgaatgaatatgacatttgaagcggccatgtagtaaggtaggtcgcaattgtcgattagttcgtcattggcaccggcgtgcagctttatcacgcggttgagcaagggtatgagcaggtagtagccgacccttgaggcccaccgcttgaggaaattcctgccgtagttgttgcgccgtgagaaaggatagaggcggggggctaacagtaatttttgtttttcgttccacgaacggaaggttcccagcgctatgcgtatctcttcgcggtttcggaatttcccgaaagcagtgacgataaatgcttcttgtggaagttgcaggtattgccgtgcacgctctacgctgatgtcctcttggtaagtatactgatagatgtgatgcaggatgatggcattccggctgtcgggatgtttgccgacgaactcctccaaactgaaacgccccatgtgcaccacgacgtcactttgcgattcgatgatgtcgtatgcccggctgataacttcgttggcgtaatgaggacgtacattgtggcgggtatagacgaaatgtgtccctcgtgaacggaagaacgcgattcgttcctccagtcggcggacgatgccggggtcgtcgcaggtccagcccaccacttcttcaggccattggaaatggatgatgtcataggtcttgtccgactcccagaactcctttgtggaacatcgcacgtcaacgcctgtcattcggatagcatcacacaatacaggtacgaacagattgtcagtatctccgttttccctaaagacgatgagcgatgttatcgacgaaccgcttgtatcttcactgtcattcatgtttttctcttttgatattgattcgctttgctgtgctacaaaggtatgaaaagatatggtaactctctctcttttcatgctaaaattgctatgaagcggacaataaaagaatgctgaacggttcttttcttctatcagcttgataatttctttcgtaagggggatgtttctctctctcatataaagaagacacgggcttgtgtgtatttgagggcactgatgatgctgagggtcggctgaaaccaacggtggaaagtagatgtgtcgatattaagatgtacacataagtccatgacggtcaaatggcacgtctcaagtaatttctttattaacaaaatttttttgttataaatctgatttactattttgttctcttcttgctccgttagcgtgtggttgcattttgggttcattgtctgcataaataatttgaattgacggtgcaaagttctgataaaaagatatgtcgtgttgcgtttatgcaacatacggaataaaaaaatattcacttttgcctccgtttctgttaggaactggaatatagataaatagctacgataatgaagaaagatcagtattttaatttggaggaaaatttgttgaatgacgacaatattgccggtatgatgttggagttgggagcggcaaacgctctcggagtttatgtgatgttgctgttgcatttgcgcacgaaggacaattacgaagcgtcatgcagaccgctgccgttgaaggccttggccaaacgctatgatgtggatgtggatttgatagggaggatactccgcgagttcgatctttttgaggtggatgaggaacgccaaatgtttcgcgctccttatctggacagggtgatgaaaacattggaggaaaaatggcggataaatgccgaaaacggcaaaaaaggcggtcgtccgagaaagactaaaaaacgcgctgaaacgcccgccggtaaaggcggaaaaccgaatgaaacccaagagaagagaggagaagagaacaagagtattgttcctgttgtgaacaacagcagcaatacagcgggcgaggtgccgggagatgctgctgttgctgctgctacgagtgggaaggtggctgctgagggtaagaaagtggctgctgagaggtgcaaggcatctgttgaaggtcgaaaagcggttgctgcgagtaaaaaggctgttggcgggatgaagattgtttcggtggacgaagccggagagattccgttgcagcgagtacttccgtgggagaagttggtggatcagcttgccgcttcccggtcgtacatggagttggcaggtcagcactcgggactggggaagctgtttctcgagcatcagcagcaggttatcgaacttttcaaacagcatattctgctctacggaaaaggaggtgaattgctgtttcttgaggatgtccgacgttatttttccaactatgtcgcaccggggtctactacctgccggatgttgcgtgaaacgttattgtcggtacttcagaaggcgggaagcacagccgacaatcgttttgaaactctttcaaacggtcggaggatgtacctgggacaccttatcccggacgatgcaccgctacgtccgaacgcagccgcagtatgggacgatgtgcggaaaaagtgaggacattaaccctggctgtcaacctcggaggacagggatttcacggaagaagatttggaggtgtgccaccgccgccgtggtttcaacggtgtggggtattatttctacatccgtaagaacgatagcaccaagacgacgcgggagattgaacggataggtgcgcacaccaaaggacacaacctgaatagtatcggtatttgctatgagggcagcctcgactatcacaatcgtcctgccgacacccgcacggaatggcagattcattcgatgcacgtacttatcctcacgctgttgcgtgactatctcggctgccgcatttgcgggcatcgtgacctgagtcccgacctgaacggaaacggggagattgagcttgaagaatgggcgaaggcgtgtccttgctttgaggtgaaggcggaatggggcgcataagacgcattgttttcctttataaaaagaccatattacaaaatatcataggactaggcgtttctgtttttgtaatatggtcttctattattttctatttatctgcttccggtagtccattttaaaaatccaggcatatacttctgtaatatccaatagactgcgtagactatggcaatatctataatgattgctgaaaagtaggcaattatcatttgtaattcactgttctggtctgccagttttagtgaaaactttcgtatgaatcgcagcatgggatcgtgtgcgacatatagaaaaaaactggacgaactcaagaaagctatatcacgaattttgccttttttcaataggaatgatatgagagctataacgaataaaactcctgtgaaagtttgggtacgatgtaagtagaagctgatagcagtatcagctaataaaggatccattatcataattatggggtagataatgaataatggttttgaaattttgtccattgattcaaccagattcatattattgatgctgaaccatgctcctaaactatagaagaatagagtacttaacggatatgcctgtccaggatgcagcatccaggctacaccgaaaataagaactcctatgaggcgggtatagcgtacaatcaaataaatgaccggagctccgagtgccagtataattaagttacgcacgaaccacaactgtgtaagcatagggtagccgttgtccatggcccagagtgcttttagatagtcgggaaaagtgaaattatgtactaactggtgactgtcattaaacaaatgccggatagacggaatgcactctactgcataatatatactgatgataaaaatattccaaaacagataaggtaacaataatgagtagaaacgttttttaagtttatatttatagcattgaatggttggggtatatccactataaaaaagaaatcccgaaatcaagaaaaacgtcggtacagccatttctccgaattgcatagataatacacgagttatctgctgatatactgtgagttcccctaatgaaggatacatttgaacagatgtataggaatgtaggaatacaatgcctatgctcataataaaacgggtgatattaagagcggatgattcttgtttgtgcatattctttttttctttatttattaatgttgtgtgtagatgtttatgagtaggcctgcattctgtttccatgagaagatttgtgccctttgcaatccataatcttgttgtgctttgcgcaagataggattattctcaagttccagaatcatatcggctattgcttgctcgttgaacgggtcgataagtaatgcgccttctcccgcaacttccggcatggcagaaaggttgctcgtgataacaggtgttccgcatgccattgcttcgataataggaatgccaaacccttcggataatgatggaaataggaatacggaagctccacagaaaagtgccggcatatcttttccgggcaaataaccggggcagactaagtgtggacgcaaatcctgtaattttttttcttctaaaatgtgattaagttcttcttcttttaatccactgataagcaatggtaaaggcgaagatgattgttggcggtaaagatgatatgctttcagtacgcgatgtgtattttttctcggttcggtgttacctataaaaaataaatattcgccttcaggaacatatagacggactatatccgaatctgcacttaaaggagtgtactgggcgttatatccattgtgaagcacgctgatctggtcattgctcaggtggaaatagttctgtatctgggtgcattctgtgtcagagaccgtaatgatgtgccggcatcggggaacgatacggggaactatcaaacggcgataatgccatcctaaacgttgataccaggacttactgccggaatggcggcgctccatatatataatatcgtgcagtgtgagaagtaatggcacggaggtaaataacggagcagtgttacttgtgcaatggagtaagtccggttttattttacgaagtacacggggcagtcctatctgttcccaaagaggatatgtcggacatttcaattcgatgatatgcattcgttcggattcttgcaggcaatggtcttctcctggagcaactatcacgaaatattcattttccatatccgtacgttgtatctcttgcaactgttcaagtataacaaaatccattccgtgcttgtccggacggaaaatgcgttgggcttcaatggctattctcatggtatatttatttaatgttcggtatgaataaatttcttattagcccccttcaggtggaataagttaccaatcattctgacggataatacggggatatgcaagactgctttcagcattcttctgttagcgagtgacgctggaagtggtagcaacattgctgatatctgtgccagagccagtatccaccatttcaaagctagtccaggcaacccacccataaagggggctaagatagtggctagtatcgttaatcctatgactgctgccagttggatgatgcgcggtggaagcatccattgcaatatcttgtccgcataactgaagttgccactaaaaacagctttcggcagatcgggcaaagtggctcgtaatgaaccgaattgtgtagcgatccaacgttttcgttgctgttggatgatttcttttttttgagtcttttcgtcgtatatgtctatttctgaaagataatctacataaatctgctctcgctgcagcagagtttccagttctttgtcttcacctgctgtttgcaatttttctacgtggcgtgcaaaccagtctgcttcaaatgccattcccgacccaatcagtgcgcacgagaagccaatggcgacatgacctttgcggaatattccattatttatctcttcgctggctgcatcaagcagggcaatgtcggtgttcaggtttttggctgtccgatgagcttggatagcccgtactccaacagcggatgctttgtttaattcatgtagcagatgaggagtggtagtattgtcggcatccatgattacgaccatatcaaatgatggcacatcaatggaatgcattgccaaagtcaaagcttgggctttcgaactgttttgataggtggcaaccagcacttgagctcccatgtcgcgtagctttttgcaagtggcttcctgcatctgatcggcgattacaataattttatagcattccgtcggatagtcttgctgtaaaaaagagtgaacggaggacacgatgacgttatcggcacggtaggcaggaaacagtactgcaaaatgttttcgccctatcgtctccgggtatcttttaggatgatagaatttggatgcaatggcataaaacagcagatagaatacacaaggaactaaaaggatgtagcaaatccagtctcctatggataatattgaataaatagtgtttaacataagcattgctttattgattgtgaatagaaagggttacgaatgcgtatgcacctcgaaggcaggcatgcgcgagtttccattttcgcttcccagcatagataagggtgtttttaggaatcactatggttaattggtacaaaatagatagtacacgctctgtcccttgcagatttctttgtgcgaatagtaaacggttgcgtgttatgtagaatgtttgtagcggactcgcttgtcccgtgctttgactctctttatgaaaaatagtgcatcgtggctcgtaccacagctcatagccggcacggcttaactttacgcaccagtccatttcttcgtaatacaggaagtaactttcggacattaatccagctttttctattgcttcttttttcagcatcatggctgcgccatgcagatatgggctagggtggggaatatcgaattctccattatcgggacacccgaatccgatagatttattacgcaatgtcacataagatagcggggtgaaccctgcaaattgtatgttgcgtggagggaatgcaaagcgtatcttgggggatacggctcctgtctttggattgctttccaatcgttccgtcaagtaagcaagaccgtcctcttcaatgaaagtatcattattgattaaaaatatatattttcctgccgcttgtcgaatcccgatgttgtttcctccggcaaaacctaaattctgttcgcttcgaatcgccttaatttccggataatggctttgaagttcttgggcttcgtttctgacggatgcattatctactacaatcaattcataactcacggaatgaattgttttttttatcgattctatcagtttgcatgtgtcattcagaccgttgtaacaaacggttatgaaggaaatatccggagaatccgtgtctggcaattttagtctgttcatagtatattgtttgttgtagtatcttctttttctgctgtcatttgcatttcttctgcttcctttttttcgctgattcgtttatctatatggactgctgcaaaacataatgcaaatccgacatacaccactaatgggtttgggtattgaaggcagtctgctgcatatgctgctaaaaagaaacctgcatccatgcatagccatgctgctaccatgcctcgtagcctggggtctttaaccttaaaaagcaatatccaggaacaccaggcaaaaaggcttccattgataatcaaatagagtaacaagcctatgattccagtctccacccatacacttaccagccatgaatcgggtgggtagggcatcacttcccgtgggcggatgttacctcccgctttactaagcccgattccataaccaataggcttatgggtcattaggtccttcattctggccctgttttccattcgcaccatgtatgaagcatcttctgtagggtgaaatgcggaacgcattttgtatatgaacagattactattccctacattagtgaagtagaaaaaacaaaatagacctattacggccgtaccgctgataagaagggtcttccaatttttggataatatggtcatcattcctaatccgcctgcgataactgccattgccgaacgagttcctgatatgccaaatccgtatatggcacagagagctgtaatcagaaagaatagacgtttaaatttccctttggcgtagaaggagctgatagaaaatgtgactgctgccatagcggagtgaacgccataagtgtttgcatcggaaaagcaagaaaaatagcgtattcctgaccagataatgtgtgtccgccacccacctaattgatataggaaataacggtccctatcactgaaaccatggtttttctgccaatatcctttaagtgtggctatcaggatgaaaacagcccatatataaagcatccattctataccttttatgtctcgtataataatgggaaccaaaaaggcacaaataatcggaaagagagcataagtgggaaggcatatattccagacttctattactgcattaggattgagtatctcaaataaataatagattccccaaacagaatacagatacaacatcccgttgtttccggagctccactctgttgtttcatcattgtttagttgtataaaaattatcgctaaaaacagaatggtaaacactagagagaatagccctaccttaacatctatgaatattttaccgactatcagcaaaaattgggtagcgaacaaaaaataaaatcctattgttttattcgtcatcttctttctctttttgggtattcttttgttttagtatgttaattttttctgttaatgatagctggctaagacgatatcctagcttgcgtagcaatgtatatggcggtagctgaccggtaaaatcttctacagcttcacgactggcatcggtcaggcagattcggaaaggaacatctgtcttgcctaattgtgatatgaactgttcacaaagctgggtgtcgacatttttccagccgcgatttgccggagctactagtatattaacattggcatcatgtaataatgcacttggaatattactttcaaataatggcggataggcaactatcagtatgtcttctccttgtagggtataaaaatcagtaatgctttttgctaataaatatttgggggaattggtgttgaaatctactccataagtaatgaatctcgtgtttagcattctgctttgcatatagccgcagattaggtttcctgtaatttcttctccggaatcttcactggtactgaacaaattaataataaatatacctggagacttccgtttggtcagaaagaaaagtagggcattagtcaactcttttacggaaagttgtatgtaggtcttggttaaccctccgtaacgggaagttagaaggctcgggatagcacctattactttatatcccgtaactcttttggtacgactggcgtcacgtaatgtcctgtcgaacatttctattaatagcaacatagcgatgattatcaggaaactgccgatgcaagctgctatgataatttgttttcggttggtcgaatgggatgaaatcgggtaggtaggttcgttgagaactttcagagtggcagaggtcatctccagattcttttttctcaataaagcctcgttataactttgcaataccgtcagataattacgttccgtaaagttaatgatacgctctttttgtttgatagtagtacctacgggagcaaagaaaacataacgctcattcaattcacggcgggcattctgtactatttgcaattcggccttggctttttcaaatagcaacgtttgttcgagccattgatcgattatgtttgtccgggatgcaccttctttggtatatttatgacctatataagaagttgtcaactcattcaactcatgtttgagttcggacagacgttttttatctccttccaaagactgaacatttttattggattcggtcattgcttcggtttctgatatcttgccggtgatgttggaggcttcttttaatttgtctatgaattccatatttttaagcacttgcttagcattactatccatatgtttctctagttcttcgagcatggatttagtactgttgaaggcaaagagtgcatcttgttctctcaattcatattctttgctgatagcagctatctctttcgtttcgtcaagatagttgatgatacgtttttctacattatatttggttaaatctgcttcttctgagttgagcttttttccaatgcgttttaactcttcttcaaagtacttgattactttatcggtttctccatagcgtatacgacgatattcttctacgaattcttccattaagatacttactgtgttgtaagcaatgccgggatcaccagatgtgtaactgatatccaataagtcacttgtcaacctgcgctgtactttaatgtttttcaaggcattgtaactgtaaaaggggtggttgtagtaaaatatctcatagagataattaccctttttaggtcgcatatatgcttcgaagtttgcaattgttttgtcttcacttgatttatcaaccaactttaaaatctctggtccgtgaggattgttcttcaagtggtcataagtgtaattataactggagggagtgattccgtcgttctctttatccggatttccaagaattaatactcgtgcaaataatcgtaagtatactctttttagagtgctttcagcttgcatgatacttataagattatccattgaattctgtactgttgcccaatcggtacgcttgtcactttccagattgtagccggaagctacgcctgtatataaagtagcttttacgtcataccctccttgcatgtggcgggtataataggaaacaaatagtgtaacaatggcagttcccactaagatcacccaacggtggcgaaataaggattgtataatggaaatgataaagttcatatcttgtttttttattttcgtataataggggtacgtgaaataatttcaagtatcatcaaacttttcgttagttcaaatttgcttttctcatacgcttcgcgggcttgtgactgtctttctttatctgttgctaaatctgttgattcaatggttccgttggcaaagttcttttcggatatttcgtattgtacattggcaagaatcaggctttcacttttcatttgaagaactcttatctgcgaagtggccatggcatacatctcaataatgtttttcttaatctcatcgtatttgatttcctgctccagttgcgcgcttttcagtgtaagcctttgtcggctgacacgtcctttgagatcaaataaatcatttaacggaatgctgacacctgcccccagcgtataaccgttttgcgcctgagtagaataggtgaggtagggagctatcgccacatctgtataggtagattcgttgccgaacataccatattgataacttcccctcaaactgaagaagccgagaaatgcccatttttccttttgtaataatttacgctctattgctgttttagcgtctgccaactcatagataggattgtttttggcattttcgaatagaacggacaggggaggaagatctatcttactataatcttcgtcattcagttgagaatagtcgccgatttcttgcgcaactacacggggggtagaggcaaacaaaagtagtaatcccgaaaaaagatatataaattgcttcataaaaaaatcatattatttgctcttgctgtgttatagcttgcgcaaatataaggattaattttatttatgagcagtcttttattatctattttgcaatctttcttgttaattgtgcgcggattaccggttaaaatgcctccgtcatattgaaatagaacaaattctgtttgttcaccatatctctgccgtagtcgagacgcacattcatacggggttggacttcgatgcgtaaccccagtccgaggttaggaagcacaccttctatcttgccaggcgtaggacccatgaatccgcatcctccccatgctacataacctacatgattcagcattcttttcacccacgtgcttttgtccgtgtttatcatctgacgatattcagccattattacatgagaggacttgtcgcgaaactgtcccatataatatccgcgaagatcaaaaggggttccgctgagtgcatatttcgtcagtggaacatctccgaagacgttcttagtctgtaccgtccaggcaaccaccttgcgtctaccgacagtcttatattgacggtaatcgatctctaaacggtaaaaattgtcatcacctccgaatactttgctatacatcattccgcgaaaatcaagatatgttccccggtaagcatttgccggaacatcacgtgtgtcgtacgtcaataagaatccgagccccgaactgaaatttgtgtatccgtgctctgtccctccggctgcaatatacgaaggttgctcgatcattccggcggcgggtttcgtgatcttatcataattcaaatcaatctgagggcctgcaaagaagttgctttttcccagacggaacagaaaccacggattcacctgaatgccgctgtaacggtattcgctggtgtcttctccgcgaggatagtctttgttggtgctatatccgatgccatagaagttctcaatcgtattcttgtaggagaaggtaccgaagatacggaaacggtcacctttgaagaaaagctgcggcttggtcatcaggttcagaccgcctttaaacatcagggcaatcgccatagggacgatcgaacgccgctgggtagtatcgctgggattcatccggaatgtcattaaagcgctaccgcctaccaacaagccaaaatctggtgtgtaactgggaccgcccaatatattatagtgaagatttctcttggctacacgttcacgtcgtagttcacgtttggaaagggtgggagtggtatctgtcgggagaatttcaccagcagacattgaattcatagaaccttgcacttcgtcgttttttactatcgtgcgatctgtttgggctaatgtaaagctgatgggcagaactgccaaccacatacctattatatatcttttcatattctttcttggaatctgactgcaaagaaaacgcttttatttcgattagttttcatcttcatagataataaatctaaaaaagaattgtatttttgccaaataatatatgtaaaaccaatttgccaatatgctaatatccggtgcggcaaacataaacacgacacgtctatctattagcataccggcaaagtaacttaacgaattatctataatgaataaacgaatcttaccagtttttgttttctgtgccctctgctactcggcacaggcgcaagacgcgaaaggaggcatcagtgacgctatgatgcagcaaatcaaacagagttaccagaatacgtctgccgacaaagctatccgcaacgctatcggcagcaacgacatccgcaaactggctctcaaccaggataacatgaaaggaatggacacgcacttttcagttaaagtgaactccaaaggtatcacgaaccagaaatcatccggacgttgctggctctttacggggctgaacgtgatgcgtgccaaagcgattgacaagtatcatctgggttcttttgagttctctcagacttatccttttttcttcgaccaactggagaaagcgaaccttttcctgcaaggtatcatcgacaccagtgacaaaccgatgaacgacaaaatggtggaatggcttttccgtaatcctctgagtgacggtggaactttcaccggggtagccgacattgtaagtaaatatggtcttgtacccaaagatgtaatgccggaaacgaacagtagtgaaaatacttcccgcatggccggtctgatcaccctgaagcttcgcgaacaggggattcagcttcgcgatatggctgctaagggcactaaacctgctgctctggagaaaacgaaaactgaaatgctcggcactatctaccggttgctcgttctgaacttgggcgttcctcccacagaatttacatggactgagtataatgcccaaggtaagcttgtttctaccgaaaattataccccgttgtctttcttgaagaagtatggtgacgaaaacctcatcagcaactacattatgctaatgaacgatcccagccgcgaatactacaaatgctacgaaatcgactatgaccgccaccgttacgacggcaagaactggacatacgtcaacctacccgttgaagatatcaaggaaatggcaatcgcctctctgaaagacagtacgatgatgtatttctcttgcgatgtcggcaaattcctcaactccgaccgtggcttgctggatgttaaaaactacgactacgaatctctcatgggcaccactttcggcatggacaagaaagaacgtgtccaaagctttgccagcggctcaagtcacgccatgactcttatggcggttgacctcgatgaaaatggaaaaccgaccaaatggatggttgagaatagttggggacctgcttccggttatcaggggcatcttatcatgactgacgaatggttcgacgaatatatgttccgtctggtggttgaaacgaaatatgcgtcttccaaaatacaggaaatactcaagcagaaaccgattcgtctccctgcctgggacccgatgtttgccggagaagaatagtctttttcttctttttgagaacaaaagaaaggcactctaaagaatattgtgtgcgaccacgaaaggaattgcggatatttttccgtaattcctttcttttttcctcacgaatcccaatcttatttattacttttgcggcaaatttatgaaaccattattttatatagcatggcaaatgtaataaagttacgtaaaggccttgacataaacctgaaaggtaaagctgctgaaacgtacgcaacagtgaaagaaccgggattttacgcactcgtacccgatgattttcctggagtgacgccgaaggtagtcgtaaaagagcaggagtatgtgatggctggtggacccttgtttatcgacaagtatcatcctgaagtgaaatttgtttcgcccgtgagtggcgtggtgacgagtgttgaacgtggtgctcgccgcaaggtgttaaacatcgtagtagaggcggctgccgaacaggactacgaagaatttggaaagaagaatgttgcctcaatggatgctgatgctgtgaaaaccgctttgttggaagccggtatttttgcgtttatcaaacaacgtccttatgacatcatcgccgacccgacggttaccccgaagggaatcttcgtatctgcattcgacaccaatccgctggctcccaacttcgaatttgctttgaaaggagaagaagcaaacttccagaccggactcgatgctctcgccaaaatggcaaaaacttacctgagtatcagcgtaaaacaaaacgctactgcactgactcaggctaagaacgttacaattactgcattcgacggaccgaaccctgccggtaacgtaggtgttcaaatcaatcacatcgctcctgtatccaaaggtgagactgtgtggacgatcgatccgcaggcagttatctttatcggccgtctctttaatacaggccgtgtggatttcacccgtacagtagctgtgactggttccgaagtgttgaaacctgcttactgcaaacttcaggtaggtgcgttgctgactaacgtatttgccggaaatgtaacgacaggcaaggatctgcgctacatcagtggtaatgtgttgagcggaaaacaggtatcaccgaacggattcctgggagctctcgacagccagctgactgtaattcccgaaggtgacgacattcacgaaatgcttggttggattatgccgcgtttcaaccagttcagtgccaaccgctcttattttagctggttaatgggcaaaaaagaatatacgttggatgcccgcatcaaaggtggcgaacgtcatatgattatgtcaggtgaatacgacaaggtattcccaatggatatcttgcccgaatatctgattaaagctatcatcgccggtgatattgaccgtatggaagcgttgggtatctacgaagtggctcccgaagacttcgctctttgcgaattcgtctgctcttcgaaaatggaactgcaacgtatcgtccgtgccggactcgacatgctccgtgctgaaatggcataaatcaatgcccgcatggcaaatcgtaaattgtaaatcgtaaaatagtaaatatattaatgaaagcgttaagaaattatctcgataagataaagccgaactttgaagagggcggcaaattccacgcattccagtcggtgttcgacggcttcgaaacattcctgttcgtgcccagcaagactgcgaaaacgggaacgcacatacacgacgcgatcgacagcaaacgtatcatgtcgattgtggttatttcgttagtaccggcgttgctgttcggtatgtacaacgtaggttatcagcatttcactcatacaggtgccacaggcagcttcttcgaaatgtttatctacggattcctggcagtgttgccgaaaataatcgtatcttatgtagtaggtctgggcattgagttcatcgtagctcaatggaagaaggaagaaattcaggaaggattcctcgtttcgggtatcctgatcccgatgattgttccggttgactgtccgttgtggattctcgccgtagcgactgcattttctgttatctttgcgaaagaggtattcggtggtacaggtatgaacattttcaatgtagcgttgattactcgtgcattcttgttcttcgcttatccgaccaagatgtccggtgatgccgtttgggtatccggcgacactattttcggtatgggacaggcggtagacggacttacggttgccactcctctgggattagctgcaacgacaggtactgtgcctgagttcagcatggatatggtgacaggtctgattcccggttctatcggtgaaacaagcgtgatcgctattctgattggtgccgttatccttttgtggacgggggttgctagttggaaaactatgatttctgtgtttgtcggtggtgcattcatggcttgggtgttcaacgcaatcggcatggaaaacaatacaatggcgcaaatgccttggtacgaacacctcgttctcggtggtttctgcttcggtgccgtgtttatggctaccgaccctgttacttccgcacgtacggaaagaggtaagtatattttcggattcctgattggtgtcatggcgatcgttatccgtgttctgaacccgggttaccccgaaggtatgatgctcgctatcctgttaatgaacatcttcgcaccgctgattgactactgtgtagtacagggaaatatcagtcgccgcgagaaacgtgctatcaagtctaaccaataaataccgaatgaaaatgaatacgaatagtaatagttatactatcatttatgcttcggtaatggttgttatcgtggcattcctgctggcattcgttagctcttcattgagagaaacacaaaacaagaatgtgcagttggacactaaaaagcagattcttgcagcattgaacattaagaatgtagaagatgcggatgcagaatatcagaaatatgtaaaaggtgatatgctgatgaacgtagacggtacgctgactgaaaatactggcgaatttgctaccaactacgagaaagaagcaaaagaacaacaacgtctgcacgtatttgtgtgcgaagtggacggccagactaaatatgtcgttcctgtttacggtgccggtctttggggcgctatctggggatacatcgcgctgaacgaagataaggatactgtttacggtacttacttctctcatgctagtgaaactccgggtctgggtgctgaaattgctaccgaacatttccagaatgaattcgtaggcaagaaaacattggaagacggttctatcgctttgggagttgtaaagaatggcaaggtagagaaacctgaatatcaggtggacggtatttcgggtggtacaattacctcagtaggggtggacgctatgttgaaagcttgcctgggcagttatatgagttttttaactaaataattaaggaggagatataaagaatatgggacaattgttttcaaagagaaataaagaagtattctctgctccgttgggaatagataatccggttaccgtacaggtgctaggtatctgttctgcacttgctgttaccgcaaaactggagcctgccattgtaatgggactttcggtaacagtgattacagcttttgctaatgtcgttatttcattgcttcgcaaaaccattcctaatcgtatacgtatcatcgttcagttggttgtggtagctgctttggtaactatcgtgagtgaagttctgaaagcgtttgcttatgatgtaagcgtgcaactttctgtttatgtaggtttgattattaccaactgtattcttatgggacgtctggaagcatttgccatgcagaacggtccttgggagtctttccttgacggtgtcggtaatggtttgggatatgccaagattctggtaatcgtggctttcttccgcgaattgcttggttcgggtacactgcttggtttcaatatattgaactacgaacctattcaaaacaccggatatattaacaacggtttgatgttgatgccgcctatggcattgattatcgtagcttgcattatctggtaccaacgtgcgcgccacaaagagttgcaagaagaaagtaattaataattcaagattcaaaaaagaattatggaacatttattaagtttattcgtccgctctatctttgtggacaacatgatattcgcattcttcctgggtatgtgttcatacctggccgtttcgaagaatgtgaagactgccgtaggactgggtatcgccgtaacttttgtgttgctggtgacgcttccggtgaactacttgttgcaaactaaggtgctggctgccaacgctatcattgaaggtgtcgatcttagtttcttgagttttattcttttcattgccgttattgccggtattgtgcaattggtggaaatggtggtggaacgtttcagcccgtcgctgtacgcttcactaggtatcttcctgccgttgattgccgttaactgtgctatcatgggtgcttctctgtttatgcagcaacgcatcaatctcggtccgagtgacccgaagtacattggtgatatctgggacgcgctttcttatgcactcggttccggtatcggttggctgctggctatcgtaggtctggctgctatccgtgagaaaatggcttactctgacgttcctgctccgttgaagggattgggtatcacgtttatcacagtaggcctaatggcaatcgcatttatgtgtttctctggtttgaacatctaaaaagaaaggaataagacaatggatatgaatttaatattagcgagcattggggtattccttgtggttattctgctgcttgttgttatcctgttggttgccaagaatttcctggtaccgtcaggtaacgtgaaactgacaatcaacggtgaaaaggaattggaagtggcttccggttctactttactgaatacgctgtctgtcaacgggatattcctgtcatccgcttgtggtggtaagggctcttgcggacagtgcaaatgccaggtgcttgaaggtggcggtgaaatcttgccttccgaagttcctcactttagccgtaaacagcagcaagaccattggcgtctgggctgtcaggtgaaagtgaaaagtgatatgtctatcaagattgacgagtctgtgctcggtgtgaaagagtgggagtgtgaagttatctccaacaagaacgtggctacatttatcaaagagttcatcgttgctctgcctaagggtgaacacatggacttcatccccggttcttatgcacagatcaagattcctaaattctcaatggactatgacaaggatatcgataagagcctgattggtgacgaatatctgcctgcatgggagaaattcggtctgttgggcttgaagtgtaagaacgatgaggaaacaatccgtgcttactctatggccaactatccggcggaaggtgaccgtatcatgttgactgtacgtatcgctactccaccgttcaaaccgaaagaacaaggtcccggatttatggatgtaatgccgggtatcgcttcttcttatatcttcacgctgaaaccgggtgacaaggttattatgagcggtccttatggagatttccacccaatcttggattctaacaaggaaatgatgtggattggtggtggtgccggtatggctccgttgcgtgcacaaatcatgcacttgacgaagacactgcacgttaccgatcgtaagatgtcttacttctatggtgcccgtgcgttgaacgaagtattctatctggaggacttcctgcaaatcgaaaaagacttcccgaacttcacattccatttggcacttgaccgtccggatcctgctgctgatgctgccggtgtgaagtatactccgggattcgttcacaacgtaatctatgaaacttacctgaagaatcacgaagctcctgaagatattgaatattatatgtgtggtcctggcccgatgtcgaaagctgttgaaaagatgcttgatgaccttggcgttccagcccagaacttgatgttcgataacttcggaggataatcttcgaaaaataccctccggttgggaaactaccggaaaggttatataaaaacagggcgggaaatctgaatgctgattatgcttctcagatttcccgccttcttttgtgtcttttcgggatgtatttggtgaattttatgtcagttttgaagatagttatctgtttttgcatctacttatctattaattttgtacttttgactacataatagttccctaaatacattttgttatggaatatcatcgtatttcttttattcacgacgacacggagtattcgtttatcaaagctatgaatgcaggtttaaccggatatgatctgatgaaagcctgtcgggtagaagttacgatttatatgaaggagaataacctgaaaggtcgctatatactgactggaatggctaaagtttgaccgtctttttgtcttcatactcttactctttttgtatctttgccacatgttagagaaaaatgagattatacaatcggttcttcgtaacttgaggatcgaggagttgaacccgatgcaggaagcatcgctggaacaagctacaggaaaaaaagacgtcatactgttgtcaccgacaggatcaggtaagactttggcttatctgctgccattattgctcactttgaaaacggatgacggtagtgtgcaggtattaatcttagtaccttcacgcgagctggctttacagatagacagtgtatttaaggcaatgggtacttcttggaaaacttgttgttgttatggtgggcaccctattgctgaagaaaaaaagagtattctaggcaatcatcctgctattattattggtactccgggacgtatcaccgatcatttgtccaagggaaacttcaatcccgaaacgatccatacactgattattgatgaatttgacaaatcactggaatttggcttccatgatgaaatggcggagattatcacacaacttccgggattgaagaaacgtatgctgctttcagctaccgatgcagaagaaattcctcagtttacaggattgaaccgcacagtgaaactgaatttcctgccggatgcttctgaagaacaggaatcccgcctgacattaatgaaggtgatttctccctcgaaagacaagattgatactttatataatttgctttgtacactgggaagtagttctagtattgttttctgtaatcatcgggatgcggtagaccgggtacataagcttctggctgaaaagaagttatttgccgaacgttttcatggtggcatggagcagccggaccgtgaacgtgctttgtataaattccgtaacggtagttgtcatgtgcttatctctacggacctcgctgcccgtgggctggatataccggaaattgagcatgtcattcattaccaccttcctgtgaacgaagaagccttcacgcatcgtaacggacgtaccgcgcgttgggatgcaaccggaacttcttatctggtgcttcacgctgaggaaaaacttccgacttatatcccggataatatagaaacagtggcattaccggaaaatgctcctcgtcctcctaaatctgtctggactactgtatatataggtaaaggaaagaaagaaaaattaagccggatagatattgccggattcttatataaaaaaggaaatttggctcgtgaagatgtaggggctattgatgtaaaagagcattatgcatttgttgccgttcgtcgggctaaggtgaaacaattgctgaatttgatccaaggagaaaagatcaaaggaatgaagacaattatcgaagaagcgaagtagaaaaaaaactttttctttataaatattcatttttatctcatttctctttcactttataatttattgatttcatagagtgatattttcgacttttattcttaacttgatatgtatagataacaatatggtgtatatatcttgtataaaccaataaaaagtaagagaaatctgctataaaacagtatttttataaggaaagatttgtacgccgaaaataaattcgtaaattcgcaaagtcgaaagacaaaaagtaacgaaattgttaaaccaaaaacaaacttcaaatgaaaaagcataatttcaatgcaggaccttccattcttccgcgtgaggtgatagaggatacagcgaaggctattttagatttcaacggctctggtttatctctgatggaaatcagccaccgtgccaaagacttccaacctgtggttgacgaggcagaggcattattcaaggaattactcaatatccccgaaggttattcggttttgttcctgggtggaggtgctagtatggagttctgcatggtgccctataatttcctcgaaaaaaaagcagcttatttgaataccggtgtatgggcaaagaaagcaatgaaagaagccaaaggttttggtgaagttgtagaggttgcctcttcagccgaagctacatatacttatatcccaaaagattacacaatccctgttgatgcagattatttccatatcactacaaataatacaatttacggtacggaattgaagaaagacctcgattctccggttccagtgattgccgatatgtcttctgatattttctcacgtccgattgacgtttccaaatacatctgtatctatggtggtgcgcagaagaatttggctcccgcaggtgttacatttgttatcgtaaagaatgacgcactaggtaaagtttcccgctatatcccgacaatgttgaactatcagactcatattgatagtggctctatgttcaacactcctccggtagtacctatttatgctgctttgcagactcttcgttggattaaagctcagggtggtgtgaaggaaatggaacgccgtgctattgaaaaggctgatatgctgtatgcagaaattgaccgtaataaattgttcgtaggtactgctgccaaggaagaccgttcacgcatgaatatctgttttgtaatggctcctgaatacaaagatttggaggcagacttcttgaagtttgcaacagaaaaaggtatggtaggtattaagggacaccgttccgtaggtggtttccgtgcttcatgctacaatgctatgccgaaagagagcgttcaggctttgattgactgcatgcaggaatttgaaaaacttcattaataatattgtcaccacagattacacagattggcacagatatttctaaattctgtgagaatctgagtaatctgtggtgagtttttataaacagaatttgattatgaaagtacttgtagctactgaaaaaccgtttgcaaagattgcagtagacggtatccgtaaagaagttgaagcggccggatatgagcttgttttacttgaaaaatatacagataaggctcagttgttggatgcagtgaaagatgctaatgcgattattatccgtagtgatattattgatgcagaagtgttggatgctgcgaaagagttgaagattgtggttcgtgccggtgcaggatatgataatgttgacttggcttccgctactgctcacgacgtttgtgtgatgaatactccgggacagaactctaatgctgttgccgaactggctttgggtatgatggtttatgctgtccgtaacttctataacggtacttccggtacggaattaatgggcaagaaattgggtatccatgcttacggaaacgtaggtcgcaatgtagcccgtgttgctaaaggcttcggaatggaagtttatgcatacgatgcattctgcccgaaagaagtaatcgagaaagacggagtgaaagcgcttgattctgctgcagaactttacaagacttgccagtttgtttctctgcacatcccggcaactgccgaaacaaagaactctatcaactatgctttgctgaaagacatgccgaaaggcgctatgctagtgaatactgcccgtaaggaagtaattaatgaagcagaacttatcaaattaatggaagaccgtgcagacttcaaatacattacggacattatgcctgctgctaacgctgaatttgtagaaaagtttgccggacgttatttctcaacaccgaagaaaatgggtgcacagactgccgaagcaaatatcaatgccggtattgctgcagctcaacagattgtcggttttctgaaagacggttgtgagaagtttagagtaaacaaataatattcagaatgaggaaggcggattttcaggataacatagttataatctgattaaaaacaatctgtcgcagaacgtcttttttagaaataagtagtatatttgagccacagattttatataagtctgtggctctaattttttacaaataaaatactaatatcatggcaataattaaacctttcaagggcattcgtcctccgcagaacctggttgaacaggttgcttcacgtccttatgatgtattgaactcagaagaagcccgcgcagaagcggaaggtaatgaaaaatccctttatcatattattaaacctgaaatagatttccctgttggtacggacgaacatgatgaatgtgtttacagcaaggcggccgagaatttccaactgtttcaggataaaggctggttggtgcaggatagcaaggaaaactattatatctatgcgcagacaatgaacggtaagacgcagtacggattggtagtcggtgcgtatgttcccgattatatgaatggtgttattaagaaacacgaacttactcgtcgcgacaaggaggaagaccgtatgaagcatgttcgtgtgaacaatgcgaatatcgaacccgtattctttgcttatcccgataatgataaactggatgttatcatcaagaaatatacttcggaaaagcccgtctatgactttatcgctccgggtgacggtttcggacatactttttggattattgaccaaagcgaagacattgcggctatcaccgccgaatttgctaaaatgccagctctttatattgccgacggacatcatcgttctgctgccgctgcattggtaggtgctgaaaaggcaaagcagaatccgaaccataagggagatgaagaatataactatttcatggcagtttgtttccctgccaatcagttgactatcattgactacaaccgtgtggtaaaagacctcaatggattaactcccgaacaattccttggcgccttaaacaagaacttcattgttgaggaaaagggggcggatatttacaaaccttccggtttgcataatttctctctttatcttggaggaaaatggtatagtttgactgctaaagcaggtacatacaatgataacgatccgatcggtgtgcttgatgtgactatatcctccaacttgattttggatgaaatcttaggcatcaaagatttacgctccgacaaacgtatcgactttgtaggaggtatccgtggtttgggagaactcaagaaacgtgtagacagtggtgagatgaaagtggcattagctctttatcccgtgtctatgaagcaattaatggatattgccgatacaggtaacatcatgcctccaaagacaacttggttcgaaccgaaacttcgttcgggactggttatccataaattggaataagacaagtatcattttataaaatagagcggtcgatttgttacaatcatacggtagattataacggatcgaccgcttctttataaagaatcgaccgttcgtttgtagtaaaacgaccgcttgtttgtatcatcccgaacgtatctcgtcaattgtctgatcgcttaatatttccaaacgataaattgaaatttccgtgtaaacccgtatctttgcaacatgactgctgaagatacttacaaaaccattgccgaaccttccgaaggtatttatacagaaaagcggagcaagtttattgctatcgccctgcctgtgcgtactctcgatgagataaaagctcatcttgaaacgtatcagaagaagtattatgatgcacggcacgtatgctatgcctatatgctgggagccgctcgcaaagatttccgtgccaatgataatggagagccttccggaacggcgggcaagcctattctcggacagataaactccaatgaactgacagacatcctgattatcgtagtccgttacttcggaggaatcaagttggggacaagcggactgattgttgcctataaagctgctgctgccgaagcaatagctgctgctacggtcatcgagaaaacggtggacgaggaagtgacaatcatgtttgagtatccttttatgaatgatgtgatgcgtattgtcaaggaagaagaaccggagattcttcggcagtcgtatgatatggattgcagtatgacattgcgcatccgttcttccatgatgccgaaactgcgtgcacggctggagaaagtggaaacggcacggattcttgaggaagactgattgagacatttacctatcacctctccctacggagactcctcccttcccgaaggaggagaattttgatagagattgttggtggaagtgagatagaatataaataagaaaaatatgtttatgaggaacagatataatatacttttcagcttgttttgggcttctcttgtgttggttggcattgaaacacaggcacaggagaacttgaaatttgctccaaacgacatacctgttccctggtattcgcagaaaatcacaggttgtccctatacacactgttcgcttgcatcctcattaatggtattcgattatttcaaaggcatgacagcagaggcgcaacgaacctcttcggatgcggaaaagaaactgattgaatatcagcggaactatttttttaagaaacgcgctcccttccgtcgtcgtacatcgatagggcagggaggatattattctttcgaaatagattcattgacccgttattatgagaatatgataagtgcggaacatttccaacagaaagattaccggatactgaaagattatatcgaccgtgggattcccgtgttgataaacgtaaggtatacaggagcaactcgcggacttcgtcccggaccacgaggacattggatcgtattgcgtggcattgatgataaatatgtgtgggtgaatgaccccggccgttcgccggagatgaggagtaaaggcgagaatatccgctatccgattaagaaacaagtcggcaatccttcttattttgacggatgctggacaggcagatatattgtggttactccgagagaatggatacgtaatcctcttgaatcagtaaataagaaacataagatatatggcatttgaagcaacaaaaaaagaatggtgcgaactttatactttcttccgcctgttggcagacggaaaagttgtattaggcacggcagaagcgaaaataggagaaatgtcctggcctattgcagtgattcaacgggaagaacatgacggaacgcgccggtattatattgaagaagaatcagtccgtattgagggagaaacgggtgttaagtccatgccgcgtgaagatttcggtattgttgccgatctgattttgcaggcagtgaaatcctcctcggaaaatgatgtcacctcgccggagggagtggaagaatttttggacgaagccggtatcttcgatttggaagcaaaaacagaagatcgtacagatttctcggttgccttttggcatccggaagctccggtaagaggtttcaatgtacgttcgcggttgagtgccatgaatccgttattggacggagggcgtgcggcaaatcttaaactggagcagagtggaatcaagtttgctactcctacggtgaataagattaatgcattgcccgaatcccccaacgaagtatccgagcgaatgatgctgatagagcgtttgggcggtgtgctcaaatattcggatgtagccgaccgtgtgttccgcagtaatcttctgatgattgatttacattttccgcgtgtactgacagagatgattcgtattatgcatttggacggcatctcccgaatcagtgaattgacggaagtaatcaagcagatgaatcctctgaagataaaagatgagttgataaacaaacattgtttctatgagtttaaaataaagcaattcttaatggctctggccctggggatgcgtccggcaaagatatacaatggtcaggattcggctgttgaaggcattttgctggtaggtggaaacggggaagtactttgttatcataaatcggagaagcaggtcatggaagacttcctgttccgaaatactcgtttggaaaagggctctttggataaagataaatatggctttttggagaaagagaacggagtttattatttcaagctgaatgcaaagattggtttggttaaacggtaaataaattatagtatgaagacaaatgaaattttagagaatatcaaagcacgtcgaagtgtacgggcttacaccggtcagcaggtctcggaagaggatttgcaggctgttctggaggctgctacttatgcgccgagcgggatgcatctggagacatggcatttcactgccattcagaatgccgataaactgaccgaattgaatgaacgtatcaagggagcttttgccaagagcgacgaaccccgtttgaaggaacgcgggcagagcaagacgtattgttgctattatcatgctcctactttggttatcgtttccaatgagccgactcagtggtgggcgggtatggattgtgcctgtgctatcgaaaatatgtttcttgcggctcattctctggggatcggttcttgttggataaatcagctcgggacgacgtgtgacgatcctgaggtacgtgcatttattacttcgttgggcgttccggaaaatcataaagtttacggttgtgtagcgttgggatatgctgattctaaaatcccgatgaaagagaaaaaggtgaaagacggtacgataactattgtcaagtaggcatttccgaatatataagtcccgggtatatttccattatgcccgggacttttgtgtgtttagccctgggaagaaaggtgatgagtccgggctttatagagataatcccggagcataacaagtgtaagccccgggattgttttattagtttttcatcactttatttgtgatgattttctctgtgaccgtttcttcttattcgaatgtgccgtagcgagtcggcaataacttccggtctcccagtgtattgtctacacgtgccacatttatccagaacttattctcacgtacactttctatcgggtaagctgctttttcgcgtgtgtacgggtgctcccagcgatcacttacaatttcgtattcgggatgcggagcattaatcaatacgttgtcgtctttgtccgcttcgccgttcttcacttcttgaatttcctgccagatgttcagcatgacatcaacgaaattatccagttctgccagactctcgctttcggttggctcaatcatcagcgtgccatgcacagggaaggagagggtaggagcatgataaccataatccatgagacgttttgcgatatcattttcggagatgcccgtttcctcgtgcactttgcggcattccagaatcatctcgtgcccgacgaaaccattcgctccgcgataaacgatcccatacgtgtctttcagacaagcagccaggtaattggcatttagaatcgcgattttagtagccatagtcagtccttctgtacccatcatacggatgtatccgtaagtgatcggcaggattcccgcacttccgaacggagcggaggaaacctgattctgtgcattaccgaagattccgtgtcccggaaggaaaggtaccagatgctcggccacacagataggacccacacccggaccaccaccaccgtgaggtgaagcaaacgttttgtgaaggttcaaatggcagacatcagcaccgataaatcccggattggttaaccctacttgtgcattcatgttcgcaccgtccatatatacttgtgctccacaagcatggataatatggcagatatcttttatttctgtttcgaagataccgtgtgtagaagggtatgtaatcatcagtgccgccagttcttctttgttttcttccgctttggcacgcaagtcgtccatgtctacatttccttgctcgtcgcatgcgcaggtgacggttataaaccctgcctgtattgccgatgccggattcgttccgtgagctgaagcgggaatcaatatcttgttacggtgtccctgaccaatgctttcgagataggcacgaatcacacgaaggcctgtatattctccggcagctcccgaatttggctgcaaacttacgccggcaaaaccggtgatgatcttcaagtcttcactcagattattaatcaattcccgatacccttccgcctggtcttccggaaccaatggatgcatacccataaattcgggacggctcaaaggcagcatttccgcagcggcattcagtttcatggtacatgaaccgagggagatcatagattgggccagcgaaatatccttgcggtcaagacgtttgatgtaacgcatcatctccgtctccgtatgatatttgttgaatacttcgtgtgtaaggaaaggcgtggtacgttttacagtcttgtctatattgcttttctcagggatgtcatccaccttctgataatcttttcccgcagcaatggcaaagatagaaagcaacacattggcggctgctacatcagtcgtttcgtcaatactgaaccctacgtttccgttttcgaaataacgcagatttacttccttgctaagagctatcgtacggatttgctgtgccgaaacgtgttcgggcagttcgaagcgcagggtatcgaagtattgtgcattcacttgcgtatatccgaatttcttcaattgtttatcaaggaatacggtgatactgtggatacgtgaagcgatagtcgtgataccttcctgaccgtggtaaacggcatagaatcctgccattgtagccagcaatgcctgtgccgtacagatatttgaagttgccttctcgcgtttgatatgctgttcgcgggtctgtaaagccattcggtaacaaagtttaccgtatttgtctttagaccagccgatgattcgtcctggcatattccgtttgtattcatcccgtgtggcgaagtagccggccgaaggtccgccgtagaacatcggtgtgcctaggcgttgtgttgttccgaatacgatgtccgctccccattctcccggaggtgtcagcaaggcaagacttaggatgtcggcggcaacggcaactttacaatctgccgcatgagccttttccgtaaactctgtgtaatcttctacgctgccattcgaattgggatattgcaatacgcaggcaaatacttcctgtgaaggttcaaattctttatatttacctacacgcagctcgatgccttgaggtacggcacgtgtagtcattaccgccaatgtctgagggaaaatattttcgtcaacaaacactacgttcgcacccgctttctgttgcgcacgggaacgtagggcgtacatcatacttacggcttcggcagccgcagtcgcttcgtccaagagtgagcagttggcaagcggcatggcggtaaggtcgcatatggcagtttggaaattcatcagtgcttccaggcgtccttgcgaaacttcggtctgataaggagtataagacgtataccatacgggattttcgaacacattccgttggataacggccggagtaatcgtgttgtaccaacccataccaatgtatgtagtgtacagtttgttcttacctgccagttcggcgatgtgtttcccaaattcgtattccgtcaggggagcgtttaatgccagtggctctttcagccggatattggcgggaatggttttctcaattagttcgtccaacgagtccacaccaattttgcggagcattacagttgtgtcttgttcattgatgccgatgtgacggctagctaacaaatcggttttcatattagtaggaggattttgttttatctaaaaaatgggttctcagctttctccattccgatagtcgtgggggcaccgtgtcccgggtaaacgactgtttcgttggggaggacaaaaagacggctgcaaatatgctctatcaactcgtcgaagttaccgcctgtgaggtcggcacggccgatactgccttgaaacaggacatcgccggagaacatacagttgtcttctttacaataatacaccagactgccgggtgaatgaccgggcacgtgtatcgcttccagagttgtatgtccgaaagtgatactatcaccgtcgtgcagatacttgcctagcggaaccggcttctcctgcaactggaatccgaacatacggctttgtttcggcgcttcatcaatccagtattcgtccgccttgttggcttcggccgacagaccaaattctttcagcatgaacggattgccgaagatatggtccagatgtaagtgagtattcagcaaatgctttacattcagttcgttggtaagaatgaatttcttcaaggcttgcttttcctcttcgtaaaagcagccggggtcaatcacgactgcttctttcgtgtcatcccataatacgtagcaatttacgggaaacatattaaactcaaatctttttattttcatggttctctatgatttatattaaatcagaacggatattctgttaaatgggaacgtataccaccttctttgtttcaaagaaatcttcctcgaaactgtcgctcagactttgaatcacagttttgtgcttgaacggcattgtctcatgttccagctcaccgcctttgaggcagatcaacccgttgggcaatgcgttctgctgtttaggagaaatattctttttgataatcttaatcagatctgccagaggcattacggcacggctgacaacaaagtcgaacagttgtttttcttcttcggcacgggcatggcggaaagttacgtttttcagtccgattgcattggctacttcggttgctacgcgcactttcttgccgatactgtcaaccagatgaaattttgtttccggaaacaagattgccagaggaatgccggggaaacctccgcccgtacccaagtccataatgcttgtgccgggacggaactggatgattttggcaatacccaacgaatgaagtacgtgatgttcgtataaattctcgatatctttgcgggagataacgttgatttttgaattccagtcgatgtagaggtcgtatagagcagcaaactgtttgcgttgctcttccgtcagatcaggaaaatatttcagtatgatttccacttctttggttttgaatgataagtttaaaatatgtatataaaatgaatatccttctgcatcacacggggcaataacaaccggatattcattggtgttcgttcttttaatgaaaatagggctttaatctttcaactctcccaaaatcgggttgctgcctaacagatgttccagcattgggaatggaattgtcactttgacggggcccatggagtatggagtgatgtcgtatacattgtagtagaacgtgacgccctctctgctgagatagaaattctctgtcggggtgatgtcgccggtagaagcatatcccatgtcttccaaagcttcgtgagtggtcactttgttgtcagccatgagctggttccagatcaggtcggtcagtggctctttataatctcctacaaaaatatcatccaggcggaggggacgcatcagggtaaggtccatgttcaggtaagtggtcatgtaaatgccgtgtgcacctccggtatattcgttgtagtcgatgcgatataccaacaagtctttctcgtagagttgcacgtggctctctatacccttataataagaataccaggcaccgatagaagattcatcttctttgtccttttcatcttctgtatacataggttccaagtcacggcgatactcactgatgtaattttcggtgtattgctttactacattctccggtttttctccgatatatttgtcgccgaagcaggcagaaatgaaataagcgttcaaactgtctttcagcatatcatccgatgatttgacaggataagcaaagttaatgataatgttacatgccggtttggctgtatcattaaacaagtgagccgtttcattcacttggatactgtcgaattgcaatgcacctgtatttttgttcatcttgtcatgacaagaaaacaaaaagccgcttaccgaaagtataatcgcaagcagactgacatattgttttttcatactcgttttttctataaattctacaattgttctatctttcactatcgacaaatatagatgaaaataacgaatcctgcgaataaaaaaggaaaaatattctgtctgttttttcttgtaatgcggctttaggctttatggttattatcttttttgaacgaaacagctggtatagtctgtttttatttctatctttgtctccggatatgaaaagactagcctacataactgcaatgtttctttccctcctgattatatattcgggggcgggagtttctattgttcattattgttgtgccggttgtgaaacagtacagtcctgctgtactacgggctgtcccaaatgtaagaaatctcatacgtgcgattcaaagaaagattgtaaaaacgaaggttgcacggctactatctataagctgaacctgatgaaccatgctaccgagctgaccgttgcagctccggtggttgaccttttttgtgagcagttctgctatttgctgaatattgggtatacggagaagccggttgaatatataattccttcttcgccgccacctatctgttcaaggcagatgttggcgttatattccacctatattatttagccactattttattctttttcagtactttgcttgccgccgtcttctgacagtggaagtgaagtcgttttgattgcaactaagttgcaaggattataagctaattttgtatcacaaaagtaacttacttaaagaatgaaatatatgatattaggactgttctcgttgcttgccaccggtatgtatgcgcaagtacgggggacggtaaaagatagtaccggagaacctgttccgggagctaatgtgttctggatgaatacaggacagggagtaacaacaaaagtagacggcaccttctctattacgaagccttcgaaaagccatatactggtggtcagctttatcggctttcagaatgatacgatccacgttgacagtaaaaagcaggaattggagattgtcctccgggacggagtggaattgaaagaagtgaatgtcgtcagccgtaagttgggaacgatgaagctgcgtaacagcgtgatgaacgaggatatgataagcagtgccgagttgagcagggccgcttgttgcaatttgggagagagttttgttacaaatccttcggtggatgtgagttactcggatgcggcaacgggagccaaacagataaaattgttaggcttgtcggggacttatgtgcagatgttgacggagaacatcccgaactatcgtggggctgcagccccttatggcttggggtatgttcccggtccctggatgcagagtatacaggtttccaaaggaatttcttccgtaaagaacggctacgaagctattacgggacagatcaatgtggggtttaaaaagccgcaattacctgaggccgactgggtatctgccaacctttttgcaagtaccacgaatcgttatgaagctaatgctgatgccactttgaaactttccaaacggtggagtacctcgttattggcgcattatgaaaatgaaacaaaagcacatgacggcaatgatgacggatttgtggatattccacaggtagaacagtataatgtctggaaccgttgggcatatatgggcgaccattatgtttttcaggcaggtttcaaagctctttccgagactcgtagcagtggacagtccacgcatggagatatgtactccggtgaactgtataaggtcgggattgacacggaacgctacgaactgttcactaaaaacgcttacatatttgataaggagaagaatacgaatctagctttgattctgtccacttcctggcacaatcaggatgcgatgtacggacggaaattgtataatgtagaccagactaatacatacgcttctctgatgtttgaaacggaatttaatccgcagaatagtttctccgcaggattgagctttaactatgacgcatacgatcagcattatcgtttgaataataacgcggatacccctttcaaagcttctgataaagaggctgttcccggtgcgtatgtgcaatataccttgaatctgaatgaccaatggatgttaatggccggtcttcggggagattatagcagtaaacacggtttctttgtgactccgcgcgcgcatcttaaatataatccgaatgattatgtacacttccggctttctgccggtaagggataccgtacaaatcatgtgctggcagaaaacaactacttactttccagtagccggaaggtggagattgcgaaaaatctggatatggaagaagcatggaacttgggtgccagtgtttctacttatattccggtattcggtaagacgctgaatgtcaacgcagaatattattatacggatttccggaagcaagttgttgtagatatggatagtaatcctcatgaagtggctttttataatctggacggacgttcgtattcgcacgtattccaggtggaagcaagctatcctttcttcaaaggtttcactctgaccggagcctatcggttgacggacgcacaaactacttataaaggtcagcgaatggagaaaccactaaccggcaagtataaaggattgttgacggcttcttatcagactccgttgggaatctggcagtttgatgcgaccttgcaacttaatggcgggggcagaatgcctgctccttacgaattggcggacgggcaactctcatggagtcgtcgttatggtagcttcgaacagcttagtatgcaggtgactcgttatttccgtcgctggtctatctatgtgggaggcgagaatctgacgaacttcaagcagaagagcccgatcattgacgcggcgaatccttggggagataatttcgattctaccatgatttggggacctgtgcacggtgcaaaagcctatgtcggcatacgtttcaatctggcaagaaacggtgaataagaagaatgtatcaaaaatgaatcatagaattttaaactaataagaaaaatgaaaacaagaagatggatagccacttgcgtggtggctcttttgggtgtgactgccgtattggcgaaagatattcgtgtcgtagtgttcaaagtggctcagatgcattgtgaaaagtgtgaaaagaaagtgaaggacaatatgcgctttgagaaggggctgaaggacttgtcgactgaggtgaaaaccaaaaccgtcactatcacttacgacgcggataaaacaaatgtaaagaacttgcaggcagggtttaagaagttcaattatgaagctgaatttgtaaaagaaacaaagaaagacgataaaaaagcggataagaagtaattgaacaaatacccgtatttgcgtgttttataaatagaatgtggtctctccccggctttctcttttggagagggttggggagaaactcttataaatatagataataatatggtaaagaagaattttcccgtgctcaatatgcattgtgcgggatgtgcaaataatgtagaaagaacagtcaggaagttgccgggggtcatagaggcttctgtcaattttgctaccaatacattaaccgtttcttatgagagcgataaactggctcccggggagattcgtgcggcagtgcttgcagcaggttacgacttgattgtagaggaggctcataaagaagaacgtcaggaggaggaacaacataggcgttatcttcgtctgaagcggaaggtaatcggtgcgtggattctggtagtccctttgcttattttctcaatggtattgatgcatgtgccatactctaatgaaattcagttggtactgactattcctgtattggtacttttcggcggcggtttttacacgggagcctggaaacaggcaaaaataggacggagcaatatggatacgttggttgcgctaagtacgtccattgctttcttgttcagtctctttaatactttcttccctgagttctggtatgcccgcggactggaacctcatgtttattatgaggcctctgcggtaattatagctttcgtcctgaccgggaaacttatggaagaacgtgccaagggaaatacatcgaatgcgattcgcaagttaatgggaatgcaacctaaagtagcccgtgtattgcgtaacggagtggaagaagaaatattgattgaccaactgcaagtaggagatttggtagtcgttcgtccgggagaacagattcccgtggacggtcagctctccgagggtgattcgtatgtggacgaaagtatgattagcggtgagccgattcctgtggagaagaagaaaggtgataaagtactggcaggaactatcaatcagcgtggttcatttattatcagtgccacgcaggtgggtagtgaaacagtgcttgcccgtatcattcacatggtgcaggaagctcagggaagtaaagctccggtgcagcgtattgtcgaccgtattacagggatctttgtccctgttgtgctgggaattgctattctgacatttatcctttgggttgttatcggcggtagcgaatatatgtcttatgggataatgtcggctgtgtctgttcttgtgattgcctgtccgtgcgctttaggacttgctacgcctactgcattaatggtgggtatcggtaaggctgccggacaacatatcttgatcaaggatgcagttgctttggaacagatgcgcaaagtaaatgtagtggtattggataagaccggaacactgaccgaagggcatcctaccgctaccggctggttatgggcacagcctcaggaaccacatttcaaaaatgtgcttctggctgcggaactgaaatcagaacatccgttggcgggtgcgattgttgctgcactccaagaggaggagaagatcaaacccgctacgctggacagctttgaaagtattacggggaaaggaatcaaggtgtcttatcagggacgtacttactgggtaggcagccataaattcctgaaagatttcggtgctatcgtgagcgatgtaatggctgatatgttggttcgttatgaatcggacggtaatggtatcatttactttggttgcgagaacgaactgttggctattattgcggtttccgatcctattaaagcaacatccgccgaagcggtgaaagaactgaaacgtcagggtattgatatttgtatgcttaccggtgacggacaacgtactgcgttggcagtatcttcccggttgggaatcgaacgttttgtagctgacgctttgcccgacgacaaggccgaatttatacgtgaactgcaattgcagggaaagaaagtggcaatggtaggtgacggcattaacgattcacaagctctggcactggcagacgtcagtatcgctatggggaaagggacggacattgctatggatgtagctatggttaccttgatgacttccgatctgttgttgcttcctaaagcctttcagttatcgaagcaaacagtaaagttgattcatcagaaccttttctgggcgtttatctataacttgattggcattcctattgctgccggtgtcctgttcccgttgaacggcttgctgttgaacccgatgctggcgagtgcggcaatggccttttccagtgtgagcgtggtacttaattcgttgagtctgggaagaagaagtctttgattattggcccggtttctttcaaacagggaaatgactgactaaaaagtcgatagtatctaaaattctcctccttcaggaaggaggagtacccgtagggggaggtggtaggtgaatacataaattatttattatcagcattgtgtatctacctaccaccccgactttcagccagcctccatttagccactccctttttatgaagttatctgtttctgaattccaatggtgtcattcccacatatcgtctgaaatacttgccgaagaaagaggcgctggggaagttcagcgaataggctatttcttgtatagtcatattggtccctttcagttttgctttggcgtccatgataacaatgtaagcaatggtatccaatacacttttgcccgttacttgcctcaccgtggtactcaggtgttggagggagattcctaattgatcggcgtagaattgcgcacggcgttcatctttgtaatgctcggtgatagattggatcagttcccggcaaatttcttttttgcggtttgagctgctgttttctccgggatagttgtggtatatcagccgaatacttgtcagaatagtctggagtgacaattctaccagttccgggtccatatcgaagttttcattgcaactggcccgggataataaggcgaaatagtctttcagataaccggcaacatcttcggaaagcggtaccaccggttgttctaaaagtttaggataagcgtttccaatatttttcatcaagttgacccgtccggtacaatgagcggagaaaccgacgaaacaaagacataccttttctgttctttcccgaaactggatgattgttcccggcagtaatgtaatcaggtcattcggacggatttcataatcaagtaggttaatcgatgccttcatcgacccctccgtacatatggctacaatacaggcttgcaatcggcaagattgcttataaatattcagaatgtcttccgtgacgttcgtccatgctaatacttcagtaggtaagtctacctgtggaaaatccattttcatagttgtgtttgttatattcggccaacaaatgtacacattttctttttatttcttacctttgtttttatgaaaacagtttttatcgattggaatttgataccgtatgccgaggcatggcaacggcagacggaatggttcgatgggatagtccgtgcgaaagcggaaggagaaccgtacgagaaccatatcattatgtgcgaacatcctcacgtctacactttgggacgtagcggaaaggaaaataatatgttgttgagtgaggaacaactaaaagctattgatgctacgctttaccatattgaccggggcggagacattacttatcatggtcccggacagttagtttgctacccgattctgaatctggaggagttccggttgggattgaaggaatatgttcatctgttggaagaagcggtgatacgtgtctgcgcatcttatggcattgaagcgggacgtctggagaaagcgacgggtgtctggctggaaggtaatacgtctcgtgcccgtaagatttgcgcgataggagtgaggagtagtcattatgtcactatgcacgggctggccctgaatgtgaatacggatttgcgctatttcagctacattcatccttgcgggtttattgataaaggcgtcacttctctgcgtcaggagttgaagcacgatgtgcctatggacgaagtgaagcaacgcctcgagggtgaacttagaatactattccaatgccaagctgccaagtacggtgcatgaaacagtctttgtctgccagtgcgtaggagaagtcggcacggatcggccagaagtttattccgcagccaagtgttccgtagttgcctactcccttgtctttatctccgaagtggtatcctgcacggactaccccgtatttcaggaagttatattcggcgccgattcctgcctgaagttggcggatttcggaaggaagcagatagttgaagtcgagtgccacttgcagacggttctccatgctgaatggcaggtcgattgcacctcccaggcctagtttggcgggaagtttgtaaccgtctatcttttttcctaagttagcagcctggaaaccgatgctccaggaagccatttcatccaaaagagccatattgcggtgataagttgctccgaagtcaaggcaaaccgagtttttggtgtccgcatccttccaagctttagcctgtaaatatctgaatgttagagacaaggacaggttcttggctacagtactgaaatatccggcttccagatcccatatatgcgggcggaagttatcgttctgatcaccgtccagtctttgcttcggattcttaaaatgacggaaacctactgtgaaaccatgattcccttctcttccgattttatagaaaacagatgcgctgtgcatcgagtaatctttgtttatgtcagcgtacgaataacttgcgcccattacttcttgtgagaaaacaatggtagaagcattatgaaagatagctgtacttccattgtcggtgatagctaatcccgtgccggccatacctgctgattgggcatccggagcaagttccagaaagtaggcgtttgcgcctccttgcgcagccagaaagccgggcaacaagcatgaggcgagaaggaaatgtttaagtcgtttcataatcagttatttttagagtgagacattcggacaacacgtatacctgtccacgatttattattgttcaacatgtgattgaaaggcttctcgctgacaaccacttttcccagcgtggaagaagcgtgcagcagatgcagttttccgtttacgtaataggctattcccacatgggctatgtccagtccgggaagcttcgtagtgatagcgataatatctccgttcataatccagggtaatccgttttccggtaattcgcttttcggcaaccaagatacagtttttccggataatgctttctcgtattctgccatttgtgttacattttccggagaatcagccaattttttatattgtttgggatgcgtggacatatatgaaagagaaagtttcgtagtacgggaactgtttcgggctgtaacgtcagtcagaaaaccgttgcggagaccattatcaatccagtcggaagtataatgcaggcgggaggggtatccattgatgataccgtcccggtaacgtatcctttgcaagttatcggcaaaagaagaaccgagtgcttgtgccagtgtatattctacaaaggtcaggcaatctacttctttggtgttgataaccagttgctctacttcgttccggtccaacgtgttggctacgtatctggtccccaagtaagactttccgattcttagcatagggtcggactcgtttgaagttgattcaacgggctgttgtgcaaatgccataacagtgataagcgatattatgatagatagcagtctccgcatattacttatttaactttcattgaagctttgatgaaatagaggattaataaagcgtatgctcctaatgccaacacttcggaccaagtattgttcaaccatgcttcattcaccagattaacgccaccgaaacgcatagcggcactgattacccccattaatgcacctccggcaatgaaaccggacgccaacagagttcctttttctcctctttccgtattcaatgctgcgtctttgctgcgggaagtgacataccagtttacagcaccacccacaaccaatggtacgttcaattccaaaggaataaacatacccaatgcgaaagctaaagcaggaattttacaaagagtcaaaatgatagctaaaacagctccgataccgtataacaaccaaggagcaccaacaccgctcatcaacggttcgataactgctgccattgcatttgcctgtggagcagcgagtgcgccgcttgtgaatccgtatgtcttgttcaagataatcattacaccgcctacggttgcagcagaaacgattgtccctaggaatttccatgtctcctgtttggcaggagtacttcccaaccagtaaccgatcttcaagtcagtgataaaacctcccgccatggatagtgccgtacataccacaccacccataactaacgcagcgaccattcccgaaggacctcgcaatccaacggctaccatgactacggaagccagaatcaatgtcatcagtgtcattcccgataccgggtttgtgcctacaatggcgattgcattggcggctaccgtagtaaacaggaaagaaatgccggccactaaaacgattgctaccaatgtatgcaccagatttccctgcatcacatcgaagtagaaaaataacacaatcagtatcagtgtgatgatagaaccaatcgcaataattttcatcgaaagatcccgttgcgtacggataatgtttttctctacatttcctttaccacccatttctttggcagccagtccgacagcactcttgatgattccccaggaacggataatgccgatcacacctgccatagcgataccaccgataccgatactcttggcgtaatacttgaatatttcttccggactcatcatgcctaccgtagaagtaatctccggattccatgcattcagcacgctgtctccccagatagcagacattcccggaatgataatccaccagacagccaatgaaccggcacaaatgatcgaagcatatttcaatccgacgatatatcccaaaccgagtactgccgcacctgtattgaccttgaatacgagttttgctttttccgccaacatctcgccggcactgcatacgcgagtcgtgaaattctcgttccaccaaccgaatgtggctacgataaagtcatataatccgccgatcattcctgccattaacaacggtttagcctgactaccgcctttttctcccgaaatcaatacctgagtagtggcagtggcttccggaaaaggatatttgccatgcatgtcgctaacgaaatatttgcggaaaggaatcaggaacaggatacccaatacaccacccagcagggaactgataaatacctgcataaaggtgacggtcatttcgggatacttagcctgaagaatatagagggcggggagggtaaagatagctccggcaacgattacaccggaacaagcccctattgactggataataacattttctcctaaagcattttttcttttggcagctccggaaactcctacggcaataattgcaatcgggatagctgcttcgaacacctgacctacttttaatcccagataagcggcggcagccgagaaaaggattgccatggcgataccccatgctactgaccagatgttaacttccggataactttttgagggagccattaacgggttgtacacttctcccggtttcaactctctgaacgcgttctcgggtagcccggtgaacttgtcttcttcttgtttcatagttttataatttgctaatgtgtcaattttatatattcgtcctcaaagtaaacaaaaaaaaaggagaaccgaaagattctcctttatgttatcgcctattttttcttatttggcatctttggccgtcatgtcgccctcgatatatagccttaccatttctgttttggcattggtacgcagagtgattgatttcttgaaatgtcctggatatttacctgttccgttataagttaccttgatcgtgcctttttttccgggcatgataggttctttcgtatattcaggtacggtacatccgcaagaggctactgcctgatgaattaccaaaggagcgtcaccgatattagtaaaggtgaatgtgcaactgacaaccggactgttttcggaaaacttaccgaaatcatgggttgttttgtcaaatttaatgtcggcatttgtttgtgcaaatgcaaaacttactcccattactaataaggtcattaaaaaaagtacctttttcatttttccttctttttagtgattacaagtgacaaaggtagtgctttttccttaaaatgtactttatggagtgcgaaatagtattaaacgactctcttttgttatttagagagctcgaaccccaacatcattccgtcgtaattatcggccagtgagctgactgttttcaaagcggtactattgcttttacttccgataaacgctaataatttgagcagtttgtccgagttgaacaataattccaatgagctggagctgcaatttactttcgcgtggagattcagcagtttcaagaatttcaggtctacctgttttgcggaagcgtcataagaataagttcctttcagtgtttttttacctacggtacttgtgaaagtactgtcggcattgaatgtgaaattcatctgtccggccttgatccctactttgcttagttgttcatcgagcttgttttctgccatggtagcggctgcggcgcctcctgctttcatcaacagattctccgattcaaattctactgccgaacctttgtagttccatgttccggtcatgtcgatcgtttcaggagttccggtgatagcatttactactttcgagatgttgtccttatttaacaagtctttccatgactgcgcctggctgttagtggctattagcaagaatactgccataaaggcaagtgatacaatgttctttttcatttgtaattgatttccttgtttatgttttcaatataattgagaatttctgtccgtcctgtgcggttttccgaggaggagataaagtaggggggaagttcttcccactgtttacttaactcacgcaaataagcgttgacgttcatcttcaggcggccgcctttgagtttgtcggctttggtgaagatgatagaaaaaggtattccgttctcgcccagccattccataaattcgaggtctatattctgaggctccagacggctgtctatcaagacaaagaggtttgtcatctgttcccgttccaagatataatcttcgattatggtacgtatctggtcttttcctttctgtccgcgacgggcgtatccatatcccggaaggtcgaccagataccagttcttgttaataagaaagtggttgattagcattgtctttcccggggtagcggaagtcattgccagtcctttgcgggcggtcagcatattgataaggcttgactttcctacgttggaacggccgatgaaggcatattcggggaagatacctgccggacattttttcacgtctgtattgctaatcacaaattctgcacttgttatttccattttcttgtcatttatttctttataatttcgtttataataaactctgccattatttataataaactccggagcacctgtttttatggcgctttcggcgttttctcttttttagacataagcattagtcctgcaaaggtaagagttccattcaacattagcaattcatagccgaatttatatccggtttctttgaatatccaccagtctaaaacatagcagagcagtggggaggcgacagctgtgaggggaacccggcggtcgtttgtctgtcttcgtgtgaacagaccgaaggcaaacattcccagtagcgggccgtatgtgtaggaggcgatgatgtatatggcgtcaattacacttttgttattcagcatttctaccaggcaaatgaataaggctaataaaacagaaagagagaaatgtaccttctttcttttacggcatgccacctcttcagagtcttttcccgtgttcagcaggtctacgcatacactggtcgtcatggctgtcagcgcggaatcagagttgctgaaagcggctgcgataattccgattgtaaaaagtatcaataccggtttccccaagtacccttgtgcggcaaacatgggaagaatgtcgtcgttcattgccggaagttccagttgcatctgtccggctagggctattagcaaaattcccaggcataaaaacagaagattcagcgggataaaggagaatccgtagcagtacatattcttttttgcttcccggaggttccggcaggaaaggttcttctgcatcatatcctggtctagcccggtcatcactatgacgatgaaaataccgctaaagaattgtttgaagaagttctggcgggatatccagtcgtcgaaaacgaagatacggctgtgttcgctgccttgaattgtccggatgataccactgaaatcaagtcccagtttctgaacggtgaaatagatgatgaagatcaatgctgcaatcaggcagaatgtctgcaaggtatctgtccagacgattgtctttataccgcttttatgggtgtatatccatactaatgctaccgaaccgacggctatcagccagaaggggatatgcatttcctgaaatacataggtgtggagaatgaggcagaccagatatagtttggcagccgttcccagcatacgtgataagagaaagaagaaagagccggtgcgataggcatgtgtcccgatgcgtgtaccgagatagccgtagatacttgtcaggttgagtctgtaatataaaggaagcagtacgtgggcaacaaccatatatccgaaaaagaatccgaataccgtttgcatataggtcatatccattccgcgtatcattcccggaacggaaacgaaagtgactccggagatagaggcgccaatcattccgaaggagactatataccagggcgatttgttctctcccttaaagaacgctgcattcgatccgcctttatgtccggtgatacgggctattagtaataatgccgcgaagtagcaaataatagtgacaagtatcatcatatcggctgcaaaggtagtattttttgtaggtattataacaataatccgtatctttgcgccaaaatatcgatagaatagcaattattatctatgaaccaacaatatccttccgtgctgcttgaaaaggcagtcggcgaattttccaaacttcccggtatcgggcgtaaaacggccatgaggcttgtgctgcatctgcttcggcaggatacggctacggtggaagctttcgggaattctattattactttgaaacgtgaggtgaagtattgtaaagtatgccataatatatccgataccgaaatatgccagatttgtgccaatccgcagcgggacgcttctactatttgtgtggtggagaacattcgtgatgtaatggcagttgaagcaacgcagcagtaccggggactttatcatgtgttgggcggtgtgatttctccaatggacggggtagggccgagcgacctgcaaattgaaagtctggtgcaacgggtatccgaaggtggaataaaggaagtgattctcgctctgagcactactatggaaggggataccactaatttctatatctaccgtaagttggataaactaggtgttaagctgagtgtgattgctcgcggcatatctgtgggggatgaactcgaatatgcggatgaagtgactctgggccgtagtattgtgaaccggacactttttaccggaactgtataatcaattaatctttagaaacttagaacgaacatggaagaacagataaaacgtgctgtcagaaatttaaatattagttatattttcttttgggtgctccctgcgtttctgcttggagcaggggagtttgaactccttcccgtaggaagtttggcagacaatgcacaagccgtttattattttgagacattagggattctgctaacggccttgtgtattcccctttctcttaaattattcagcctggtgcttaaaaagaaaatagatcaaatgacgatcacgcttgctttgaaatgttatgtgcaatggagcattgtccgtctcggcatattggaagtcgctatcgttaccaatcttttatgctattatctgacgcttagtaccacaggaaatctttgtatgttgattggtctcactgcttctcttttctgtctgcctggtgagaaaagattgcgtaacgaacttcatatcacgaaagactaaagcactatgaaacagtccttcttaataaacgaccgtatttatctccgtgctgtggagccagaggatatggatgtgatgtacgaaatggaaaatgacccgtcgatgtgggatatcagcaatttcaccgttccgtattcccgttacgtattacgacagtacatcgaaggttctcaatgcgatgtttttgccgacaagcagctacgtctgatgatcgtgagaaaatccgatcactgcatacttggtacgattgatattacggactttgttccccttcattcgcggggggaggtgggaattgctattcataaggattatcgtcagcaaggatatgcgggcgatgcattgaatttactttgtgagtatgcttttgactttctttctttaacgcagctttatgcacacgtagctgtcgacaatgatgtttgtatgaagctattcacatcttgcggttttgtgcaatgcggcttgttaaagaattggttgcagataggaggatgctgcaaagatgcagcacttttccagtgtttgaatcctaaattaaactgcaagtgataaaagacgaattgtgaacgaatggcatattattttgtttgtcgttcacagttcatcattaattaagtgtgggtacctgtggaaaacgtgaccacgtttcatacttgctgcctaatttctctaaagctttccgccacatgtctttggtgtcgctcttcatcaggtaggatttcttttcctcggagaccagccatgtgttttctctgatttcattgctcaactgttcactttcccacccggaatagcccaggaagaaacggatatgttcgctaatcttatttccttgtaatatgtatctttttatctcctcaaagtccccgttcagataaagtcctttgcagatagaaatagcaccgggaatgtcagctagtgtgtgcagatagaataaggtgtcagtcgcaatcggaccacctttatataatggaatttcgtctatatacttaaattccatgatgatatcgttgagaagcaacggcagttgcttgttgatgaccaatcccatacttccttcttccgtatggtcaatcagtagaattacagatcttccaaacgttacgtcgcgtaaaaaaggttcggatattagaatctttcctcttgacggcaacacattatttgattgaatcttaaatatgtcagagtcgatattcatgccactaaagtaagaaaaaaaacggaataacaatcgttctttccgttttttttcattttaagagtagcttttgtgaatatcttccggtaaatatttatactaccgggtgattttcggcaaatagtttcattctttcatcgagttgcgcatattggtggtctttaataaaagaggtacatgcgcgcaagccttcctggtgacttccggttgtcactaacgaaatagcactgactccataatacatcagttccttagccaactcgccgctagtcattcccggatagccgattgtgaaatagaatccgtctgcaataggatcgcccagatcgttatcatataccagatgaaagccatgacgaaggaagatttctttcaatttctgcgctctttcaccatatattttcacttcattcaggaagttatattgtccttcattggccgctttcagcatggcagccatagcaaattgcgccgagtggcttgttcctgaagaaagggcataaagtacgcgatgaatgaaaactgtaccgaaagtacctccgccataacgtttcgtcagtccgggataactccggtgatataacttatcagatatacaacttacaccgatacgctgtccggcatagctgaatgcttttgaaccggaaattagcaatacataattatctgtataatgtgcaaccgacgactggaatggtgcctgataaggtttgctcagatcctggcggaaatccattgcgaaataggccaggtcttccaaaacaatcacatcatattgtgttgccaattcaccgataatccgcagttcttcctcttttaagcaaatccaactggggttattcgggttcgagtatatgatagcggatatatttcccttcttcaaaaaactttccagcttctctttcagtttatcaccgcggtaatcatatacatcgaatgtttcatatttctgtcccattaccaccaactgctgtttttgtaccgggaatccggggtcgataaacagaatggtatctttcttctcgtcacattggctacaagtaaggaatgaagcaaatgtgccttgcatggagccggtgacaggcacgcaaccttccggacttaaatctacattaataaatgccttgataaagttggaagcctcttttttcagttccggcaatccgttaatatcaggatatagactggcaattccattctgtaatgccgcaatttcagcttttacgcctactgcagaaggaggaagtcccggaacacccatttccattttgataaattcgactcccgatgctgcttctgcttttgaagcaatagctttcacttcacgaatggttgctttagaaaaatcgacaatttgaaactcatttatggtttcatcaatcagatgtcgttcaattggtgtatttttcattttattttctattttatgtaatgcttgcaaatgtacacgataattcttaataaacccactttttcagaaaaaagatactgaagctattgcaggtttcaaaaaaatatctacctttgcatccgcattcgagagggatgcaatatctaaaaatggtgcgttagttcagttggttagaatacatgcctgtcacgcatggggtcacgggttcgagtcccgtacgcaccgcgaaaaataattaagaagagatacttagcactgatatttgatatattagtgctttttttatgtttttcctattatatggtgtacataatgtgcgaccaattattataattcgtgcgactaatccatgtataacatttatgtatattagctacttgaactcataaatgtgacatattggctatttttaaaattgttttctttactattattctggattgaaatgtaatatcaattgattaaatatgtcaataaacagatgcttgaagctaatcactaaagttgtataaaatgaaaaagattactgattcattatttgttgttatcatcgtatgtatcttttgataacaacagcttattacttcttcctgccgtcatatccccattttacataaatagctccccaggcaaatcctgctccgaatgctgtaagaattatattatctccttttttgagtttattctcgaaatcccaaaggcagagtgggagagtaccggcactggtgtttccgtatcgttcaatattgacaatgaccttttcggaaggtactcctaagcgttgcgttacagcgctgattatgcgttgattggcctgatgaggaatcacccagtcaatatcatttttgttaagatgatttctttcaattacagcttcacaggcatcggacatattggctacggcatacttgaatacagtacgtccttcctgatagatataatgcatttgattatccaatgtataataggaggggggacatacagaaccaccgacttttatatgcaggaaaggtaatcctttgccgtctgttctcaatacggcatccataatacctaaatcttcggttgtggcttccagcatgacggctgcccctccatcaccaaaaataggacaagtggcgcgatctgtataattgatgattgatgacatcttttcggctcctacaactataattttcttatagtttcccgaacggatgaaattagctcctgtttccagtgcatacaaaaaaccgctgcatacggcttgcatatcgaacgcaaaagctcttttcaatcccagcttttcgcataaaagggatgcagtggaaggaaaacgataatcaggagtggtggtagcaacaataaccagatcaatatcgtccggatttgttctggtacgttgtatcaactgcttcgctgctttacgggctatataggaggtccctagtccttcatccttcaggatacgtctttcttttatgccaatacgccccataatccattcgtcggtggtatctaccattttagaaatctcatcattggtcaaaacataatcgggaacatatcctccgactcctgtaattattgcgttaattttttccatccggcttatcttggttttgtaaattttgaatagggtggctaataaaatgtgataaaaatgcgggcacaaatatagataaaagagaatgaaatgcaattatcgtctggaaaacacttacctttttaatcaataaaaaggaatatttgacctaattttagcgaaaaggaggaggtgtgtctcttgttacttagaagggacatattttgccaatcaacaaaatagtactcctgttattactatggatttatgataaaagtgttttgtttttcttgtaaagttggacattttggagtaaattgcgcaattatttcaaatgtgttttttataggagaataacaggtatggataatcatgtggtaataatggctggtggcatcggtagccgcttttggccgatgagcacgccggaatgtcccaaacaatttatagatgtaatgggatgtggacgctcattgattcagttgacggcagatcggtttgacggtgtctgtcccagagaaaatatgtgggtggtaacttcagaaaaatatatagatattgttcgggagcagttgccggaaattccggaaagtaatattctggcggaaccttgtgcgcggaatacggccccttgtattgcttttgcctgttggaagataaagaaaaaacatccgaatgctaatgtggtggtgactccttcggacgcattggttattgatacgggagaattccgtcgggtggtggagaaggctcttcgtttcactgatgatagcagtgccattgtgacaatcggtatccggccgacccgtgcggaaacgggatacggttatattgccgccgccgaccagcttcaaactgataaggagatatttacagtagatgcatttaaggaaaaaccggacaaagaaacggccgagaaatatctgttggaaggcaattacttttggaatgcaggaatctttgtatggaatgtgcgtactattacttccgtgatgcgtgtatatgctccggggatagcacagatttttgatcgtattttcccggatttctatactgaaaaagaaaatgaatcaatcaagaagctgtttccgacctgtgaaagtatttctattgactatgcagtaatggagaaggcacaggagatctatgtgcttcctgcttctttcggctggtcggatttagggacatggggagccctccgtggactattgccacaggataaatcgggaaatgctatggtgggaactgatattcgtttgtatgaaagcaagaattgtattgttcataccagtgaagaaaagcgcgtggtaatacaaggattggacggatatattattgccgaaaaagatgatacgctgctgatttgtaaattggaagaagaacagagaatcaaagagttttcaaaataagaactcattccgatttctgatattcttgtggcgtcattcctgtcattcgcttgaaaaacttacagaaaaaagaaggattagggaagttcaattcatcagaaatttgatagacaagcaggttgctatgttttagcaatactttagcttctagtataatggactggtttatccagtccattactgtttgttggctggtctgccggatgagggtgttcaggtaacggggggtgaggcataacttgtctgcgtaaaagccgacattgcgttctgtcttgctataagagttgactagagaaataaattgctggaaaatactctcttgatgtgtcaaacgctctcctttcatttgattatagtgtttagctatatattctatattgtataaaaggctggcgataagatgtcgtatagcttcccggcggaaaggaggttcttgcagaatgctccagattaaactgaaatacttctctagttgtatatgttcctgcggagttaatgataacagaatgtttctttgatgatgtaagagataggtgaaaaaatcttctttctcggagatagggaggaagttgttatctatggctatcatttgcatatcgaaatcaggagagacttctatgacctgaataatagaggtgggagtcattaatgataggtttcctgcttgcagattatgttctatcagattaatagaaacacgtgcaacgccttgtttgaccagtgcgatacgaccttcttttatacgatacggctgtccgaacgcgaaaagactcggttccattttaatgaagctgttgacgaatccgaactcagaggaaataaaacgaaattcgttatgacgaacaattttgtagttctccaacattttaagtcccaagtctaacggtgctttcttctgttccattctattttttcttttcctgcaaaggtaataaaaagatatttcttaattctttttttctgatttatcgaactattggaacatatttaccaactcatagagagtgactgtatatttgaaacctcttatctttgtctttcgaaaaactaatagaaaaagatgcgtatgaaaagaatggttttcagtctctcctttttattgtttgtatcggggatgtatgcgcaaatcacgttggaggaatgtcaacgaaagacgcaggaaaattatccgttggtacatcaatatggattggtggagaagacaaaggaatataatctggagaatgcggccaaaggttatctgcctcagtttgctctttcggccaaggcttcttatcaaagtgatgtgacggaattgccggtgaagattcccggtgtggaactaaagagattgcctaaagaccaatatcaggtaatgctggaactgcaacagaaaatctgggacggtggaggaatccggatgcagaagaaacagacgatagcggaggctgacgtggagaaagagaagctgaacgtggatatgtattcgttgaatagccgggtaaatgatctttatttcgggatacttttactggatgagcagttgcggcagaatgctttgttgcaggatgagttgggacggaattatcgtcagatcaccgcctatgtggaaaatggaattgctaatcaggctgatctggacgctgtgaaggtggagcagttgaacacgcagcagaaaagagtggaacttgcttccttgcgcgttgcgtatctggagatgctttccatattgataggcgaggaattatctcaggaaacacaactggagaaaccggctccgcaaaatgatgtttcggcagtcagcgacatccgccggccggaactgtcgttgtttgatgcgcagggtgcagggttgcagatacaggagaaagcattgaatgtacgccacttgccacagtttggattatatgtgcaaggtgcttatgggaatccggggttgaatatgctgaagaatgagttctctccttattatatagccggtgtccgactctcgtggaatttcgggagtctgtatacactgaagaatgaccggcaggtgattgagaacaaacgtcggcaactgaataataaccgtgatgtgtttctttttaatacgcgtctggaaatgacgcagcaggatcaggcaattcgttcattggagaaacagatgaaggatgatgacgagattatccgcttgcgtaccaacattcggaaatcggcggaagccaaagtggcgaacggtactttgacggtgactgagatgcttcgggaactgacgaatgaaagtttggcacgccagacgaaagcgatgcacgaaatccagcggttgaaaggtatctatcaattgaaatatactacaaaccattaattagattttcttcggatatgaaacgaatgataaaaataggaataggagggatagcattgacaatgctatctgcctgcggaaatggaacgcctgactatgatgcgacaggcacgtttgaagcaacggaagttatagtttccgctgaagctgctggcaaattgttgaatttggatattgaggaagggaagcggttgcagactggagaggaaatcggcctggtggatacgcttcagttgtacttgaaaaaactacaactggaggctaacatgaaatcggtggaaagccagcgtccggatttagccaaacaaattgctgctaccaaacagcagattgctacggctgagcgggagaaaaagagagtggagaatttgcttacggcaggagcggcaaaccagaaacaattggatgactgggatgcgcaggttaaactgcttgaacgacagcttgcagctcaagaatcatcgttgctgaatagcacgaatagtttgacggagcagggaaactccgttgccatacaagtggcacaagtgaaagaccaattgaataagtgtcatattcagtcgccgattgaaggcacggtattagcgaaatatgcagaagccggtgaactggcggctgttggcaaacctctgtttaaggtggccgaaatagatcgtatgtatctgcgggcttacatcacttcggagcagctatcacaagtgaaactgggtgataaggtgacggtatattccgattatggaaattcggagcagaaggcttatacgggtgtaattacgtggatttccgaacggtcggaatttacacccaaaaccattctgacgaagaacgaacgtgccaatctggtgtatgcggtaaagattgccgtggaaaatgacggagcgttgaaaattggtatgtatggcggagtcaagttttgatgacgaagaaccggaaagatgagaaaaggagaacctatagtcgttgtaaagtatgtaagtaagagctacggaaaagtggaagctctgaaagaggtttctcttgttgtagagcagggggaaatcttcgggcttattggtcccgatggtgcgggcaagagtacgttgttccgcatcttgacgaccctgttgcttgcagataaaggctcggcaactgtcggagggctggatgtggtggaagactatgaactgattcgtaccaaagtggggtatatgcccggtcgtttttctttgtaccaggatctttcggtagaagagaatctggagttgtttgctaccgtattccatacgacgattcaagagaattatgctttgattaaagatatttatcaacagatagagccttttaagaagcggagagcgggagctttgtcgggaggtatgaagcagaaacttgcattaagttgtgcgctgattcacaaacccgatattttgttcttggatgaacctaccacaggagttgatccggtgtctcgtaaagagttctggcagatgttgcgaaacttacgggaacagggcattacgattattgtttcgactcctattatggatgaagcccgccagtgcgaccggatagcttttatcaatcatggagagattcatggaattgatactcccgaacggattttacaggaatttgcttccattctttgtccgccttcgttggaacgggaagaagtacaacatgcaatggctcctgttattgaagtagaacaactgacaaaatgtttcggcaatttcactgcggtcgaccatatttcttttcaagtgaaccgtggagaaattttcggttttctgggagcgaacggagcaggaaagacgactgcaatgcgtatgttatgcggactaagcaagccaacgtccggggtagggaaagtcgccggatttgatatatcccgggaagcggaacaagtgaaaaagcatattggctatatgagccaaaaattctctctatatgaggatttgaaggtttgggagaacattcgcctgtttgcggggatttatgggatgaaggaaaaagatatagaacagaagactgatgaactgctggaacgcttgggattttctgccgagcggaacacgttggttaaaagccttcctttgggctggaaacagaagctggctttttcggtctctattttccatgagccgagaattgtctttctggatgaacctacgggcggggttgaccctgctacgcgccggcagttctgggaactgatctatcaggcagccgaccggggaattactgtatttgtaactacgcattatatggatgaggctgaatattgtaaccggatttccattatggtggacgggcagatcaaggctcttgacacaccggcccgtctgaagcagcagttcggagcagatacaatggatgatgttttccaacaattggcccgccatgcggtacgtaaagcagattgattatgaaacagtttatagctttcgtaaagaaggagttttaccatattttccgggatcggcgtacgatgctgattctgttgggaatgcctgtcgtgcagattatcctattcggcttcgctatcagtacggaggtaaaaaatgtccggcttgctgttctcgatccctctaatgatgtggtgacacggaaaatcattgatcggctggatgctagtgagtatttcactgtcaccaggcgttttcattctccgcgggaaatggaggctgccttcttgaaaaataaaatagatatggtggttgtctttaacgaacattttgccgacggactttattgcggtgacgcacgtgtccagttaattgtggatgcaacagaccctaatatgtcgacctcgcaaatcaactatgctacgggcattgtgtctgcggtaggacaggagatgatatctccgggcatatcgtcgtcggctcgtctgactccggacataaagttactgtataacccgcaaatgaagagcgcctataactttgttccgggagtaatgggattgattttgatgttgatttgcgcaatgatgacttctatctctattgtccgtgagaaggaaacaggcacaatggaagtcttgttggtatcgcctgtcaaaccgctgtttatcattctggcgaaggcagttccttattttgtattgtcgtttgtcaatttggtgacgattctgttgctttctgtatttgtactggatgtaccggtagtgggcagcctgttttggttggtggtggtgtctttgctgtttatttttgtctcgttgtcgttgggattgctgatttcatcggtaacacgtacacaagtggcggctatgctggcttccggcatgattctgatgatgcctaccatggtgttgtccggtatgattttccctgtggagagtatgccgttgattcttcagttgatatcggatattattccggcccgctggtatatccaggctgtacgtaaactgatgattgaaggagtatcggttgtactggtatttaaggagattggcattttgttgttaatggcaaccgtgcttatcactgtcagcattaagaagtttaaatatcgattggagtaacggttatgataaagtttctgatagaaaaagagtttaaacagttgcttcgcaactcgtttctaccgaagttgattcttatttttccttgtatgattatgctgttgatgccttgggcgttgaatatggagataaagaatattcggttgaatatagttgacaatgaccattctgcagtttcgcaacgattggtgaataagattgccgcttctacttatttccatttaacggaggtcccggcttcgtatgaagaaggattacggaatattgaactgggtacggcggatattgtcatggagattcctaggcatttggagcgtgactggatgaatgggagagatgcgcacatattagtagccgccaactcggtgaatggaacaaaaggcggattaggcagttcttatctgaccgctattattaatggttatgcgtccgaattacgctcggaacgtccggaggctgtttctgtatccgaaatcattccttctatccgtattgatacgcaagggctgtttaacccgaatctgaattataagctctatatgattccggcattaatggcaatgctgttgacattgatttgtggttttctgccggctttgaatgtggtcagtgagaaagaagtcgggaccattgaacagataaatgttactcctgtacctaaatttacttttattcttgctaaacttttgccttactggattgtaggttttattgtgttgacattatgttttgtgttggcttggctgctttatgggatagtacctgtggggcattttagtatgatctatctcttggtgattttttttgtattggtgatgtctggttttgggttggttatatccaactattcagcgacgatgcagcaatctatgtttgtgatgttctttttcatgttgattctgatgttgatgagcggactgtttacaccggttagcagtatgccggaatggacgcaggctatcactgtattcaatcctttaaaatattttatagaggcgatgcgtatggtatatctgaaaggaagcggcttggtcgatttattgccggagataggcattctgtctctttttgctgtattcttcaatagttgggcggtgattagctataggaaaagccggtaaacggtaggttgaatttgtttctagcagggaaacacattgtttcaagtagggttgaaacaatgtgttccaaatccgtttgaaactctttgcataaactgtgcttcccttttaaaccagtttgaatcttaatcgtagagtttgtcttgcttcgtcataatcatagctaatgattttgaaaatgcccacttcggaggtatgggagacgtgtgccccgatacaagcgcaagcgtcataatctcctatacgtatgatgcgaagtgtttcgctggcatctttcggcaacttgctaagatctacaatattttttgcctgttcgtgtgtcatgaattcaattgttacgggcaagttctggttgattacttcgttcaccttattttcgatcgcttgaatttgttccgctgtcggagaagaggaaagaatatagtcacatttactttttttcctttctatatgggcattacgtgagcgtggacaaccgaatgtcttcaccatagtggcattcaataaatgctccgcagtgtgcataggaggatactcctgtttgttgtggtcgttgagttgaatttgttgttccataattgtttttattttccgataataatcttgtctcctaaaaaatgaggttgtttgtttattgccaagtcaataaacatcttgactcttgcaaataattctcgaatattagttttcagtcctgaataagcattcacgtctttggcgttgtaaccgatagcgtttattccattcttttctgctaaataaatagctcgttcattgtgaaaacgttgagaaataattgttagtcggctttgtccgaacacttctttggcacgaacaacggaatcgagtgtgcgaaatcctgcataatccagataaatgtatttttccgagactcctctttacataagtgctttcttcatctcttccggttcattataattttctttacgattgtcgccactgatgaggatataatttatcttcccggctttgtataattcaagagttgcaaaaatacggtagtcaaaatataaattgttattcccgttttttagtttgggagaagtaccaagcaatagccctacattgtttttaggtgtttctgtaatttcagtatataatttttgagatgcattcttcttgattcgccggttgcatataataatgctaattacacatagaatggttattattaaagtgatatagagtaattttcgtttcattttccttttatatgaatagtgtacaaaaatacgactctttttcaggaaatcaaatgtatggacataaaaaaaggagcaacgccttgctccaacctttgttaaccttaaatctaatactatgaaaaacacactgcaaagatacgttgttttgccatatctgcaaattaacagcagataaaaggtgtttttataacactaattaaaaaatggatgtttgtattatagacttgttaagaatttatagcccttaatatccagaatatagtatgtggagaatgaggaaagtttatccccatttctccttcataaggtcttccagtttcaataattcatcgcgatattgtgcagcttcgataaattccagtttcttggctgcctcttgcattagtttgcgggtacgttcgatgctcttttccatttgcgctttgctcatatactgtaccaccggatctgctgcaatattcggagtagaaggttcaacataagcgtgcttttctttcagcagttcttctgtttccgagtttgcatttccgaatactgatagatttcgagcctttttaatctgttggggagtgattccgtttgcttcattgtaagccaactgtttttcgcggcggcggttagtctcgtcaatggtgagtttcatactgtccgtcattctgtcggcatacatgataacttttccattgacattgcgggcagcacgtccggcggtctgtgtcagggaacggtgtgaacggaggaatccttccttatccgcatcaaggatagcaacaagtgatacttctggaaggtcaagcccctcacgaagcaggttgacaccaatcagtacatcgtatataccttgccggagatcatccataatcttcacacgctccaaagtgtcgacatcactgtggatataattgcatcttacattattattaaggagatattcggtcagttcttcagccatacgtttggtgagagtagtgacaagcacacgttcgcttttttcgatacgaagctggatttcttccattaaatcatcaatttgattcaggctcggccggacttcaatgataggatcaagcaggccggtgggacgaatcacttgttctacgacaataccttcagactgaatcaattcatattctgccggagtggcactgacatagatcacctgctttgccatttctgcaaactcttcaaattttaacggacggttgtccatggctgcgggcaaacggaagccatattctacaagattgattttacgggcacggtctcctccgtacatggcacggatttgtggtacgctaacatggctttcatcaataacaatcaagaaatcgtccgggaagaaatcgagcaggcagtatggacgagtaccggcagcccgaccgtcgaagtaacgtgaatagttctctatcccggagcagtgtcccaactcccggatcatttccatatcataagtaacccgttcatagagccgtttggcctcgtattctttgccgattgattcaaagaaggcaacctgtttggtcagatcatcttctatttcatgaatggcacggagagtcgcctccttggtagtcatgaacagatttgccggataaatcttgtaagcttcgaaaggagcaatggtgactccggtcactgggtctacctcttctataccgtcaatttcgtcaccccagaaagtgacacggagcagattgtccgtataggccagataaatatctactgtatctcccttgacacggaaattcccacggtttaggtcaatgtcgttgcgtacatataaactatctactagccggcggaggaatacgttgcggtcgagcatacgtcctcgttcgatttctatgacatttttatagaagtccgaaggatttcccatgccatagatacaagaaacggaagacaccacgaccacatcctttcgtccggagagtagggcagaagtggcagcaagacggagtttgtcaatttcgtcattgatagcaaggtctttttctatataagtatcactgttgggtagataggcctccggctgataatagtcatagtaagaaacatagtattctaccgcattattcggaaaaaatcccttaaactcgctgtataactgtgcagccagcgtcttgttatggcttagaatcaacgtcggcttgttgatgttagcaataacgttggcgatagtgaatgtctttcccgaaccggtaactcctaataaagtctgtgcaggaagtccctggattactccgtctgttagttgggcaatcgcttccggttggtctccggtgggtttgtaggctgatgttaattcaaaattcatagttaaatcctaaaaagtggagcaatattcggtaaaataatcgagataacaaatcatttttccaaataaatcctttactttgcaacatattaatatcaaaaaacagattcatacaactagtaataccagaaacacatgatttggaatgagagcattgagtgtatggaccgcgaaagtcttcgcaagattcaaagcatacgactcaagaaaattgtagattacgtttatcacaacacccccttctatcggaagaaaatgcaggaaatgggtatcacgcccgatgacatcaacagtattgatgatattgtgaaactgccgtttaccacaaaacatgatttaagagataactatccgttcggactttgtgccgtgccgatgagtcagattgtgcgtattcatgcgtcttccggtactaccggaaaaccgaccgttgtcggatatacccgtaaggacttgtcttcatgggcagaatgtatctcacgtgcttttactgcttatggtgccggccgttcggatattttccaggtgtcttatggatacggactttttacaggtggattgggagcacatgccggtgcagaaaatatcggagcatccgtgattccgatgtccagcggtaatacggagaaacaaatcacactgatgcatgatttcggttcaacggtgctttgttgtactccttcttatgcactttatctggctgatgcgatcaaagactccggtttgccccgcgaagaattcaagttgaaagtcggtgcttttggtgcggaaccctggacggagcaaatgcgccatgaaattgaagaaaaactgggtatcaaggcttatgatatttatggcttgagtgagattgccggaccgggtgtggggtacgaatgtgaatgccaacacggcactcacttgaatgaagaccattattttccggaaattattgatcccaataccctgcaacctgttgaacccgggcaaacgggtgaactggtatttactcatttgacaaaagaagggatgccactattacgttaccgtactcgtgacttaactgccttgcattatgacacatgttcctgtggtcgtacgttggtacgtatggatcgtatcttgggacgtagtgatgatatgctgattattcgtggggtgaatgtcttcccgacacagatcgaatctgttattcttgaaatggcagaatttgaaccgcattacctgttaatagtaggccgtgaaaataataccgataccatggaactccaggtggaagtacgtccggatttttattcggacgaaatcaaccggatgttggcattgaagaagaaattggcaggacgtttgcaaagtgtactcggattgggtgttaacgtgaaactggtagaaccacgtagtattgaacgtagcgtgggtaaagcgaaacgagtgattgataacagaaaactgtaaacctaatacttaaataattatggtagcaaaacaactttctatctttttggaaaacaagtcaggtcgtttgacggaagtgactgaagtgctggcaaaagaaaatatcaacctttctgccttgtgcatcgccgaaaatgctgattttggcattctgcgtggaattgtatccgatccggatagagcatacaaagccttaaaagacaatcattttgcagtgaatgtgactgatgtggtcggcattagctgtccgaacgtaccaggagctttggcaaaggtactgggatatttgtctgctgaaggagtgtttattgaatatatgtactcatttgctaacaacaatattgcaaatgtggtgattcgccccagcaatctggataaatgcatcgaagtgctgaaagaaaagaaagtcgacctgttggcggcaagcgatttgtataaattgtagtattatagctgaaatgtagacagtagaaaatgaattgtaaataatatgcggtgaataggttgcgcttttaagtgatgtgcagtttattcaccgtatattgtttccggttcgccgttattttctcctcttttgtcgatgtttaacgccttttatgtattaaaaaacatagattaattgctaaattcccagcgaataagtaactttgcgcattatttttaaataggatgaagaaaaatatcattataactttgcttgcggcagccactctgacatcatgtggagagtataataaattgctgaaaagtaccgattacgaatacaagtacgaagccgccaaaaactattttgcgaaagggcagtataaccgctcagctactttgctgaacgagttaataaccattcttaaaggaaccgataaagcggaagaatccttgtatatgttgggtatgagctattataatcagaaagattatcagacagcagcccagacatttatcacctattttaatacatatccgcgtggcacatttaccgaattggcacgtttccatgcaggtaaggccttgttcttggatactccggaaccacgtctggaccaatcgagtacttatcaggctatccaacaattacagatgttcatggaatactttccgaatagtgtcaagaagcaggaagctcaggatatgatttttgctttgcaggataagctggtgttgaaagaactttattcggcaaaactatattataatttgggtaattatatgggtaataattatgagtcttgtgtaatcacggctcagaatgcactgaaagattatccttataccgattatcgcgaagaactttctatattaattctgcgtgcaagatacgaaatggctatttatagcgtggaagataaaaaggcggatcgttatcgtgaaactgttgatgagtattatgcttttaagaatgagtttccggaaagcaagtacttgaaagaggctgagaaaatatttaatgaatcacaaaaagtaattaaagactaaatttaaatagatttatggactacaaaaaaacgaatgctcctgctacaacggtaacccgtgacatgatggaactctgtgccgatacaggaaatgtttatgaaactgttgctattattggtaagcgtgctaaccagatcagcgtggaaatcaagaacgacctttctaagaaattggcagagtttgcttcttacaatgataacttggaagaagtatttgagaatagagagcaaatcgaaatttctcgttattatgagaagttgccgaaaccggacttgattgctacgcaagaatacatcgaagggaaaatatattatagaaatccggcaaaggaaaaggaaaaacttcagtaatttattttctgacgaaagaattgatagtcaagtagtaagcgggaaagtaattcctattccttattgcttggctattattgtttaacttaactactattagaatacttatgattcaacgaattcaaacagtttatttactgattgttacagggttgcttattacggcaatgtgtttgccaatgggatattttactgatacaatgggcgaacatcccttcaaagctttaggaatggatgtaaatggtgcttttcaatctacatggggattgtttggcatattgatgcttagcactatagttgcttttgctactatctttttatataagaatcgtatgttgcagattcgtatgtctattttcaatagcttgctgctggtaggatattatattgctttctttgctttttattttgcattgaaaaacgatgagaatcttttccgtatcggttgggcgctttgtttaccccttgtttctatcattctgaatatactggctatccgttctataggacgtgatgaagttatggttaaagctgccgatagattgagataatcgtcagaaataagaatataatataaaatggccactgtttcagtaatgaactagtggccatttttataatctgatgagagattatttatttcttcaaatcaaaaagataggtgagttttacagtgattgtgccatgcgctgcgcgggcgaaataatctttttttgttgtactgtagaagtcggataaggcaaaataataacgaccttctaccaaaaaactgccggcttttttcgttcttagttccacgccgccaccgccagtgataccataatcgaatttattctggatcttaactccatatatcgctttctgggtgttcgacaacgtattcatatctatgccctctattgtttccgattcaccgatcagaaaaccgatttgaggacctgcatgaacaaagaactgcaaacctctttctcgtccgaaagcaagatgcgcaagaaaagggatatcgacataggtcatcttgcgggtatatgtcttgccgggtactttaatcgtttgcccgttttcatcttccatttcaaataactcatcccagcctcgttgtgagatattaagttctacttgtgcgccacagatcatggcaaaatacttttcggaaatataacgtgccgtcaatcctccggtaattcccataaggctgttttgcttaatagtaggagtgaaggaagcgctgttcaggttgacacctccattgacaccaacagagaagttacttcgtggctctccgatctgtgcagtagcaggaaaaacaagtcctgtaagcaggagtgttgcgagcaaaaatgtctttatctttatcattttcgtattattcgaaatcaagttttactaattcaaagttcttagtgaaacgtatgaagaacacctttttattaataaatcctccccagttgtttacacgctcgaatttgaaaccggtctggataggagtaaggttcatcttggacaggttattttccagttccgagccatagcgtgacaatcctttcaggaagaagaaacctgtatcgaaaccaagcattgcatagttgggatatttgctggctaaatctttgctgtaccatttgtggtaggcattagtaaattgcacggcagccgggaacaaagtatttgtataaaatgaggagtagaaatatacatctagttcaaagaaactttccaggtgatcttttgtgttagtctgccattccggataaccgaataaatgaatgttgggacccggattatctctgactaacagggttaactgtggaagtatcttgattaataatacatttttaccggatgtcggaataaagatattttctttatcgttgcgtagtgctgctttcagcgtttctttagttgcgctttcgtctacagtccgcatggaaatgcctttgcttttcaattcctgcttcaacccactgatgaagtcagctttttctttgtccggatttgccgattcaataaaaataacatgagaattggggaattggcgagtgaaatgctcgtatacttcagaatataaatatgattgtggagtattaatctgataaacggcaggattgttgaatacttcttcgcctttttgtgagaaaggaatcactagacgaataccattcttttccgcaaaatcagataacggtttaatttgactttgatgcatcgggccgaagatgacattcatttctttcatctcttttttagccagaattgtgttcaacgtggaaacttctttaccgcaatcgtatacatacaaatcaagagaagtacccgtacgtttcaaactatcaactgccattaaaaaaccttcataatattctaccatacgtttgtcttcctggaaaggcagtaacagagcggctttaatagtcgagatattcttcggagtttctttactcttacggaaaagttcgctgttgctgggaggaaccgcatatagatcttccttgggtgtaggttgcactggtgttgcagaaggataagggatacagagtagttgtccttttttcattccctttttcagttcgggattagcgttgattaattcttgttcgctgattccatattcgcggctcacgctaaatatagtctctttgcgtttaaccttgtgcatctctttacatctggctactaccggaccttggatcgcaggttgtgtcaccgaagtctgcaccgtattggttggttctttttccaacgggatgagaattacctgtccgatgcgaaaattctcagcgcttaacccgggatttgcttcacagattgccttggcggatacgttatacattgtagtcagtttatataaagtctctccggcttgaatcgtatggaatgtttcccctttctgagtatcctttcctttgggaattttaatagtctgtccggcataaatcttctcatcgcaaccgggattcaagcggatgatgtcagatgtagtgacattgtacatcttggagatagagtataaactttgtcctttttcgatagtatgcaagaaaaatgattgattttcttgggcataactgatagcgtatgaagcgcttataaaaagcaaaaataagaataatcggtttatcggtttcatcaaattataactattagttcttgaaatcaaggaacaaaggtacaaataatgccctatatcttcataagatttgagttaagaaaataatattgtgcttttttaggagcatatttcgggcggaaacattaattttgcaacatttatggaaggatatgaatatgcaggaaacagaatatattaatgtgtatggtgcgcgcgtacataatttgaaggatattgatgccgagattccccgtaatagcttgactgtgattaccggattgagtggtagtggaaaatcttctttggcgtttgatacgatatttgcagaaggacagcgtcgctatattgaaaccttttcagcgtatgcccgtaactttttgggtaatctggagcgtccggatgttgataaaataaccggtttgagcccggtgatctctattgaacagaaaacgacgaataaaaatccgcgttctacggtaggaactactactgagatatacgattatctccgtctgctttatgctcgtgcgggagtggcttattcgtatctgtccggtgaagaaatggtgaaatataccgaggagcagattctcggtctgattctgaaagattataaaggaaagaaaatctatttgttggctcccttgattcgtacacgtaaaggacattatagggagctttttgagcaaatacgtaaaaaaggatatctctatgttcgggtagacggtgaagtgcgtgaaattactcatggtatgaaactcgaccgttacaagaatcacgatatagaggtagtaatagataagttggtcgttaccgaaaaagatgatagaagactgaaacagagtgtagcgacggctatgcgtcagggagacggcttgttgatgattctggatgcacagacggaaagtatccgtcattatagtaagcgactgatgtgtcctgtcaccggattgtcttatcgtgaaccggcaccgcacaatttttcatttaactctcctcagggagcgtgtccaaagtgtaaagggctgggagtagtcaatcagattgatgtggataaagtgattcccgactgtgaacaatccatttatgaaggagccatagcacctttgggaaaatataaaaatgctatgatcttctggcaaatcggtgctttgttggaaaaatacgatgcaacactgaagaccccagtaaaggaattgccggatgatgcaattgaagaagtgttgtatggttccgatgatcgtataaaaatcaagagctcgctgatcggtacttcttctgattattttgtcacttacgaaggggtggtgaagtatattcagatgttacaagagaaagacgcttcggctacggcacagaaatgggcagaacaatttgcaaaaacaactgtttgtcccgaatgtaaaggtgctcgcctgaataaagaagccttgcacttccgtatttatgataaaaatatcaacgaattggcgaatatggacatcagcgaattatatgattggttaatgaaagttgatgtatatctttccgataaacagaagaagatttctgtagaaattttgaaagaaattcgtacgcgtctgaaattcttgttagatgtcggattggattatcttgctttgaaccgtagttcggtgagtctttccggtggtgaaagtcaacgtatccgtttggctacacagattggctcgcagttggtgaatgtactatatatcttggatgaaccgagtattggtttgcatcagcgtgataacctgcgtcttattaattcgttgaaagaacttcgtgacatgggaaactccgtaattgtagtggaacatgataaagatatgatgctggctgccgattatgtgattgacatggggccaaaagccggacgtctcggtggagaagtcgtttttgccggaactccaacggaaatgttgaagacgaatacaatgacttcacaatatttgaatggaaaaatgaagatagaaatccctgctaaacgtcggaaagggaatggaaaatctatctggttgagaggcgcgaaaggtaataatctgaaaaatgttgatgttgaatttccattaggtaaactgatttgcgtcacaggtgtatcagggagtggaaaatcaaccttgattaatgaaacattacaacctattctttcacaaaaattctaccgttcattacaagatcctttggaatatgattctattgaaggattggagaatatagataaagtagtcaatgtagaccaatccccgttggggcgtaccccacgctccaacccggccacctatacgggggtattttcggatatccgtaacttgtttgtcggtcttccggaagctaagattcgcggatacaaaccgggacgtttctcctttaatgtttcgggcggacgttgtgaagcatgtacaggaaacggctataagacgattgaaatgaacttcctgcctgatgtatatgtaccttgtgaagtttgtcatggcaagcgatataaccgggaaacattggaagtccgtttcaagggaaagtccatagccgatgtgcttgatatgacgattaaccgtgccgttgaattttttgagaatgttccgcaaattttgaacaagattaaagtattgcaggatgtcggactaggctacattaagctggggcaatcatctaccactctttccggcggagagagccagcgtgtgaaactggcaacggaactttcaaaacgtgatacgggaaaaactctttatattcttgatgaaccgactacgggacttcatttcgaagatatccgggtgctaatgggtgtactgaacaaacttgtcgataaaggaaacacagttattgttatcgaacataatctggatgtgataaaaatggcggattaccttattgatatgggccctgaaggtggtaagggtgggggagaactcttaagttacggaacgccggaagaggtagtgaagagtactaaaggatatacgccaaagtttcttcgcgaagaactggggctttaatctatgctaaaaacataccgaaaatgaaaatcaataaaacaaatgcagcccgactattggataaagccaaaataacttatgaacttattccttatgaagtagatgaaaaggatttaagtgctgtacacgtagcagctagtttgggtgagaatatagaacaggtatttaagactctcgtattgcatggtgataaaagcggatattttgtctgcgttattcctggagagcatgaagtcgatttaaaactggcagctaaagcctccggtaataagaagtgtgatttgatccctatgaaagagcttttgccgttaaccggatatattcggggagggtgttcgcctattggtatgaaaaagcatttccctacttatatccatgaaacatgccggcattttccgtatatttatataagtgccggtgtgcgtggacttcagataaaaatagctccggaagatctgatacatgaagcgaaagcggaaatttgtgtcctgtttgcagagtaatttcaatttattctgaagtaaatatggctacatattctttgaataaatcaaaaaaagtatatatttgcaggaaatatcaattttattaatctaatattctttttatatgtttgaaggacaaccgaaagggttatacgctttagctttggctaacacgggcgaacgttttggctactacacgatgcttgctatttttacacttttcttacaagcaaaatttggttacacagcagcagaaacatctactatttttggctcatttttagcagcagtttattttatgccacttgtaggcggtattttagctgataaatgtggttatggtaaaatggtaacgacaggtattgttgttatgtttgtcggttatctccttttggcgattcctactgcggcaaatcttactggtaaaatgatgatgtttggttcattgtttttgattgcttgcggaacaggattgtttaaaggaaacttgcaagtaatggtgggtaacctttatgattcaccagagtatagttcaaagcgtgatacagctttcagcttgttttatatggctattaacgtgggtgctttgtttgctccgactgctgctaccaaggtgactaactacatattaggtggcgcagggttcacctataatgctcagattccttcgttggcgcatcaattccttaatggtactattactccggaaggaaatgctactcttagtagcttgcaggctgcgcaaggttttaccggtgatatgtccgctttctgttccacttatatagagaaattgtctgaagcctataattatggttttgctgtggcttgtatttctttgattctttcaatggcaatttatgtttgttgtcgttcaatgttcaaacatgcagactataattctaagcaagctaaagcagtgaataactataatgaaccggaactgactccggcacagactaaagaacgtattgtagctttgttactggtatttgccgtagtaattttcttttggatggcattccaccagaatggtttgacaatgacattctttgcgcgtgattatactactcaatctgtaacagggcttgatcgtatcggatttgatgtatggaatctggttcttctgattattgtagtttatggtgcgttctctttattccagtctaaaacaggacgtggtaaagcgattgccggtgtcgctgtattggcttcccttggcatattaatatggagttattcttccatggattcgacagtggaaatacttcctcaaatcttccagcaatttaatccgttcttcgttgtggctttgactccggtatctttggctgtctttggctatttggccagaagaaaaaaagagccttccgcaccacgtaaaatcggtatcggtatggtgattgcagcatgtggtttcttgattctggccattgggtctttgggacttcctactccgaaagaagtagaagcggcaggcattaatccggatgttttggtttctcccaactggctgatctccacttatctggtcttgacttttgctgaattgctgctttctccaatgggtatctcttttgtttcgaaagtagctcctcccaagtataaaggtatgatgatgggcggctggtttgtggctactgctattggtaattatctggttgctattattggttatctgtggggtggtatgcagttgtggatggtatggagtgtattgattgtttgctgtctgttatctgctctgtttattttctctattatgaagaaattagaaaaagtagcataagtattatatgtagataacatagtatacttataaaaaatctagggtaataaatgaattatataaatcatttattaccctatttttatttcgctatatttcttttgtttcaaatatccagtcccatgatataatcattcatgtaatatccgtttccaatcgggaaatcaccttccctcaactttctcattcccatgtgctgataaaactgcaatgccttattattccgattcacatttagttccataaggcaaggctccgggtggatttctttaatatatttaatggcttctttaaataaaaagctgccacaatgactaccttgaaaatgagggaggacataaatcttttggaggtggaaaatatctttttcctgttgctgtacagaaacgtagccacagggctttccctctttgtaggctatgaaatagacatgaccttcttcttccatctgtttgcgtatattctcgggagcatacatccagtccatcatataatccaattgttcgggagataggatttccttgtaagttgcagggaatacttcgcctgccattttattaataagctcacaatcggcaaccgttactttttgaattgtcaacatacctgttttttgtagtttaatgggatacaaatatagctattatttctttttgtaataaggtgaattctctttgatagtttaattattattaatttatagtactttgcaatgcaaggtactaaagtaatacatatatttgtgccattcaaaagaaaaggaacaatgaaagtagacaatgtaaaatcccagatgagaaaaggcatgcttgaatactgcatcatgcttttgctgcataaggagtctgcttacgcttcggatattattcagaagttaaaagaagctcaactgattgtggtggaaggtaccttgtatccattgctgacgcgtttaaaaaatgatgatctgttaagttatgagtgggtggaatccacgcaagggccacctcgcaagtactacaaacttacggagaagggagaagtttttttgggagaactcgaactttcttggaaagagttgaccgaaacagtaaatcacatagccaatagataattagaataaagaaataatagaaatgaaaaagacattgaccgtaaatttaggtggaactgtctatcatatagatgatgatgcctaccgtctgttagacaattatctgtctaatctgaagcattactttcgtaaacaagagagtgcggaggagattataaatgatattgagatgcgtattgccgaattatttgctgaaaaagtagctgcgggaaaacaagtcattacagttcaggatgtggaagaagttatagcccgtgtaggtaaaccggaagattttggaattaccgaagatgatgccgagtccaataaacgaacagagcaatcatcttctgccagtcagacatatacacgaactgccggttcacgccgtttgtttcgtgacccggacagtaagttgttggggggcgtagcagcaggattggccgcatatctcggttgggatataacactggtgcgtattctgatgattgtactggtgtttgttccttattgcccgatgattatactttatatagtcgggtggattgtgataccggaggctcatacagcagccgagaaattaagtatgcgtggcgaagcggtgacgattgagaatattggcaagacggtgacggacggttttgaacgggtagcggacggggtaaataattatgtgaattccggtaaaccacgtacctttttgcaaaagataggagacgtgtttgtggctattgctgccgttttcttcaagatattcttggttgctcttgtcataatctgttgtccggtgctgtttgtacttgctatagtattggttgctgtggtatttgcagcaatcgccgtagcggtgagtgggggagccttgttgtacgaattactccctgctattgactggacacctatcgcttccgtcactcctatgatgacgttacttggtacgattgccggggttgctttgattggtattcctttgggagcttttttatatacgattctacgtcagttgttccattgggcaccaatggggacaggactgaagtggtcgttactgattctgtggatattgggtgcggttattatgattattaatctttcagcactaggctggcaactgcctttatatggtttgcaccacttttaaccaagtttattctattaaaaaaggataatatttattcttttataactaaatgtaccctgatagtgtgtccagggtacattttttgtttgttcttatctatggtaaatcgggattttttattaagtttgtaaagacgtattcgataagtataaaaatgggtgaacatatatgtttcaggagaaatgaacgtttagctactgtcaatccttattggcgaggcaatccgatggtgcgcgggcgcttttttaacagacaacaccgcttccgtccgggtatgggcagtgtattgaaatggcgtttgtcgcctaaccctcagcgtaaagaaaagaaggctgtgaagtgggatccgaaggtctgctatcttcgttcgctggatgccgtagtgggagattcgttgatatggctggggcataactctttcttcctccaattggcaggtaaaagagtcatgttcgatcccgtattcggaaatattccctttgtaaaacggcaaagtgagtttcctgcgaatcccgacatttttacagagattgattatctccttgtcagtcatgatcatttcgatcatctggataaacgaagtatcgcccatttgctgaaaaataatccgcagatgaaactgttttgcggcttgggaacaggtgaattgattcaaagttggttctcggaaatgaaaattgttgaagcaggttggtatcaacagatagaagacgaaggattaaagataaccttccttcctgcacagcattggagcaaacgttctgtgcgtgacggcggtcaacggttatggggagcctttatgttgcagggtgacaatatctcactttattatagtggtgatacagggtattccagccattttcgtgagattcccgatttgttcggtgctcctgattatgctttgctaggtatcggtgcatacaaaccccgttggtttatgcgtcccaaccatatttccccttacgaatccctgactgcctcagaagaaatgcatgcaggacttactatccctatgcattatggaacttttgatctgtcggatgagcctctgcacgatcctcctaaagtgtttgcggcagaagcaaagaaaagaaagatcccggtagaaataccttatttgggagaaatagtaaaactaagcaagaagaagtaattataaatgtataaagagatgaagaaattagaagtaaaagacttaaaagacaactttttcgaagctatcggaaaagaatggatgctgattacagccggaacaaaggagaagttcaacactatgacagcaagttggggtggcattgggtggctgtggaataagcctgtagcctttgtctttgtccgtcccgaaagatatacttatgagttcattgaaaaaagtgattacttgacactttcttttttaggagaagaaaataagaaaattcatgcagtatgcggttcaaagtcaggtcgtaatacagataaagtcaaagaaaccggcctgaagcctgtttttacggaaggaggtaatgtggtgtttgaacaagcccgtttaagtctggaatgtaagaaactttatgcggacggtatcaaacccgaatgctttttggacaaagaatcattggagaaatggtatggtggtgctcatggaggatttcataaaatgtatatcgtagagattaaaaatatatattcggagtaaatttagcgaattttgacggatgtaatgtagaaggctctgaactcaatgattgagaatagagccttcgttgatttttcacctttcggagtttatcttatttactcgaggtcttactctgaaggagccttctttacccatttatccagccactcgaagaaagtacgttgccacaaaacgccattttgcggtttcagtacccagtgattctcatccggataaattagcagttctgccggaacgccacgcattatggcagcatcgaaagcagccattgcctgattggctaggatacgataatctttttctccatgaatacaaaggattggagtatcccatttctctacaaagaggtgaggggagttggcgaaggtgcgttgcgccaccgggttttgtctctcccagtatgcaccgcccatatcccagttagcaaaccatttttcttctgtttccagatattgcatttccatgttgaagataccgtcgtgagcgatgaatgccttgaagcgtttgtcgtgatgtcctgctaaccaataaacggagaatcctccgaagctggcacctacacatcccaggcgatctttgtcgacatacgattctttcgctatctcatcaatagccgtgaaataatccttcatacactgaccaccgtaatcaccactgatttgttcattccattccacaccgaatcccggcaatccacgacggttgggagcaacaatgatataatcattagctgccataatctggaaattccagcgataagaccagaactggcttaccggactctggggacctccttcgcagaacaacaatgtcggatacttcttgttcgggtcaaattgcgggggatagattacccatgtcaacatttgcttgccgtcagtagtcttcatccagcgaccttccaccttacccatttccaattggtcgtagatcaacttgttctcttgtgtcagttgagttgccaaaccgtctaatgctactgcataaatttcatcacccatgctcatcgaatgacgttttgcaatcagtttatccccgaataaagcgaccccttcataatcatacattccggaagtaatggctttaacagaatcattcgccagattaagtgcataaatctgtgattctccgtgccatactcctgtgaagtaaatagtcttggcgtcagctccccatacaaatgcgtctacattcgattcaaaagctttgctgataaaacgcttttcacccgtctccagattcatgatgaacaagcggtttaagtcagcctcgtagccgtcacgctccatgctctgccaggcaatatacttgccgtccggtgaatattgcggatttgtatcatatcctttattttcttcggtgatatttttcgtctctttggtattcaggttatacacataaatatccgagttggttgaaatggcatactccaaccctgttttttttcggcaggtataagccaccttatccgaagttgtattccaagccagttgctctatgccgccccaaggcttcatcgggctttcgtaaggttcgccttcaagaatatctacaacatttgaaatgccgttgccgtcaaaatctgcaataaaaggatgtggagcagtcgttacccattcatcccaatgcttgtacatcaggtcagtgacgatgatacctgtggctttcgggaggtccggatacttgtcagccgtactctctttagtttttacctgtgagataaatagcagtttcttgccgtccggtgagatagaatatccttcgatgtcaccgtcgtagttggtcagttgcttgcgttcgctgccgtccggattcatttcgtagagctggctgcttccattgtcgttactcagaaaggcgagcttagtacctccttttatccatgtcacttcattttcctgataaggtgtgcgtgtgatctgttggttatcgctaccgtctgcgttcatcacgaaaacttcgcggttactcttgttctccggtacgctgtaataggccaccgtatacgcaattttctttccgtcaggcgatactgcgaatccgccgatacgtcccatagcccagagtgcctcgggagtcatgcgtttcccttcaatcttaatgttcgatttctcgataagcacttggtctgttttgcctgcgtcttttgtgcctccgcaggcagctaacaacattgctgccgacatcataaataaattagcttgtctcatatattttataaaatgtttattttcttgcgaagataatgaaaaaaggattcaaatcttctttttctgccagtttcctttcttcatatacctgtaacagaatattagaatgaaaatgccgtatacactttccgtagtccaggcaaatgcgatatccattcgcatatatagtataaagtaggttgcataagtaacatagattgccagtacacacagttccatagctaaagccgtgcgcgtatttcccgtaccggataccgactgaaaatagacgttggcaggtactagaaccagataggccgagcataacacccaaagagaaggaatagacgcttcccgcaaatcaggcatatccgtgtaaatactcagaaccagatccgggaatagacagaaaaagatcaatattggaattacaaatacatacccgatgcggatatgctgcctgatagttccccgtacacaatcctgttcgcctgcaccgataaggttgctgaccagcgaaccgcaggtagcggcaaaagccattgcaatcataaacggaatccccgatacattgcggattatattggcaatagccagcgaccgttctccaagatgttccacaaaaaggaagaacataaaccaagtagacagagagacgaagttctgaatcatagtccagactgaaatattcagaatccgtttcagcgtctgactccggaatttaggcaggatattcaaagcatacttcttgcagtcaatccgtttccaagtatagatgataaagaaaatcaccgataccagttccgataaagacgaaccgatagcagcccctgcaatacccagttgcgggaacccgaatttaccgaagatcaggatataattgaataccacattcgataacaccattacgatcgagtttagtgtcaacgtcttggtctgtgtcgttcctacaaagaatgcgcggaacatcacaccgacaaacgagaaaaagaagccataaaccctccaatggatgtaactttcggctgcattatagatatgtggggatgaaatgatattcttcaggatatgtggtgaaaatacaacagacagtgtaaatagtatagctgccactaccaataagaaatagacaccttgatagaagatcggaccgatttctttgtaattaccttcaccgttacggcgtgcaatcaaaatctgtgctccgatactgaaaccgaatgccatcataaagatagcgaggtagtatacaccggcaatggcagatgcccccagttcaatctcgccgacacgtcccagaaaagcagtatccgtcatgccgatgagctgctccataatcaggctaatcagaatagggtaggcgatagtccagatttgtttataagtatatttagttttcatacgattaattattagagaaagaaagccgggcaaccaaaaataggtgtccggctttctcagaatatattcaggaaattctccttatttcttattctgtctttgctgctgcaactgttcctgttgcttttgcatcgcctccaagcgggcagcaaatccggtctttttcatttgtttcggatccttcttattcgcttccagaatagccaacaatttcgtttcattggtcgttttgcgaagaagaatcatagttcccacactaatcaatgtcgatacgaagtagtaatagttcaagcctgacggataatcgttcaagacaaacaagaacataatcggcatcagatacatcatccacttcatcgccgccatttgcggttgtgctcctgtgtcctgcatcgacattgtatacttcgtattcaagatgtttgttaccgtcatcagcaagcagaacaagctgaggtggttacccaggaacggaatatggaatgggaacgtgatgaatgcatcataagtagaaaggtcatctgcccacaagaaactttgttgacgcaattcaatagcgcttggtacaaacataaacaaggccattaaaatcgggaactgtaataacatcggcagacagccgcccattggactcacaccatactgactgtagagtcccatgacttcctgttgcttcttcattgcatcttcctgcttcggatacttcttgttgatttcgtcgattttcggtttcagtacacgcatcttcgcagatgacatatacgttttccaggtagcggggtaaaccacgacttttaccatgatagtcagaatcaacagtacgatacccatgctcaagccccaaccggataaccagtcgaatacgttgattgtgataaactgattaatccagcgaatcaatggccagcccagatataccagtctgtgaagctcccatttctcagtacggcctttatccaacgctttcagggtcttaaagtggtttggaccgaaatagaagtgcatctctgtcggttcttttccgctaggatcaaagaaggtattcatttcagcggaataatctttgatatatccgctgccttgctgttccattcttgattttacggaaaccttatcgaagtcctgttcggcgatgaatacagaagagaagaactgattcttaaaagctacccagtcaatgtgtccttgcagctcctgactatcatctttggcagccgacaagttatctacatcatctcccgttaccttataagtcaactcagacagacggttctcataagtgaaacctttttccagttggcgggcacgttgggaccagtcaatatctacatagttagtgctggccaatttgtctgccatacctgtcgctttgatttcaaagttcatcaggtagctgtccggtttcagtgtatagatgaaatcgatgtagcttgcgctatccgcagccagacgcatagtcacgctgctgtccgtcttgttcactgcttcaaagaaataatcctttgtctggatcgccccttccttgttatagaagttgaagttcatcgaagcatcatcaccgtcgaacagtacaatcggtgtctttttatcctgtgccatgtactctttcagtgtagctgaatatacacgtccgccttttgttgcaaaagtgatttccgctacattgttctggatgctgattttagaatcagttccgtgcatggcgttgaagaacaaggcggaagaatcggctgttgttgcagcttctttcttgttgttggccaatgcggcttccgttttcgctttcagcgcttcctcttgctgttgtaccaaggcaatggaatcgtagtatttcttctgtgcagcaatctgctcctcgctcggacggctcagaagactgaatcctaccaataatatacctattaaaacgagacctgtaatggtatttttatccattcttattttaattacaaattataaattacttttcgttttcgatagcagctttcacaaacgccacgaacaacggatgagggttcaataccgtactgctgtattccggatgaaactgagtaccgacataccacttcaaagccggaatctctacgatttccaccagatccgattccggattgataccagtgcatttcatgccggcggcttcgtattgtgctttgtagtcgttgttgaactcgtaacggtgacggtggcgctcctgaatatgttcttgtccataagcttcaaaaactttcgaacctttctgcaatacacattcgtaagcacccagacgcatcgtaccgcccatgttggtaattgccttctgttcttccatgatgtcaatcacgttatgcggagtcttttcatccatttcacgtgagttggcatcagcaaatcccagtacgttacgggcaaactcgatagcgatacattgcatgcccagacaaataccgaaagtcggaatatcatgtgtacgcgtatatttgatagcaacaaacttgccgtcgataccacgttgaccgaatcccggaccgatcatcacccccgccatacctttcagtgcttcgcctacattttcgtcagtcagtttttcactgttaacgaaatgtacttctactttacggtcgttgtaagtaccagcctgtgacaaagcctcacggattgacttgtaagcatcctgcaagtcgtattttccaaccaaagcgatattgatcggtttttttgtttctgcagcatgccggcgttcaaggaatttacgccatggaccgagtcccggagtttcacctaccggcaatcccattttttcaagaatggtgctgtccagtccctgtgcctgcatcaggataggaacttcatagatagtttccgcgtcaatagactgcactacggctttgtcgtctacattacagaattgtgctactttcttacgcagtccgtcactcaatggatgttcggcacgcaataccagtatatccggttggatacctacgctctgaagttctttaaccgagtgttgtgtcggtttagttttcagttctccggcagcggcaagataaggaacataagtcaggtgtacgcaaagagcgttcttgcctagttcccatttcaactgacggatgctttcgaggtaggggagtgactcgatgtcgcctactgtaccgccgatttcagtaattacaaaatcgaacttgtatttgttgccgagcaactttacgttccgtttgatctcatctgtgatatgaggaatcacctgaatggttttacccaaataatcaccacgacgttctttatcaatgacgctcttgtagatgcgtcccgtagtaatgttgttcgcctttgtcgtttgtatgcctaggaatctttcgtagtgtcccaggtcgaggtcggcttcgtgtccgtctacggttacatagcactctccgtgctcataaggattcaatgttcccgggtcgatgttgatatacgggtcaaacttctgaatggttacattataacctcttgcttgtagcaacttaccgatggaggatgagatgataccttttcctaatgaagaggcaacaccaccggtgacgaaaatatactttgtttctcccacagctataactgttttaataattgtttacttagtcaaattcttacgaacttaaaaagcgcaaaattataaaaaaaagaggaagattgcagactttcgcggctacaattttattaaaaaatgcaattttgaaagaatcctatgatttctaaacaaaataatgtagctttgcatcctaaaccatagacaaatatgaagagagttattattttattttcagcttttactcagctgttattcatgttgccgctttctgcacaggagtccgttcaagattccataattccggccgattcagtgcagattgctcctgtacaggctgtcaagccttccaagaaggtaacaaagtcttcaacagtggtggcgaaagccaaggtggtgcgatcggatacgctttcaacggagcttcagaaatatttgatgctgaaactcaatatgtcgggaccgactcctaagttggatacagtttcctatttatataataagtatattgctcagttggattatctgaatgatccttctgtgccggcacgttatattccttccgaccccgattattttcgcctgtttactccattggcatattattatgctccgatgaagcaatattctacaatagactggaagccgatacagttggatactactccgaatctgacggcagagcttttgccttatgatacgctggtatttactaaaaccaaacgagccaatatactggtcaacaacgcattaatggatctttatctgaaacgtccggaattggttgttactacggaagaccggatcatgagccgtgatgttttccgtccggatgtgaagccgaaaatatccccgaaagcaaacgttattcatttgtttcagcgtgaggagatgagtgataatgtagggaaggccgatattaagatcagcaagcctaactggtgggtgaccggtggtaacggatcgttgcagatcagccagaaccacctttcggacaactggtataagggaggagaaagtaacttctccggattagctacttttcagatatttgcaaattacaacgacaacgagaagatcttgttcgagaatcagcttgaagctaagttgggcatgacttccactccgtcggatgaataccataaatacctctttaataccgaccaactccgcttatataataagttaggtttaagagcacttaaaaattggtattatacgatttcttcagagttcaagactcagttttgccatggatacaaggccaatagtgaagatttggtttctgctttcatgtctccggcagatttagcagtcagtatcggtatggactataaactgaacaagaagaaattcaacctttccgtgtttatggctccattgacctataacttgcgttacatcggtaatt

SEQ ID NO: 2974 - DNA, 24688 bp, Unknown
  gut microbiota DNA sequence
tatgacaaagatatatctttttttgaaatgcagcagaaatacaggaataaatacaggaagttctgtattatccgactactctcttccatataaaaaaacgaaaatcctctttcaacctatcacctactttgccaatccctttattcatcatgctttcagaacggtgataggttgtttgcaacctatcacctcatctatcacctatcacctgctaatttggataaaatctactgtaaacgaaagcggtaactaggggcaatttctgtttcccggtgagaaacaaagtgcttcaaggcatgaaacgattggtttcaaggctctgaaactttagtttcaagcgttagaaactaaagtttcagagcctttgaaactaaggtttcctgcctttgaaactaaagttgcgccgcaggaaacaagtggttagattatatattggctaataaggaaggagaggcgtacttctgcaaatttggtggtaatttagcaagtcggtagtatctccattcccttccttcgggaaggaggggtggctgaaagccggggtggtaggtggacacacaatgctgataataaccgacttacgcattcacctaccacctccccctacggggactcctccttcccgaaggaggagaatggagttactaccgacttttagatagcctcttgctattatgagaacaaatcatttaatgcttcactcatactggggtgagtaaagatgaaatcacgcagaaaagtataatcctgccctgtcttcatggcgacagcaaccgtgttgattacctcgccggaatcgggggcaaacaatacacagcctaatatttttcccgtattcttatcaatgatagctttcaacaggccgtccgtttctcccaatgtcttggctctcggtattgccataacgggtaacttcttcacaataatatcccgattctgccagcgggcttcctcttcattcagaccgatacgggacaatggcgggtcgataaagacagagtaactgaccggattacggtcgcccgtccgccgttctttatcgccgaataagtcttcacggacaatccggtaatcatccaatgagatataagtaaattgcaatccgcctttcacatcgcctacggcgcgtatattcggattagtcgttttcaggtattcatcgacaatgatagctccacgcacatccacctctactccggccacttccagattcaagtctttcgtgttaggccgccgtccggtggccagcaacaccgcgtcggcttcaagcacaaacacctcgttagtctgcgaatcggcgaaagtgacgattgctttatcttcaacacgattcaccgactgcaccttggcgttcatccggaaaacaatacctttcttctccaatgtctcttttacgcttgcagcaatatcgcggtcctcacgggctatcagttccggataactttcgagcaccgtcacctgcgaaccgaacgaagcatacatagacgcaaactccaaaccgatataaccgccgccgataatgaccagacgacggggaaggtcggccagttccataatcgaggtgctggtatagacaaacggattacccgcaactccctcaataggaggaatcaccgtttccgctcccgtattgataatgatctgctttgatgtcaaccgtatttcttccgtagccgtgcggacagcaaccacatcggcggaaacaaaagaacctatgcccgtatagacggtcacattggggttatccgccagattatggtaattcttgtttcgcaatgcacttgtcacggactccttcacagagacagcattccggtagaactcacttctttcttcaaatgtggcgtccttcagagccgaagccatttttgcctgatgcaccaatgtctttgtgggaatacaccctatattaatacacgttcccccgtacatcttgtccgaacgttcaataatggcaaccttctgcccacgctttgcaaactctgccgcaagggtctttccgcccttaccgaaaccgataataataacatcaaatgcattcatatctatatacttttaattggttctgattagaccttgccaggttcatctttaaatgataatgcaaaggtcgttacttccggagggataagcaataaccattttgccggataagttagcaattattcccgagaggggaaaaagtaagaaataatgaaagtcgccggcacagatatgacatctgcccggcgacttacctattgaatcaaattccacttactatcacatcaatcaatggttcggatgaatatccagtttcaccggttttatcatattttccggttcgaggatagtgtccaggtcttctttggaaaggatgtcatgttcaaggacaagttcataaactccctttcctgtttccaacgcttctttggctatttttgtagaatgcttgtagccgattaccggattcagtgcggtcactactccgatactgttgtgcacatctctgcggcatttatcctcattcgccgtgataccgtcgatacataaagtacgcaaagtatcgaacccgttcatcaataaatcggcagactcgaaacagcactgcgccattacgggctccattgcgttcagttccatttgggcggcttcaccgctcattgccacacaaaggtcgtttcctatcactttgtaggctacctgattcatcacttcgggaatgacaggattcacctttcccggcataatggaagagccgggctgcatggcgggcagattgatttctcccaatccgcaacgcgggccggaagccagcaaacgcaagtcattacatatcttattcatcttgacagccacacgcctcatcgcagccgaatagcctaccatgcaggaagtatccgaggtggcccccaccagatcatccgccagttttatatccagtcccgttatcttacgcaaagcggcgatacacttttcggcatattccggttcggcggtgattccggttccaatagccgtagcacccatattgactgtcagaaaatcctgtgcggcaaaatcgaggttcttcacttcatgccggagaatgcttgcaaagccgttgaaagtctgtccgagtgtcatcggtacggcgtcttccagttgggtacgccccattttgatgacatgggcaaattctgttgctttcttgcggaaagattcaatcagtacctcaaaatgttttaccagtttgaggtgggtgtagtacagtccgatgtgaatggcggtaggataagcgtcattggtagactgcgaacggttcacatgatcgttgggcgaacagtattgatactcccctcgctgatgtcccattaattccaacgcacggttggcaatcacttcgttggcgttcatattcgtagtagtacccgcgcctccctgaatcatgtctaccgggaactggtcgtgatgtttcccttccagtatttctttacaggccttcaagatagcgtccgcctgttcttccgtcaacaagtccagttcgcgattggcaacggcagctcccatttttgtaatagctaatgcctgaataaacagaggatattcattcaagtgaaacttactgatgcgaaagttttcaataccacggagtgtctgcactccgtacagtgcactttccggcacttcacgactacctatcaagtcgctttctgtacgagttttttttgataaattctgttccatatcggttgttttataacaataacattttggttagtacttatataaccaacgagaaaggttattgttttaataaatatgcaaaaactattcaataacttttttgttgttaatacaagaaaaagaaaatacaaagagagaaatcacttatctttgtttcgaacttaaaacaacaacctatgatattacaattagcatttgttctgacagccattattattggcgcacgcctgggaggtatcgggctcggtgttatgggaggcgtcggattggcgatactcacgttcgtttttggtttacaacctaccgcccctcctatcgacgtcatgttgatgattgccgccgttatctcggcagcttcctgtatgcaagccgccggaggactggattatatggtgaaactggcagaacatttgctccgtaaaaacccgtcacacgtcacactgttgagcccgttggtgacttaccttttcacgttcgttgcaggaacggggcacgtggcctattccgtactgccggtcattgcagaagtcgccaccgaaaccaagattcgtccggaacgtccgctcggcattgcggtgatcgcttcccagcaggctattacggcaagtcctatttccgccgctaccgttgcgttactcggactattggccggttttgacatcactctgttcgacatccttaaaatcacaattcccgctacaatagtgggagtattggtaggcgcattattctccatgaaagtcggcaaagaactggtggaagaccccgaatatcagaaacgcctgaaagaaggtctcttcaatagcaagaaggtggagattcaagacgtaaagaacaaacgttccgccatgctttccgttatcatttttatattggcgactgccttcatcgtccttttcggttctttcgaagggatgcgtcccagcttccttatcgatggagagataattacattgggaatgtcctctatcatcgaaattgtcatgttatcggctgccgccattatcctgatagtgacccggacggacggtatcaaggcaacgcagggttctgtattcccggccgggatgcaagctgtcatcgccatcttcggtatcgcctggatgggagatacttttcttcaggggaatatggcacagcttactttctctattgagggaattgtccgtcagatgccgtggttgttcggtatcgccctgttcgtgatgtccatcctgctatatagccaggcagccaccgtgcgggcattggtgccgcttgggattgcgttgggcatttcgccttatatgctgattgccctgttcccggcagtaaacggatatttctttattccgaactaccctaccgtagtggccgccataaatttcgaccggacggggacaacaaaaatcggtaaatatgtgttgaatcattcattcatgatgcccggactggtgtctacggtcgtggcgattgctttgggattgctctttatacaaatattctaactatatattattaacctaaacatcattcagttatgaaacaattcaagagatttggtctggtagtagtcgcactactatgtaccgttgcaatggcttttgccgcaaaaccgaatattcatatccttgccaccggaggaactattgcgggtacaggaagctccgccaccggaaccagctacacagcaggacaggttgctatcggcgcattgcttgatgcagtgcccgaaataaaggacatcgccaacgtgacaggcgagcaaattgtgagaatcggttcgcaggacatgaacgacgaagtctggctgacacttgccaagaaaatcaacgagctgctgaaacgtccggatatcgacggaatcgttatcactcacggaacggacacgatggaagaaactgcttacttcctgaacctgactgtcaagagtgacaaacctgtcgtgctggtaggtgccatgcgtccgtctaccgcgctaagcgccgacggcccgttgaatctttacaatgccgtagtcactgccgccgccaaggaatctaaagataaaggtgtgctggttgccatgaacggcctgatcctcggagcggaaagtaccgtgaaaatgaataccgtcgacgtacagactttccaggcccccaactccggtgcactgggttatgtgctgaacgggcaggttttctataaccaggtgacattgaagaaacataccactcaatccgtatttgatgtgactcacctcacttcattgcctaaagtcggtatcgtatacagctactccaacatcgaggcagatatggtgactccgctactgacacacggatacaaaggaatcatccatgccggagtaggaaacggaaatatccacaagaatatcttcccggtactgaccgacgcacgtagaaaaggtatcctggtggttcgttcttcccgtgtcccgacaggtcctaccacgcttgacgcggaagtggatgatgccaagtatcagtttgtcgcttcacaggaattgaatccgcaaaagtcgcgcgtattgttgatgctcgctcttaccaagaccacggactggaagctaattcaacagtactttaacgaatactaaaaaccggactgacttatgaaaaatttgatttttatgttgctccttgcgggcagcataggaggagtgtatgcgcaaaatgcggaaaagaaggacaagttctcccccgatactcccctgttcgaagaactgacgaacgtaaagaaaaagacggataagttcaatttatacctgaatatgcaaggtagttttgacgcccacttccgggatggatttcaggaaggtgattttaatatgcaccagctccgcatcgaagcgaaagggaatatcaacaactggctgtcataccgttaccgccagcgcctcaaccgctcgaatgatgccaacggcatgattgacaatctgccgacttctatcgactacgccggtatcggaattcagttaaacgaccaattcagtctttttgccggaaaacaatgtgccgcatacggtggtttcgagttcgacctgaacccgattgatgtctaccaatactgcgacatgattgattatatgagcaattttatgacgggattgaatgtcggttataatatcacgcccgatcagcagctgaacttacagatattgaacagccgcaacagttctttcgacagtacgtacggaatcacggaagacgccgaagggaatatccccgatttgaagtcgggcaaaatgccgctggtttacacgctgaactggaacggtaatttcaataatgtattcaaaacccgttggtcggcttccgtcatgaacgaagccaaaagtcataatatgtactattatgcagtgggaaacgagctgaatctcggcaaatggaacgcgttcgtcgacttcatgtattcaaaggaagatattgaccggaaaggcattatcacgaacattgtcggccgtccgggcggacataatgcattcgatgcgggttatctgtccgtagttgccaaatgtaattaccgattcctgccgaaatggaacgctttcgtgaaaggtatgtatgaaacggcttcggttacgaaggcgtccgaaggaatagagaaggggaattacagcacttcatggggataccttgccggtatcgagttttatccaatggaaaccaacctgcatttcttcgtcacgtatgtaggacggtcctacgatttcacttcccgtgccaaggtgctgggacaggagaattacagtaccaaccgggtttcagtagggttcatctggcaaatgcctgtattctaaaaacagagctctgttttaatattcaagtaagaatgcttttccgcatctctacttgaatattaaaacagtagctcatatgatcgattagtgtatgtgttaagttattatcctgattgatcgaaggcttttctcttttttatctactgccggtcaccaaagtccgacttccatcccaacctaccgcctcaatccgagtcgctccggtaggataatccacacgagttgtcttattagtcacgtcaccagtaccgactatacaaatatcagtcagttctttgcctttatatgtttcaaaagcaactacattcttccatatagcatggtctaccgtgacataatcagttcctttggtaatcccggaattaaatgttccttctacgttacttttgctcttgaatgcttccacgctgttggccgagatgtattgcataccgcctgaaggcaatggttttccttctccgtaagctttcacttcatctaccatttcctgcgttatatttatggtagcaaccgtgtagtcatccaccttcacattatcaaatactttcagcagccccataccctcgaagaatccgcaaagattcagtcccgaagcgtcaatagcacgtttcatgaaattcacatacctccgccccggagagtaactcttgtcattatcatggatagccgcccaatgcacatcaggccaaaaatcaggttttatatccgctgccataaaatacatagtcatttgccataaagggattaatttcacaaacggatcagattcccatacgcccggtttgtcggtggaaatagttgccacttgcatgaagtacgatttatgggcaaccaaagcttcgttcaagaaagcatttatacgcccgcccgccaaagccgaacgtgctcccggacgcttgaaggattcatgttccagtctcagatagccttcactcaacggatcgtttctcatcatatactgagcaaatgaacagtaaagattattggtcacttccgtccaaccattgcctttcatctgggcaacctggttgccatgtccaaactcatgtccgaaaacccatacattattctttctataaaagaccttcggaaccaacatcgcatcttccgtgttgggataattggcacatactccgttccagttaggacttcctccccaagaacggacgccaaaaaagcggttagcaggcacagcattgtttttcaccagtcccatcatcagatattcaaaatccaacatacggtcgtgcatatcgactactgcctgaattgcgtttggcgcacatttggcaaaggcattcaccgtattctgcaagtgtactctttgtcccagaatatccatcatcgcattcggaatatccaccgcacttctcttagccctctccaatatttccggccaagtggcatccgtatcaccacgtcttacatcccaatagccaatctgtttaccgaaacaaaaatgaatatcgacatctgtatctccggcatcatctctcgtccaatattgaatatagccattacccgaatttgccggagtaatcacattcaaacctccccgcaaggagatcacgcttttctttccaccttccctataatcggcaatggcaagactcagcggggtattgcttgctcctttgtacataacgaaaaccagcaccggctctccctgcgtaaaatagattcccgtcggattatcatatatgcttcttgagcctatagtcagttcttctgccactatttcaggactcttgcaagaatggtaggtactaaaacgaaattttttatcgtatttcccttccagcaactctttcgctaattgataaataacggcggtcttgatctccttaaggctttctgaagtcactgtaccctttaattccgaataggtctcgtccgtaaagaacttttgcgcttccaaaatgtcatttgtattatccgaatactgataacactcaaactcggccagagccacattgacgttatcaattccgggcgtcatccgatcgatacgtacacgcactttactcacttgaaggctattaacgctaatatcaacagccgctcccgccgtttgtgcggctacaaaaccgatttcctcattccaagtagtttcgccttctttcaaaaccgaaacacctccactggcaaaaagagaatttttatcattgttcgaacgttgcatcaaacgaacatagcctatgttttcgggctgttccaatgtatattcaatgataatagaatgtcctctattggcttccggcgaacctagtgaggcactactataatttgtcgaatagtctccatcaatagttttactgacatcctgattgccgtaaacattgccttctataagttccgcgctttttaccttcaatttcgtatcacccataccttcagtggaggctttctcctgaatgatagtaaaaactacggggtcttttaacgcagttgagacaaatttaatatgccccgtgcgattctgaaacgtgatgttcttatgtactgtaaccttaaaaatcttgtctgaaaaagttcttgtcactatcggttgttctattatttcaacccagccttccatatcagcctctatcgtaggttcattagcgacattagaagttacagtcaacaaaaattcttcaccctcctgtgttactttcctaggggtggactgatcaaaaagaatcgcatattctgttcctaattgaacaatttttattttcaaaggctggcaacccggtgccgttaaccggtattctgtctcacgttgcgtggcttcctcattctcggcaacggaaaaacgaatgatagcattttctccatccggaatgatttcgtaactacaccattgaacaactcctaaagaagcaatttcccagtctctccggttcgttattactttcacgtcaaatgcttctacggcatccgaacccaaattgattgtttcaccaatcaagtctgtttttagaaagggatctatcacctcttcatcgtcactgcaagcagtaaaaagtaacaggacgcataacactgtcaacatggtaccaaagtgtgtcttcaagaaatttaccataataaataatattagatttaactgataaaaaatccgttggccggaatccttttatactcaaaccaaccaacggataaagttatttttcagatatatatcttatttaatggatactccgtacagtttaagttcagccaatcggaattgccaccttccacctgcatcagtggtactttcacaattccaagtttgtactatacgtataaacttaaccggggtatcacaatggcaagctgatgttgtgaaagaagctcccaagttaaccgcacctgccgcgctcaaatcagccacactatatgactttcgagcattaggaatatcctcaaatgtaccatcaacagaccaaagtacatcaaatcctctcaataaagagacttcattttgtaaacattgtgtccatgagatagcaaaatctgtaactccttccggaagttgcaattggagataaggattagtgccgccggtattaacaaagttcctattagggaatggagtctgcacatacgttgcaggatctttatcaaacaaactcgcagcagttgtattacctacaaaatcggggaaattgaaactcaacatagaagcatccaaccctttgttattatactcatattccttacctgtcactgtcagattaaactcccgactatcaaaatcaaaattaattccttctatttcggtaattttaatagccactcgtcctcctacaaccagatttgtcaaatcatcaccgcttcctgccgataccgacaccttcaatgaagcttcttttcccggctcaaacgttaccagaccatcattttccagcgttactgagctagaagacaagtatccttcctttccatcgttattcacaacttctaccttagccgtgaaatcccattggttgtctatctctaaccccataggtatagtgaataaaacaggatccgaactatttataaacccttggacacattcttcctccgagactttaaattccagcttcggagtggtaatcacaggcttcatgacatagagattattcatagaatttacagaatccgtagcactaaccagtgaaatgggcaatacaaaagtcttatcagcattttccggaagttctaccaaggcttgaattgcactcgttttcatcaccactttggacattttatatctctcatcggactgaaaaatcaactcgctgccatctatagaataggtatttgaaggcaaaatagtataattttcattgtattccttcaatgcttcatccgacaatacggtcaattgagcctgagccgttaatgacggatcacatccggtcttcatgattgttatatcaaaagaagcatcctgaccggtattataaagaattttactttcttctccggtttgcttcaaagacaagatcttatgatattctttcggatatgtatcatcatattcatcgcatgccgtatagacaaatgacaatccgcataataatggtataaataaacttttcttcataaatttgctttttaaattcataatacaattagtaaccgtatgcctgaaccatttgcgggtttttatacacttcggcattctgaataggagccagatataaacggtcgttccatctgaaaggctggtcaatagtagtccttacattaaatttttcaaacggtacatctttcaccattgcgttcaacccctcacgtttagcaccaaagtatttctgaccttccgcccaacgacgcacatcatgataacgatggccttcattccagaactcaataaatcgctcattatgaatcatttcaattaatttactctgttccggtacagtcgtagtcgtgggaacaccggcacggtcacgaacctccttcaagttggctaaagcatttgccagattggcaccacctacgttcgcctgacattccgccagattcagatacaattctgccaaacgtataagaggtatcggtttggtatctccagcctggaaagctccaccatcgaatacaaattgagctgtcggatttacatatttctgggtcataaatcctgtaacattatagttacgcggacttctggtaaggtcgtatccatgtcctgcagcagtcttcatgttcaaaacgcatggcgaacctgcatcgccactgctggccttcaacaactttgaaccgtaatcaccaccatcgaacgccatccatgcgtaaaaacgcggttcacggttcacacaaagtttaataatatcctctctattgtttcctgctattcctgctttttggaaccattctgctcttgaagcaaaatcgcctgttgaagcggcctcttcaggcaacacaccatcttccgtatagaaatgttcaatggtatatagcgtcggagaaatagctgaaaatccccctgcccaagaagtcttattgcctgtttggaatatatgcgccggtatacgtccctgtattcttgaattaatattcttaccggttagcccccagattaattccttattatgcggatagcgggaagcaaccatataacgaagcatcattactctttctttgaactctctgttctcctggatattattatcctcctttcccggcacataaggtaaccacttatcattatttcccagttctgtctgatacaatgtcatatcagaagcttccgttccataaagacggcatccaccctcattaagcgcaaaatccaacgccttctgacaggcctccatcgctctttcccattttttctcattataactactgcttaccagttcaatgccataatcatcccgtccgatagattctttatatttagcatcatcacctacaaaaaagtctttatccccgggagtattcactttattcttccatgaagaaaaagggaattgaccattccaaagaggagaagcagcatacatcagtacacgagctttcaaagctttagccatcgtagaagtagcacgtccccattctgttccctcacgggtcggcggcaaattctgtgctgccagatcaagttgatatgcaatccagttaacacaataatcataatgacatcttccaccaaactcggaagagggagtactctgaggtacatattccgtaataacaggtataggaccgtattttctcagtaatgcaaaatgataataagcaattaaaaaatgagcttcggccaaccactgttctttttcacccggtaaccattcctgcaataaggtttcaccgggattattttcgacttgacgtaaaaaaagatagcattgaccaatatacttataataattatcccaaagtccatccggattggctgccgagactaaattatatgcataatcatcccaaaaagctccactatcattccgccattctatcggcagtgcaaactcatctgtggaaccattaagagcacttgtgtgaccaataggagaatcatcttcctgaagtcctgcataacaagtgaacagaaatcctaaagtacttctccgggtctttgtggcatcctgtagccctgcttgttcaggcggaactacatccagataatcacaagaaactaaattaaatgaaagagcagtcacaatcagacccactcgaactatatttttcaaaatattcatatcttctatgatttagattattagaaattaagttgtaaacctacattgaccgtacgttgcaacggatagctattccaactgctcaattccggatcccacaaatcaaacgggctgaaacgaagcagattcgcaccactgacataaatacgcccatacggaattttataaccgatttccaaattcttcagacgcaggaaagaaccattacgcaaccaataagtactgttgaccgtattattacctatatcaccggtcgtcaatcccaaacgcggatattcggcattcggattcggattatctaccgaccagtgattatctgcaataaatttcaacacattcttattcggtatacgattcccttcaaggaaggggtccaaaccattgatcagaatggaacgcaatgcagaaccactgaagaaaataccaaagtcgaattttttataattaacggtaccaccgaaaccatattgcaaacgtggaacagaaccgtacttggaaatcatacattggtcgtcttccgttatttttccatcaccattcaaatcacggtatttgatatcaccgaccttcggagtgctatttcctaccatctgttccgggctgttgtctatctcctcctggctctggaacagtccttccgaaatatatccggtcaatctggaatatggttttcctgtttccgacttccaaatagtaggataatccggttcgtctttataaaccaacttatttttattatatgtcaggttagcctgaaaactagcccccaaatctttagagaaattcttatgataattaaggctgaattccacacccttattatccattttaccgacatttccccaaggttttgctttaccataacccaaagaattaggccaagactgacgttccataaatatatcgtaacgtttgtcatagaaatagtctattgttatattccagtggtcaaacaaagtcatatctacgccaatatcaaatttcttcgctttttcccacacagcatccagatttgcataataggcaatctccggacctcccaatgtgtgattcatactctctccaaatgtccactttatctgatccaatttattatccgtcagcttatcaatatataaataatagcttccgcccgcttgtgccagatcatcgctacctaccaatccataagaggctctcactttcaggttattcaccgcatttttcaaaggttcaaagaacttctcattactgataacccatcctaaagacattgccgggaagaaaccgaaacgcttcttcttggcaagacgttccgtaccgttataaccgaagttgatttcagccagataacgttgtccgtaatcatatgtgaaacgtcctgagactccttgattacgattaggaagcacatcacttctgtattccctttgccggtacatcaacatacctccgacattgtgcaaaccaaattgacgattataactgatatttccctgaaattcaaatgtctgatccgaacttctggcaatatccgactgtgctatatagtctgcaccttcctgaatacgttccaagtcatattccaacggactatcttcactgtatcccacagctctgaaaagataaggagtaatggaacgattgtaggaactgctggaccagtttttaaagtttacccagatatttgccttcaatccttttgttacaaacccaaaatcctgctccactttaatgactgtattcaatgtattcgcattctgctccttataagaagtcatcatctgcgcataaggattaggatagagatagtccgaactctgataatcagatccatagcggatatacgtatcacccggttgcgcaggataagttgcagggaaagttaccggagtagtcgtcagaatcattttaaacaaatcagcactattgatattaggccctttgttctgacggatctgagcattcatattcatcctgattgtcgttgtgggggtcaacttataggagatattattctggaacgtataattcatgatattaatattattgttccacgaataagctttctccgtattcagcaaaccactatcgtggctgacattcaagctcatataatacttcacttttgtacctcctcccgatacattgatattggcacgctgcgtcattgtcatctttttgaaaatgacatcctgccaatccacattcggatatacataaggatttaccccgtcacgggtcaactggatccgtctgtccgaatacaataattgatctttcgatttattcggatttctcgacaggtcagcttcattgtaaagttccatatatctgggaccatctacaaactcaggaaaatcggacatgatattgaaagagttctccgcactaacattaaccttcgtcttcatattgtaatcacctccctttgtagagattatcattacaccatttgcaccgcgtgcaccataaattgcagttgcagaagcatcttttaagatggagaaactctcgatattttccgccggcacatagttcagatcagatactgaaatttctacatcgtccaataatataagcggtgttgtacgcccgccaaaagtagaaataccgcgaatataaaaatcagccccggaacccggctctcctgttttagtggtagcaatcacacctgccagcttaccggcaaacgaagtacttaattgtgaagtcggcattcgtaaaatatctcctttcacatttgtaatagcccctgtcacactcactttcttttgtactccggaacctacaacaacgacctcgttcaacgtctgctgttctccggacatcgtgacattaaccacccctaaatcttctaccggagcttcacgtttctggtaaccgatgtacgagaagaccagtacggctttgtctccgctcacagaaatagaatatctaccattcaaatccgtgatagttccacttttctgacctttcacaacaatgttcacacctaccaacggctcgccgtctatggcgtctgtaaccacacctgtgacgactcttttctctcctttctgctgtacactctgtttattcactttcagtacaacttcgtctccccggactaaatagttaacattactcccttcaaatacaactgacaatactttttcaatcgtaccttggcagtcaatgtttttgcgctttacttcatccaaatctgctgcatcgtaaaaaaacacataattactgtttttttcgatctgacggatagcttgtacttcactaaaataccctttcacctttatgactccctgtgctgctattgcaatcaatgggaaacaaaagattccaaaccaaatgcacatgaggtacttccacctgccatgctgttgcttttcttccatactaaataattaaaagattaacattaaaaaattatacaaacatactatagtatacctttaacggaatatgatatattctccattttcctttctatatcgccaccctgtactgaagcacattttttcaatagcttcttccaatgactcattataacgtagacgcccgtttaacagattcttggttgcctgtccgtgttccaatgatatttttacattatatattcttcctacaatctcaatccatgaacttaaatcaacatttgtaaattcataattaccatctttccatttcactccttgcatttcatccactttcacgcttgccttctccgcgttgaaggtcaattcttgcgaaggtttcatctcaatagtatgctcagtacctactatcgtaaaatcgactttaccactaaacaaagtgactttagaaatatttgcctgttcctgattaattaaaaaagaagtaccttttacttctacaaaagccctatcaatgtatacgataaaatgtttgccatcctgtttataaacatcaaaatgggaatttcctttcaaccacacttttctattctgaacaaaattctccggataacggatagaacttcccggatgcatccaaactcgtgaactatcaggcagcatatatagacgcccttcttttgatacaacttctacaaaagcatctttcgcctcatttaccttatttccggagaaatacatccaagttgctccaagtagcaaaacaagagctacggcagccacagatagccaatatggtatataaacatgctttttctgttgtcggcaatccagacatttctgtcttaccattttccacatctttcgccctacttcatcgtcaagttctttttgtcgatccatattccattgcaggtgcattctttcttcaaactctcgatgatgaaatagttccttttgttctttttcatccagtttgtctgctaataaagctttgatttgttcatatagtttcttattcatatctatctttttcacatttttcattttcattataaaacaagcgtctctaatattaaatacgaaacttttatgtctatccctacattgcattgaactttttttcgaaaaatcagaaagcagttctttagaacgctaaccagtcctttttttcttatctttgcaaaacaattataattatgcacgtaatggagaaaacatctgttttagcaaaattaaaacaaggagacgaaacctcatttacctttgtatatgatcattattggcggaaagtatacagattttcagagatttatctgaatgacgacgaggaaataaaagaggcagtacaagaggtttttatcaaattatgggaatcgcgtgcatcaatcaacgaaaacaaagacatagacggattactctttattatgactcgtaacacaatttttgattacttccgcaaaagtctgaataaggtaacgatgaaaattactgctcttgaggttgctgagaaaattgctatatctgatgagacgctcgaagttaaggatctactggaatatatatggaaattagtttctttacttccaccacgacaacaagaggtttttatcatgagcaggaaacaacaaatgacaaacaaagaaatagcagaacaacttgacattagcgagaaggcggtagaacgtaatatctactttgctttaaaattcataaaaaagaatttgaacctatttattttcttcattacgataccataagagacattctgcgttttaactagttttaactgggtttgatatagtgctgggctaaaaatatacgtatttattaataagacacaaaggtataagttaccttaaaacctataaataaatatacccatgaaacagtatgcattattagcttttctttcgccagttgcaagcctattggcggttacaggtccggcacaaagcgaaaagctcaaaaccaaaacaaatcctcaaaagcagccaaacgtcatttttatctatgcagatgatctgggatatggtgacctcgaatgctatggagccaaaaacgtacaaactccccatgtaaaccaattggcagaaagtggtgtccaattcaccaatgcgcacgccactgcggcaacaagtactccttcacgttactccatgctcactggaaaatatgcgtggcgtgtaccgggaaccggtgtggcagcaggtaatgctggtatgattatccgacctgaaacttacacgctggcagatgtttttaagaattccggatatatcaccggcgctatcggcaaatggcatttaggattgggtgacaaatcgggcatgcaagactggaatgctccactacctacagcactgggagacttgggatttgattattcctatattatggcagccacagcggatcgcgtaccatgcgtgtttattgaaaacggtaaagtagccaactacgacccttctgctcctattgaggttagttatcaaaagccattccctggcgaaccattagggaaagaccatccggaactgttgtacaatatgaaacatagtcatgggcacgacatggctattgtcaacggaattggtcgcataggatacatgaaaggtggtggcaaagcattatggaaagatgaaaatatagccgactccatcaccgcacatgctattgattttatcgacaagtacaaaaaccagccttttttcttgtattttgctacaaacgacgtacatgtaccacgttttccgcatgaacgttttagaggtaagaataaaatgggagtacgtggtgatgctattgcccagtttgactggacagtgggacaaataatagcagctcttgaagaacggggattacgagaaaacacattaattatcctctctagtgacaatggtccggtagttgacgacggttatgatgaccatgctgaggaattgcttaacggacatagtcctgcaggtccttttcgtggtaataaatacagcgcatttgaaggaggaacggcggtacctgcaattgtcagttggccgaaagaaatccccagttcgcaaatttccgacgccttagtatcacaaatcgactggtttgcatcaatggctgctctaatcaacgcaaaattaccaaaaggaagtgcgccagatagccagaaccgcttaaacacatggctcggaaaggatcaaacggatcgcccatggattatagaagaatcttcaaccatgtctgtacgtaccaaaaattggaaatatattgaaccaaacgatggacctgccatgattacctggggcccaaaagtagagactggaaatttgaaaactcctcaactttatgacatgagagttagagaatatgaaaaggaaaaccttgcggaccaacaccccgaaatagtctacgaaatgcagaatattctgagacgagttagaaaatagaaataccaaaaacgatgttcatcaataaaaaattcccgataactttatcacaagttatcgggaattttatatgttcggtcatttataaattaatactcttcctcgttaaagaaaaaatcctccttactagggtaatccggccaaatatcttcgatactctcatagatctcgccctcatcttccatctcttggagattctcaataacttcaagaggagcacccgaacgcatggcataatcaatcaattcgtccttggttgccggccagggagcatcttcaagttttgatgctagttccaatgtccaatacataatcttgagtatttaaagtgaatactaatctgtcttattttctatattttcggcaaaagtataataaaatctatcatttccaactattatcccaaaatatttcattattttgttcatcaaaattcattttccgagataaaacaaacaaataatctgataatctgttgacaaaagctagtacttcaggggaaattgtacaagtttcggacaaagccaaaatgcgtctttctgctctccggcaaacggtacgacaaacatggcagatggccgctccacgacttcctccaggaataataaacgcacaaagttccggtaattgttcatccagtttatcaatctcccgctcgatacgttccacatcttccattgaaatgatactggcggctctcagttgtgttttttcctgatcggtagccaaatgcgacccgatagcaaataacttatgttgtatgcccaaaataaagttcctgtcagtctcattttgcaaataagtattcagtaatcccaagttggaattaagctcgtccactgttccataagcttccaaacgaatgtgggtcttcggaacacgactaccaccaacaagacttgttgttcccttgtctccggtttttgtatatacaaggctccttttcataatcttccaatttattgatctatataaggtaaacgtacaaaggttctcagaagttgacgatataatgttgttttatctttgttttatcaaaaaagagcaagcctatatcgtataggtcgaaggtaatgcctacccgttcgtcagcctgcaatcttttccagaatgcccgcatttctttagaataacagattccatgcacgacaaacacacttttcaaggtggtccggcgtacacaaacccgaaagacttcctccagcaaacacggattctgataatcgttcagatatagaaaatctaccggaacgtccgtatccagaaacagttccgacaagtcagaggcaaaaagatattccgcagaaggtttcgccgactgaagataaagtgaggtcaccgaaggacgacctacctctacaatagtagcaggttgcactttattcaccagccggaacaagaaacgatttaccttctgtgtacctttattacacccacgctcctctactattttcttctgttctttctccaaagaatcataagcataataaggcatcttttcatatatcacatccgttatcagactaaatgcaaacggagaatgtacaccatatccgcaacggtaacggaagcgggaaagccagataaagggtcttttaagacaaagtagaagattcataaaatcaacatttgtttttattcttcttgcaaagatatgtttttttatttcatagaagcaatccggaaaagaaatgttataagtatcctgtgattgagaatgtcggatttcaataaaaaagggccgatccctttcggaaccgacccgcattacacatctatttcaagcaactactgtaacctgaatactacaggaacggtatattttactcgaactttcttaccattctgtactccgggcctccattttggcatagaacttatcacacggatagcttctttatccaaatatgcatctacccctcgtaccacttcgggatttgaaattgatccatctttgtcaacaacaaattggacaatcactcttcccgctgaacccatttcctgagaaatagtcggatacttgatatttgtacccaaatatttcatcaaagcagccgtacctccgggaaactcaggcatgatttctgcaacatcaacaataacgtcttcatcaaccacttccgtttccaccactggcggtatccagacaatcttatgagttgcatccatatcctctccaactgtagaaacattatccgctacctctatatcgttctttactatttctaatatttctacgatcttattttcgggaggtggaggcggttccagtttctcatctgggaatgtgatcggaactaactctgtaacaaagatggattcatcatctgatgatagtgctgcaaccctgacatcatgttgtgtccattcgaacgaaacgaacatgaaggcaagcgcaacaaccaaacccatcaacaaccaagaaccccgttgattctcgattgtagccttttttgatttcttggcttccataaaaaatgtgtttaagtaattaataatagaaaatatatagtatatatactactttgcgtctttcctcttaagcattacttaaagtgctctccagctgcaataaatatagcatttttatggatagggtgttacgttgcttcttgtttattctattctttttccttcttttggataaaatttatgaatatcagccagcaaaaacctgctttatatctatataaataatacctttataaatacttaatagcctatcatctcctctaaagtcacgatcaccaaacacatacgagaaacgataacgggccaataaaactagctaaaaagagtaaaaaagaaatactttcttatttagttcttttctttctatttgcattttcctttttacgcatatcctgatatttcttatattgttcatcagtcaggatactctttattttagcttctccctcttttctcttcttttgcatctcttcgcgcgaaggtctttcattagaatttctctttgtcggtcgcatttcttccattgcagccttaaaatccttggcttgcttttcattcagtcccagatcggttattatctgttcgatacgcttctctctgtcaacttttcctttttgacgatcctgagccatacatactgttgagccgattaacaacacaacaagtaaacttaaaatttgctttctcataattctaacataatattaaatgaataatatatgttagaccttataagtggctgaaagttaattctattccaaagaaaaaatacagttttcacattatttatctaacaagaaaacgttttccctctagctttgccataccagcgacgacgtcttacgtggagatattcattgatccgacgttgagcccagcaaaccaatgagttacgaggagtagaaaagaaaagcggagagagttttccaactttctccgcctcagtacccagacccggtacaagccatagaaatcataggaaaataaaagaatttatcttccttattatcaactatttgaatatttcctattttctctatttttgccatattttgcccattttccgttattcagtacacttttagtacactttgaaatatcattttcttttgtacctttgcaatattggaaaacaaaagaaaatcaactatttagcgtaatcacccggttatggtacctaaatcgggataaaacctctaaacaatggcaaagttagaaaataaaacgaaagaaaaccccaagttagagcaaaataagctctcggatggtagaatcagcctttac

SEQ ID NO: 2975 - DNA, 63070 bp, Unknown
  gut microbiota DNA sequence
gggactcctccttcccgaaggaggagaatggagaatactatcgactatcaaattattgttgaatactatcgattatcaaattattattttcctaattaattttaccaccaaatttgaagaagaaccgccttgagaaacggtacagttggaaaatagcggcgaaaatcgtgacagtagctcctaaatatcagttattcaccgatgcaactacaatgtactgcaaccattattccatttccttctttctcttcttccacagttgccacgaattaataatattctgccacagcacatacgatcccggagcaacagaagacaacggattgagataggtatgtgccatccaaatagccagaatcgtattcttctgccccaatgcctgaccgccactgatacggtcattatagacagagccgattgttttccctaagaaaaactgcaaacaacaagcaaccaaagccccgactgcaatcattatttcggtaaagccgtccgcagggtcattcaacagcgaatacaacgtttgggctgtaacaatagccagagagactgcccacaaatagaaagcaagttcatgatagcccaacagcttctgatgcactttcggcagacatttgcccaacagccacgcagccagaaaaggacagatcaataatggaaatactttactcaatataacaaagaatgctccccaaaaactaacatcgggatgtacctccaccaaaggaaaaaaaatagggacggcaatagctgctccaatattccccagcaatgtgtaagtagtcagactcgccgcactccctcccaatttggaagtaatcactgccgcagcagtagccgtagggcagataatgcaaaccatgaccccttccgccacaattttattgaaacgataaagcagcaagtaagcagccagcgcccccgcaatctggatcaacaacagccatgcatgaagtggctttggtttcaaatcatgcggagatactttacaaaaagtgagcagcagcatcgtgaatatgagataaggagtcaggaaagatagactaatgaacaaaggataccccacagcgcctaccaacatagcgataggtaatgtccaattctttaaaaacttaagcatcggcgtacattttaacttcggggtgcaaagtaacggagatttcaggagaaaagctacctttaaaccgaaaaaaacacaaaacttaatggcaaataatgagttttctacaaaattctactacatttgcagcgtattacagatatgaaactgaatagaccatacatattatatatatgcatttgcctctggctacttttcctgccctcatgcaccaaccgtttatgggggaaagatttcgtcgtagtcattgatgccggacacggcggacacgacccgggagctatcggcaaaatctctaaagagaagaatatcaacctgaacgttgccctgaaagtaggaaatctgataaaaaagaactgtgatgatgtcaaactgatttatacgcgcagcaaagatgtgttcattcctctggcacgacgggcggaaatcgcaaacaacgcgaaagccgatcttttcatctccattcacaccaacgcactggcaaacaaccgtacagcaaaaggtgcttctacctggaccctgggtctggccaaatcagaagccaacctggaagttgccaaacgagagaatgccgtaattctctacgaaagcgactacgaaacaagatatgccggttttaatccgaattctgcagaatcttatatcatattcgaatttatgcaggataaatatatggagcagagcgtgcatctggcttcactggtgcagaaacaattccgacatacttgcaaacgagtggaccggggcgtgcaccaagccggattccttgtattaaaagcaagtgccatgcccagcattctggtggaactaggatttatctccactcccgaggaagaacgttacctgaactcggaagcaggtgccaatacaatggcgaacggaatttaccgtgcttttctgaattacaagagagaacatgaactgcgcctgacaggagtcagcaagacgattattcctgccgaagaacaggaggagaaaaatgctccggtaatcgcacaagcttctccccagcctgccgtaacagcgaaaacaacgcccaaacgtcctattgtagtagaaagtgcaaccaatgacagtgaaattacgtttaagatacagatactcacctcttccaagcctctcactaaaaatgacaaaaggttgaaaggactgaaaggagtggactattataaagaaaaaggaatctataaatatacgtatggtgcctctgccgactataataaggtattgcgtacgaaacgtagcatcacggcacaattcaaggatgcctttatcatcgctttccggaacggcgagaaaatgaacgtcagcgaagcgatcgccgaattcaagaaaagaaaaaataaataaaaatataaaatgaagtacattacaaaagaagtcagaataggtattgcaggtataatagcactatgcgtactgatttatggaattaattggctgaaaggtatacacatgttccagccttccagttatttctatgccaaatttcaaaacgtaaacggactgaccaaatcaagtccggtatttgcagacggtgtccgcgtaggtattgtacgtgacatctattatgactacgtgaacccgggaaatgtgatcgtcgaagttgaactggatacggaactgcgtatccccaaaggaagtagcgccgaactggtatccgagttaatgggaggtgtgcgcatgaacatccttctcgccaacaatccgcgcgaaaaatatgccgtaggagatacgattcccggcaaactgaataacggaatgatggaaagcgtggcacagctcatgcctaaagtgcaggaaatgttgcccaagctggattcaattctgatctccctgaacaatattctgggagacaagagcatccccgccaccctgcattcaatggagactaccaccgccaacctcgcagtagtcagctcacagatgaaaggactaatgagcaaagacatcccccagctcaccgggaaacttaatacaatcggagacaacttcatagccattagcggtaatttaaaggaaatagactatgcagctactttcaaaaaaatagacgaaactttggctaacgtaaaaatacttacagagaaattgaacagcaaagacaacacgcttgggttgcttttcaacgatccgtcattatacaataatctgaacgcaacgacagagaatgccgccagtttgcttgaagacctgaaagcacatccgaagcgttatgttcacttctcattattcggtaaaaaagataagtaagttttcatcgttatatagattttatctaaataacgagagagcgtaaaaagaatgtggatcactctgcaaatgtctatctacaaaccgaaataatattcccgtacaaacagataaatgaaagaaaagctacataattcagggatataaaaagctattatacagatacttataaaaatgcaatagccttcagaggcatcatgtttttatagaaatgtataagtcactgaaagtaaacacattattgttttcatgaaataaacaagaaaaaatagatttgttttttccaaataagattccgaattttgcaagcgtagaagttttgcttaattaataaatgtattaaaagttactatgattgaatcaaatcatgccgtactttggaaccgctgtctcgaggtaattaaagacaatgttcccgagacgacatataatacttggtttgccccgattgttccattaaaatatgaggacaaaacattgatcttgcagatcccgagccagtttttctatgaaattctggaggagagattcgtagatctaatccgcaagacattatataaggtcattggcgaaggcaccaagttgatgtacaatgtcatggtcgacaagacttcgattccgaatcaaaccgtgaatctcgaagcaagcaatcgttctaccgctgttactcccaaaagtatatttggtgccaacaaagcacccaatttcctgcaagctcctgctgttcaggatttggatccacacttgaaccccaactataactttgagaacttcatcgaaggatacagcaacaaactgtcaagaagcgttgccgaagccgtagcacaaaaaccgggaggtaccgctttcaacccgttattcctctacggagcttccggagtaggaaaaacgcaccttgcaaacgcaatcggcacgaaaatcaaagaaatatatcccgaaaaaagagttttatatgtttcggcgcatttatttcaggttcaatatacagactcagtacgtaacaacacgaccaacgactttatcaacttctaccagactattgatgtacttatcattgatgatattcaggagtttgccggagttaccaaaactcagaacaacttcttccatatcttcaatcatctgcatcagaacggcaagcagctcattctgacttccgaccgcgctccagtgttgctgcaaggtatcgaagaacgtctgttgacccgtttcaaatggggtatggtagccgaactcgaaaagccgaccgtagaacttcgcaaaaacatcttgcgtaataagatacaccgcgacggattgcaattcccaccggaagtgattgattatattgctgaaaatgtgaatgagagcgtacgcgatctggaaggtatcgttattgcgattatggcacgttctactattttcaacaaggaaatagatctggatttggcacaacacattgtgcatggcgtagttcacaacgaaacaaaagctgtaacaattgacgacattcttaaagtcgtatgcaagcatttcgacttggaaccgtctgctatacatacgaaatccagaaaaagagaagtggttcaggcacgccagattgccatgtacctggctaaaaatcacacagacttttcaacatccaagataggcaaattcattggtaacaaagaccatgcaacagtacttcacgcctgcaaaacagtaaaaggccaactggaagtagacaagagctttcatgcagaagtacaggaaattgaatcactgctgaagaagagaaactaaatcaacgataaaaatagcaggtattaagtattatccatgcgtgtgcatataaagcaaatgtaactgcgataatacttgatacctgctgtttatttcaagtacttatttcaaaaaaccttgttgacgaagtactttcaacaagttatcggacataaattcattatctttctttgtataacgtatgtctgtaaaaacctgagcaagcgtttctttctgattctcttcgatgaattgtttattttcaggcaacgattccttataggcatacagtttatcaatatcttcggatgtgtagtcatgataggtttcctgatgtacagccgcttccaaaggtaaacggtcaacttgtgcagggatactgtccggatagcctaccgttacagttgtgagagggaataccagctccggaagttgcagagtatcaataatcatctgcggattataagtagttgttcccaaatagcagattcccagtccggcttcttctgccaacgtacagaaggtctgggcaacaagcaaagtatccatggcggcattcataaaagacattaaattgtcatagcccggtacagcttttcgttgttcgcaccacttacaaaaacgacggaaatcggcacaaaaagtaagcacgaccggtgcattttttaccattggctggttaaaatgtgcaggcgaaagtttctccttcatttctgtatcacgcgtgacaattacactataaagttgcattcctcccattgtagaagcacggaaagaggtttcaagcaaatcatttaacaaatcgggagcgatatcttttggtagatatttccgaatagttcttctgttctttacggtttcaaacatatattttttttgcaaagatataaaaagaaaaattcattccgctatatcgacagaaaagaatagttttctttttggagaactttaacctttaaacctttctgcaatttcattgtttatcaactacttagcaatgacaaatggaaaacttgcaacctgttaataaattatttcatttttattttgatagatgaaaaaacattcttagatttgcaaccacatttgttaatgataagtaaacttctacacattacttattaaaaataaaatctaagacacataacatcgtggaaaaacaaatttattcttatgatgaagcctatgaagaatctttacgatattttcaaggcgatgagcttgctgccagggtttgggtaaacaaatacgcagtcaaggactctttcggaaatatttacgaaaagtctccggaagatatgcattggagaattgcaaatgaagtggcacgtatcgaatctaagtacccgaacggcctgactgcaaaggaactatatgatctattggatcatttcaaatatatcgttccccaaggcagcccgatgacaggcatcggtaatgattatcaggtggcttcattatccaactgcttcgtaatcggagtggacggcgccgcagactcttatggtgctatcatcaaaatcgacgaagaacaagtgcaattgatgaaaagacgtggtggtgtaggtcacgacctgtctcacatccgcccgaaaggttctcccgttaaaaactcggctcttacttctaccggccttgttccgttcatggaacgttattccaattcgacccgtgaagttgcccaggacggccgtcgtggcgcgttgatgttaagtgtgtctatcaaacatccggattccgaagcattcattgatgcaaaaatgacggaaggaaaggttaccggagcaaatgtatcagtcaaactggacgatgctttcatgcaggctgccgtagagggcaaaccttatgtacagcaatatcccattgacgctgccaatcctgcattcacaaaagaaatcgacgcttctaccctatggaagaagatcgtacataatgcatggaaatcagcagaaccgggtgtattgttctgggatacgattatccgtgaatctgtgcccgattgttatgctgatctgggttacaagacagtatctactaatccctgcggtgaaataccattgtgtccttacgattcttgccgattgctggctatcaatctatattcttatgtagtgaatccgttcaagccggacgcatattttgattttgatttattcaagaagcacgtggctctggctcagcgcatcatggatgatatcatcgacctcgaactggagaaaatcgagcgtatcatgaagaagattgatgaagatccggaaaacgaagaagtgaaacgtgcggaacgtgtactttgggaaaagatatataagaagagcggtcagggccgtcgtaccggtgtgggtatcactgccgaaggcgatatgcttgctgctttaggattgcgttatggtacggaagaagcaacagagttctctgagaaagtacataagacagtggctttgggtgcctatcgttcttctgtcgaaatggcaaaagagcgcggtgcttttgaaatctacaataacgaacgcgaacagaataatccgttcatcaaacgccttgccgaagctgatccggagctatatgcagaaatgaagaagtacggacgccgtaacattgcgtgtctgactatcgctcctaccggtacaaccagtttgatgacgcagaccacttcaggtatcgagcctgtattcctgcctgtttacaaacgtagaagaaaggtcaacccgaatgacaccaatgtacatgtggatttcgttgatgaaacaggagacgcattcgaggaatacattgtattccaccataagtttgttacatggatggaagcgaacggttatgatcctgccagacgctatacacaggaagaaattgacgaactggttgccaaatcaccttactataaagctacctccaatgacgtagactggttgatgaaagtgaagatgcagggaagaatccagaaatgggttgaccactctatcagtgtaactatcaatctgccgaacgatgtagacgaagatttagtgaaccggttatatgtagaagcatggaaatccggttgcaaaggctgtacggtatatcgtgacggttcacgttccggagtactgatttctacaaaatcagagaaaaaagaggaacttcctccttgcaaaccgcctacggtagtagaggtacgcccgaaagttttggaagctgacgttgtccgtttccagaacaacaaggaaaaatgggtggcatttgtcggattgctggacggacatccttatgagatctttaccggtttgcaggatgatgacgaaggtatcttgttgcctaagagtgtgacttgcgggcgtatcatcaagaatgtagacgaagatggaacaaaacgttatgacttccagtttgaaaacaaacgcggatataagactactattgaagggttgtccgaaaagttcaacaaagaatactggaattatgccaaattgatttccggcgtactccgctaccggatgccgattgaacaagtaatcaagctggtcggttcgctccagttgaacagcgaaagtatcaatacctggaaaaatggtgtggaacgtgcattgaagaaatacattcaggacggaacggaagccaaaggaaagaaatgcccgaactgcggcaacgaaactttggtttatcaggaaggctgtctgatttgtacgacttgcggcgcttccagatgcggataaacatactcgtatgttaattaatatataaacaaaaggttaaaaggagtccggtgcggctccttttattttttattcaaaaaaatgtcttatacttgcagtatcattagtatccaatcaaaatctaatatatatgattttatcatttaatatagaataccgcaccaactggggagaagaggtcagaattgccgggctgtctccggaatctgtccctttgcataccacagacggtatctactggacggcagaactggaattcgaagttcccaacgaaggattgacaattcattacaattaccagatagaacagaacggaattgtgacccgcaaagaatgggacagtttttcccgatgtcttttcctgtccggtacctccaagaagaaatatagaatcaatgactgctggaagaatattcccgagcaattatgcttttacagttctgcttttacagaagccctgctggcacatcctgaaagggaagaaattccgcaaagttacaaaaaagggctggttatcaaggcttatgctccgcgtatcaacaaggattactgcctggcaatctgcggcaatcaaaaggcattaggcaactggaatccggagaaggccgtcctcatgagtgatgcaaactttccggaatggcagatagaactggatgcaagtaaactgaagttcccgctggaatataagtttatcctctataacaaacaggaaaagaaagcggattgttgggagaagaatcctaaccggtatttagccgatccggaactaaagaccaacgagacactagtaatctccgaccggtatgtctatttcgatattcctgcatggaaaggagcaggtatggctatacccgtattttccttaaaatcagaaaagagcttcggagtcggggatttcggtgatctgaaacggttggttgactgggctgtatctactcatcagaaggtgatacagattctgccggtcaatgacacaacaatgacacacgcatggactgattcttatccttataatagtatttctatttatgcttttcacccgatgtatgcggatataaggcaaatgggaacgctcaaagacaaagaagcggtagcaaggttcaacaaaaaacaaaaagaattgaacagtctgccggccattgactatgaagcagtcaaccaaaccaaatgggagtattaccgcctattattccggcaggacggagaaaagacattatcttccaaaggtttcaaagagtttttcgatgccaataaagaatggttgcaaccgtatgctgttttcagttatttacgggatgcctacaaaacaccgaatttccgtgaatggcctaaatattctacttaccatgcaaaggagatagaaaagatgtgccagccggagacggcagattatccgcatatcgccctttacttttatattcagtatcatctgcatttgcagttattggccgctacccaatatgctcgcgagcaaggtgtcgcactgaaaggagatatccctatcggtatcagccggaatagtgtggaagcctggacggagccttattatttcaacctcaacggacaagcaggtgcacctcccgatgatttctcgataaacggacagaactggggattccctacctacaactgggatatcatggaagaggacggttaccgctggtggatgagacgtttccaaaaaatggcggaatacttcgatgcttaccggatcgaccatattctcggcttcttccgtatttgggaaataccgatgcacgctgtacacggcttattaggacaatttaccccttccctccctatgagccgggaagaaattgagagtttcggttttacattccgtgacgaatatctgcttccttatatccatgagtctttcctcggccaagtgttcgggccgcataccgaattcgtgaaacagaactttcttcaaacaactgatgtatccggtatctaccacatgaaaccgggatttgagacccaacgggaagtggaaaatttcttttccgacagaaaagatgaagacagtatttggattcgggaaggactttattctttaattagcaacgtactgtttgttccggacaagaaagaggaaggaaaatatcatccccgcatcggagtacagcgcgactttattttccgttcattgagtgaggtagaaaagaatgcttttaacaagctctatgaccagtattattatcaccggcacaatgcattctggcagcaacaggcaatgaagaagttaccacaactgacacaatccacccgtatgttagtttgcggagaagacttgggaatgattcccgattgcgttgcatcggtaatgaacgacttacgcatccttagcctggagattcagcgaatgcctaagaatccgttgcacgagttcggacatctgagcgaatatccataccgatctgtctgcacgatctctactcacgatatgtccactttacgtggttggtgggaagaagattaccaacagacccaacgttattataatacgattttgggacattatggtattgctccaactgttgcaacccccgaactatgcgaggaggtggtacgtaaccatctcaacagtaactcaattctctgtattctttccctgcaagactggttgtcgattgacggaaaatggagaaatcccaatgtgcaggaagaacggatcaacgtaccgtcgaacccgagaaattactggcgatatcgaatgcatctcacattggaacaactaatgaaggctaaagaacttaataagaagataggcgagcttatcaaatatacagggagagctccccaaaaataagactaaaataatgggagataccaagaataacatgaagataaacaacagtactatttttttaaaagatatccgttgctacgcctaccacggagtagcaccacaagagaatcttatcggaaatgagtatgtcattgacctgaaactcaaagtagatatcagcaaagccgcacaaacggatgaagtggcagatacagtcaactacgccgaagtacataatgtgataaaaaccgaaatggcgattccttccaaattgctggaacatgccggtggcagaatcgtacaaaaacttttcgagacatttcctgatattgaggaagtggagcttcgcctttctaagcggaatccacctatgggagcagacattgatgccgcaggtattgagttgtattgtagtagaaaataaaagggtatccagcttgggataccctacaaattatattctttctgcaattaatcttccggaagtttctatttcttcctctttcttctattcacagattccacagcctccgtcacgacaggcttattctcgaaacgtttcgtataaccggaatagtcgggatgaatacgttcgtaatcaggatccataaataaaggactggagattatatggtcagccgtcgaacggttacaacagaaaactatgttttccacacctgccagacgggttaatgcttttacatccgtatcatgcggttgcagtgtcatagggtcagtaaagaagaaaagataatcaatctgaccatctacaatgcgcgatcccatttgctggtcacctcccaggggaccggattttagaatcgtaaaatcccattcctcatccggatgtttctccttcagtgctttcaatattaaggtaccggtagtacctgtacaatagaatttatttcccattaatagttctgaattccataatacccattcgatgagatctttcttcatggcatcatgtgctaccagcccgataccttttctaacttttgattccatttcgttatccttttaagtccgacaattgagagaatcgtttgcatcctctcacataaaactgccacaagatactattttttgtccgttcaggtatcagatccaaccttttttttctcatattttcttcacgggaagaagaaaatgaaggacgaatctgcttatattctttccttgcacgcatcacggcacaagcattatcccaatcgcctttcagcaaaaaaacaaatgccgccacatagtccaggcaagcccggatacgcatcactttatttaactcctctgccgggagatttttatacaacatgacaaggttattacggaaattaagaaaggtctttcgggggttctcttttttaagtgtagccccacctacatgatagaccttactttgagggacacaaacaatctcccgtccgcgagagcgtaacctccagcacaaatcaatttcttccatgtgcgcaaagaaacgtccgtccagtccgcccacttccttataatcggcacgacgaataaccaaagccgcgcctgttgcccaaaaaacgggaatgaccttatcatactggccttcatccttctcaaccactcccattatacgtccacgacaaaagggataaccatatttatccagaaagccacctgccgccccggcatattcaaaatgatctttttgccgccagctccgtattttcggttggcaggcagcaacttccggatgaatatcaagatacgcaatcatcggttccaaccaatgttccgttacttcaacatccgaatttaaaagaacaacatagtcggcttccacctgctgcaaagccaagttgtatccgtctgcaaaaccatggttctgatccaatagaatcaccctaaccgaaggaaaatcctgtcggagcatctccaccgaagcgtccgtagaaccattatcagccacacaaacctctaccccctctcctttcgaataccggactaccgacggaagaaaagtgcgaagcatatcacacccattccaattcaaaatgactactgatactttcattgcttttgcttctctttcagcctttctttctcctgttccacgatgtccgcccattcttctctggaggctttccaacgcttatgcgaccacagccaataagccggctcccgacggattgtctgttccagataccgggcaaacatttcagtaatttctccttcggctgtattcttaggagtttccgtcatcaatttaaattccgcttcacagtatcctctgcgttttttagtcagttcacagtaaaagaccgggaaattcatcatcttggcaatccgttccgccccattcaagaaagctgtttcctgacctaaaaatgtagtccaatacctgtcattaccactaggccactggtcggttatcaaaccgacaaccattttctttccttcacgtttcaactttataatctcccgtgcagtagaatgcttaggaatattgtatcccccgaaacgagaacggatacgtttaaacagttcatccagatatttatctcttaatggcttatagacctgtacgggtacatctcccggcttcattattgctcccattccgatcaaccactcataattggcataatgcggaatcatcacaataatcccgccatacttctccgtcagttcgagatattgttccgtattcttgtaaatcatccgttggcaaagatcttcagccgacatgtgcagaagttttaagtcttcaagcatataatccgacagataacgatagaatttacgctctatctgcaacctttcagcgggagtcttttccgggaatgacttcgtcaagtttcctctgacaaccttacggcgatattttcccacataatacatcaacagataattgaaatccgaaagtatatacagaacccgaaaaggaagagctgaaaacagccacattccagtggataccagccaatagataaatctcgatttcatacttatatcagaattgtacctttaagtgctgtcttatcttcgttaaaatctcccaaacggacattgattacctgattatccaatgagttgtccgcttccacttcaacacggatatagttctccgtaaacccatgcatcggagtccccgcttttgatttttccattaaaaccgacattgtctgcccgatatgtcgggcgtaaaaagcctgcgttttctcatcagaaagcgctaacagccgctgactgcgctgatgtttttcttccggagaaacaacatagtctattttcaatgcctgcgtgccgggacgttcggaatagctaaacacatgcaactgtgtcacatccaatccggcgataaactgataagcctcctcgaagtattcctccgtctcgccgcgagtacccacaatcacatcaacaccgataaaagcatccggcatcacttccttaatctttttcaccttcgatgcgaaaagagcggtatcataacgacgacgcatcaatttcaacacctcatcgctaccggattgcaacggaatatgaaaatgaggcataaaactacgcgaacgggatacgaactcaataatttcgtctgtcagcagatttggctcaatggaagatatacggtaacgttctatgccctcaacctgatccaatgcttttacaagatcaaaaaaggtttctcctgttgtcttaccgaaatctccgatattgacacctgtcaatacaatttcttttccgccttcggcagcagcttgcccggcctgttccaccatagaagcgattgttccgttacggctacgcccacgggcaaaaggaatcgtacaatacgaacaaaaataatcacagccgtcctgcactttcaggaaaaagcgggtacggtctccacgggaacacgagggtgaaaatgaacggatatctttggttgcagtagtaaaagcctctccttcttcatgtttttgcaggttgccgagataccggagcaaatcacttttctgttcagcacccaacacgacatccactccttttatctgtgccacatcgccgggtttcagttgcgcatagcatccggtcactaccacaaaagcaccaggatgttgtttcaccaaccgatgaatggcctgccggcacttcttgtccgccatttccgtcaccgaacaggtatttaccacacaaatatctgctttttctcctttacgcacagttctgacccctgcttcacgcaagattttaccgatagttgaagtctctgaaaaattcaatttgcagcctaatgtataataaacggctgtcttattttgaaacacagtggtatctatcataagctgttataaacacatatttcgtgcaaagttacacattattattagtaaaacactttaggatacgaaagtttattcctatttttgcacaattcactaaaaaacgtgcaatgattaaagagaatttcattaaactatacgaaaacagttttcgtgagaattgggatttgccctgttacaccgattatggagaaaatacccaatatacgtatggtcaggtagccgaagaaatcgcccgtttacacctgttattcaaacattgtagcctccgaagaggagataagatctccgttatcggcaaaaataatgcccattggtgcatcgcctatatggcaacaattacatacggagcaattattgtccctatcttacaggacttttctccaaacgatgttcaccatattgtcaaccattccgaatcaactttcttattcaccagtgacaatatttgggataacctggaggaagaaaaactcaccggattgcgtggtgtattctcattaaccgatttccgttgtctctaccaacgggacggagaaaccatacagaaattcctgaagaatcttgataaagaaatgcattcttcttatccgcaaggattcagccgtgaaaatatacaatataccactttatccaacgataaagtaatgctcctaaactacacttccggaacgaccggtttcagtaaaggagtcatgctgacaggtaacaacctggcaggaaacgtcactttcggtattcggaccgagttactgaaaaagggagataaagtgctttctttcctcccgctcgctcatgcatacggctgtgcatttgattttctgacagcgacagcagtcggaacccatgtcaccttgctcggtaaaatcccttctcccaaaatcattatgaaggccttcgaggaggtgaaacccaatttgattatcactgttccattagtcatcgaaaaaatatacaagaacatcattcagccgctcattaataagaaaggtatgaagtgggcactcaacatccccttgcttgatacgcaaatctacaatcagatacgcaaaaaactgattgatgcgctgggtggccgtttcaaagagattattatcggcggcgcagctatggacaaagaagtggaagaatttttctacaaaataaaattcccttttactattggttatggaatgacagagtgtggtccccttatcagttatgctccatggaatgagttcgttctaggctcctccggaaagattctggatattatggaggcacgcatctacaaggaaagcccggaggcagaaaccggagaaatacaagtccggggcgagaatgtaatggtgggatattataagaatcccgaagctacaaacgaagtattcaccgaagacggctggctacgtaccggcgacctcggcacaatggatgcaaacggcaacatcttcattcgcggacgattgaaaacaatgattttaagttcaagcgggcagaacatcttccccgaagaactggaaaccaaactcaacaacctgccttttatccttgaaagccttgttatcgagtacaacaagaaattggtggcacttgtttatgctgattatgaagcattggactctctcgggttgaacaatccggataatctgaaaacaattatggatgaaaatctgaagaatctgaataacagtgtggctgcttatgaaaaaatcagcaaaatccagctatatcctacagaatttgaaaagactccgaaacggagtatcaaaagatatctatataacagtattacaatagattagcatgttttaaaacataaagcgaaggtgtattaaccaaccttccgaaaaaaaacataaaaaaagttggcttttagagaacaacatattgaaaaagtacatacctttgcagcgttttaataaagcaattgattgtattacgtttttaaaaagcaaagaaaatgaaaaaattagttttaatggcagtagctatcgtagctgtatcattcgcatcatgtggtaacaaagcagcagacgctgcaaaagcaactgcagattctatccgtatcgctgactcaatcgcagcagtagaagcagcagcagctgaagaagcagcagccgcagcagcagctgatacattggcaactgatagcgtagcagctgaaacagctgaataattcagaaactgctagagagaattgaaagtctgacatgcgaaagcatgcacagacttttttttatatcttaaatccaagtaattacgctatttagtataggacttctctacaaaaggagcatttaataaataatcaaggctcacctctacgctttcctctaccggcatactatatttttctatctcagcaacaagatattgaactcccgctgtctttgcattcttaaagatagcatcaaaaccgaccattccactttgcccgatttctctatgatctttgatatggaatatcttgaacctaccgggatacttattaaagtaatctaccggactgttttgtccgcgaacgacccaataaacatccatttggaagaaaacatattcaggattcgtatgttccagcatatagtcatacatcacctgaccttccactttctgaaattcatgcgcatgattatgatagccaaaccgcaagccttgttggttgcagcgcttacctatttcattgtaataagcacaataagtttccaaatccttcaatgttttaggaacatccatccagggagctacgatatatttcattcctgctgccttatggtcggcgatacactgattccaccattcaagtgattttgaataatcaccggaagccagttcctctttcgacaatccacgtgtgcaatgcgaagacaaaactttcattccggccgattcgacatccttcttgaattgtcggggagttctatcataaaattttccattattataattagccgcttcaacaccggtatatcccatttttgccaatttcgcgagaatggcagtataagccggatcacattttccgtccttattgtctaccctattcaatatatctctaacagaatagagctgaatagccacttctttcttagttttcttagtctgtgccgtcactgcaaccggaatcatcagaagagcagctaacacacataagcaaattcgagtcttcatataattagatatcagaagtttacaatgattcaaattccacaagcaaacaaacataaattcattcacttgcggaatttcgagttatctatgtgattagtccaataccttcacgcggatattacggaaccaaacatcatcgccgtgatcctgcaatccgataaaaccttcgtgattatcaccaccacagttattcagcagttcaaatgccaaaggccatttttcttcactaaatttacttgcctgcaacatatcagtccattgttttgtccacagatgatactcaagtacattctcatcattttgtccatggacaactgtacctttataaaccataatcttagccttgttccattcaccgaacggcttggagttttgaggaactgccggaatcatgtcatacaaagaagccgactgacgattgttatccttacccaattttgcatccggatgattggcattatccaaaatctgatattcaggtgcagaaatatagataggttcaagcacatcattcccgtctttatccttagaagtaatttcctgagctaaatacaagataccggaattactacctttagcaaccttccactccaactccaattcaaagtttttaaacttatgagcaaaaatcaggtcgccgccatcagcgtcttgcgcttcaccgccaccggttccgttaaatttgatacaaccgtcttcaatagtccatttagcaggaactttgtcttttccataaccacgccatccgtcaaacgtcttaccatcaaagatcgtgatgtaaccgttttcatcaacaggcaatttcagactatccgtttcgggtgctttcaatgattttgaatatgccaatgctacttcattgggttgatcggcctgagcacttcctgatttctgaccaccgcaagcaaccaaggctcctgctgcaagacaagctaaagggtaaaatactttcttcatactaatagttatttaatttttaatcttttaatttctttcatctattcttaccgaggcatatcgggcaatctccacccttcacgataattatgtttcaccaactcggcagcaaactgttttgcattaaccggatctgtccaagtcttgtcaaatgtcgggtgaccgtcgtgaatcttgaatccgtcttttacacaagttctaagagtttccgtatcactgatattcgtaaagcacatattgacaccgtcccattccaacgttttgttcaaaccctgcaagcggatagccaatactcccatcactaccatttcattcatcggacctgcctccgagaagtcagacttagtcatgacgcggcttgacttatcttctttacaggcacgtacccaatccatttcgtgaccaccattcatcgcattcggtacacggcggcaaactttcggagcattcggcacgcggcccgacaacaagaatggctgctgaccgtaacatccacagatcaatgtatcttttgttccgtgaaaaatagtcagcccaccaccaggccccattagctgttttccttccggaaatcctttcggacgttcaggcatcataccaccgtcataccaatgaacttcaacttccggcaacgcaactttcggcatattatcacgggcagggaaaatcattttcacatgctgtgcctgcggagcacaagcactcaacaacaaagtagaagaaccttccacctttgtagggtagcccagtttcagagctctgaacggttgatgcaggatatgacaagccatgtcacccaacgcacctgttccatagtcccaccagccgcgccaattccaaggatgataaatttcattatacggattcaacttagccggaccggtaaataagtcccagttcaaggtaccaggaatacggtccgccttttctggagcatttagtccttgcggccagataggacggtcagtagcacattccaccttagtcacttcacctatctcaccattccatatccattcacaaactaaatctgtcccttcatcggatgctccctgattacccatttgagtggctacaccagtcgaagcagctaatttagtcaacaaacgagattcataaacagagtgagtcaagggtttctggcagaatacatgtttacccattgtcattgcatcggcagtgatgatagcatgcgtatgatcggcagtagcaataattaccccatcaatggatttacccatttcctcatacatcttacggtaatcccagtatttctttgctttcggaaattcatcgaataccctttttgcatatttccagtccacatcacaaagagccacaatgttttccgtaccctttactttattgatattggcatgccccatgccaccaatacctacggctgcaatatttaatttatcactgggagacacgtgtccgtggctcatacctagaatagagcttggagcaatggtaatgcctgccaaagccatagcgcccgttttaagaaaatctcttctcgaaatgtctgacataattagtaattttaagggtttgttatttgtggtagattactatgtagcaatccgtatccatttttcatattttttcttcgttcccggatttgttcaagcgtacgcagatcaccgatagccggtaaatcgtgcatatgtgcgttttggaggaatttccatgcatattcggatgcaatagcagagtcgcgcaataatggtaagcgcgggtcccgttgcccggcttcgatagaatcggcaaacaaatcacacaatacatcaatatttttgccaccgaaaggtttctcaacgcgaagtgtctggttcaccccatgcaaatcgactacagcggtagtaaagtcatgtgtcatgcgtacaatgccctctgttccgataatatcgacgtatgaattatgtgtctggtctttagataattgtccataaacgaacccctgcgtaatatcaaaaactactccattctgaaaagtcccgtgacattgaatccaccatgggtctttgtaattccacatattcactccttgggcgttccatgtccgatattcacatccggcatacgaacgggcaatatctacataatgcatgccacaatcatggaaagcaggaccttcatattcatgcccttcacccggtgctaatccaggcgtcatgtggcaaatacgaataatagccaactcaccgatttcgccctgccgaatatattctttcatcaggttatgataccaggaatttcgcagatacaaattcaccgtagaaaagacatctgaactttcggccatttccacgactttccattcattttccattgtatctgcaacaggcttttctgcaatgatatgttttccatatcgaatggccttttctatttgttccattcgggagtcagctaatgtaaaaagcccgacaacctgcacactttcatcttcaaaaattttctgattatcttctattacataagattccggagataattcttttgccaattcacgtgatgcaggattcgtatcacaaatataggcaatatcccatcggccacttttccgcatcgcatcccagtagaatcttcccattctaccaaagccgattattcctacttttattttcgtgcctagcgagaattgtgtattcataaaacatagcaaatttaagtgcaaacaatataaatcggtcaattttcattatcaagctaattaaccggaaactgatattgcaaaactagccaaataaacaatacttcatttagcttacacgaatttatgtagacttaaaaaatatattatcacttaataatcaatacattaagcattcaaaggagggataaaaatgtagaaagattggaattttttttgtgtggttcgaggtttatctttcatctatgagacaaattttcataatttcattttcaaattcatcccgatcaacagcagatttattcctcatttttgtacgatagttgtaaacagtactagtagagcaacgaaggaaatttgctatcttcccactatccgaaattcccaaacgtaacaaggcatagatacgaagttccctattcaataatgtatcagtttttaagacaatccgttcttcttctttcaacaaagcattgaaatcggaaacaaaagtgggatacaaattaagaaacaccctatcaaaacgggcatataatgcgttaagttcctcatcaataagtgccgacgattttaacttcttaattagttcatcataatatttattgatagcatatttatacagaacattctgatatttctccattttactgatataactgaaacatacatcaaaaaactcagctatataatgttcctttatattattagtttccgacaactgattattctgttcgttcaactgattattcatagtattcagtttctcgttcaatcgcaaaagtttttcattactctgcaccaacgcccgctttatcttcagaatctttctcatctgaatataaatacatatcaccaacaagaccaaaagaaaaagaatgatactggttgaaataagaaaagtaatcaaatttgattttgaccgagcctcctctgtctggtaagcagtattaataatagaatagaacttataaatttccattgcacggaaatgaataccggaagaaacaacatcatcaatagcagactgtgtaaacttaaaagcgtcagacaaattcttttcttcgtactgtatcaatgccaatgcttgcaaggaagcggtttcccgtgttgcgttccggatatccgcaatagcagacatcatcaggtacttttttctctcatccatttttttctgatgccagcagaatgatgcatacgcatgagtaatcatggcataatgaggcgtccccacttcctccgtatctaataattcctgaagaactgttttcgcttttatggaatcgcgccctccataataatatgcccgggataatttataatcaaaagaagtttgatccagaagagatagtaatgaatcctgatatactgcccgctgcttcccatagcgactattggcagtgatagagtaatactcccagaaacgggaataagtttcataataaacagataataaatctttggaaagttctgaggtttttattttttccaaaatcaactccgcatccctataccgaccgcacatagaatataaaagactaagctgcaaagatgactggttctttaaatccctgttattcaatttacgggcaatctctaaattctgatcgacataatgaatggccgaatcaacgacaaacttcttatattcgttacataactgaaaatttatcttatatttttgttcaagagtcaggcctgatcccttcagcagacatttaatccgattgatccgttgctctttttgttgaatgaagagtggtttttcatctatcatcctgcgcaatgaatccgctagggagttcaattcatcattcgcataaagagcactgccaattcctaaagtaatcagcagaagcaaaaatttcttcttcagaaaacgacatttgaatctcataatattagcaggaataataaaaaaagcgatttattcatcagaacaaatcgcttttcgtatatgaagtaaatttgctcttattctgcaactacttcgaaaggaatttcaacagaaacttctttgtgaagtttcactactgctttgtagttacctacttctttcacagcgtcttttacaacgatgatctttctgtcaacttcgtgacccagcttagccaaagcttcagcaatctggatattgccaacagaaccgaagatagtaccggttgaacttactttagttgcaatagtcaaagaaacaccttccaacttagcagctgttgcctcagcatctttcttgattttctcaagtttgtgagcacgctgtttcagttcttcagccaacattttctttgcagaaggagaagcgatcaccgcttttccggttgggatcagataattacgaccgtatccggatttcacgtttacgatatcgttcttataacccaagtttacaatgtcttcttttaatataatttccatacttttcctccttcttatttcatcatgtcagttacataaggcaacaatgccaagtgacgagctctcttcacagcctgcgcgatacggcgttgaaacttcaaagaagtacccgtgatacgacgcggaaggattttaccttgttcattcaagaatttcttcaagaattcaggatctttgtagtcgatgtacttaataccgctctttttgaaacggcagtattttttcttcttaacgtctactgacggcggagttaaatatctgatttctgattgaacttgttgtgccatgattaatcctcctttttgtttgatttaacacttcttcttttagcagcatattctgcagcatacttatccatcttaaaagtcaagaaacggataacgcgttcatcacgacggaaattaacttccaacttgtcaattacagtaggatctgcattgaactcaatcagttgataaaaacctgtagactttttctgaattggataagccaatttcttcagtccccagttttcttcattgataatctcagcaccttcagcttgaagaatacctttgaatttttctaccgcttccttcatctgaacatcagataaaacgggagttaaaatgaaaacggtttcgtattgattcatacttcgtttaattaaataaataaattatttgattttaaatgcgggtgcaaagttagacaatttattttgaactacaaacatttaatctttttttgtatccgaatgtaggaattatccgagaagtggcttacctttgcaaagttgtttaaacaataatttcatgatagagcaatttaactttgatatccggcttatattcgccatactgaatggcaaagtttccgcagcaatcaatcggaaactataccgtaacttccgtcagaacggattggagatcagtccggaacagtggacagtgcttatttttctatgggaaaaagacggtgttacccaacaagagttgtgtaatgcaacttttaaagacaaacccagtatgacccgcttgatagataatatggaacgccaacaccttgtcgtgcgcatttccgataaaaaagaccgtcgtaccaacctgatccacctgaccaaagacgggaaggagttggaagaaaaggcgcgtatcatagcagggcaaacactgaaagaggcactccatggtatcaccctcgaagaactgagtatcgggcaggaagtgttgaaaaaggtattcttcaacacgaaagattaaactgtaaaacaaccacacaattcataaaatccactaaatcctgtctttataatggattttttatccaaataatttcgcccgttaaagaattatgctttaatttgtgactggaatataataatctattaaaatacacacacatgaaaggcttattaaagaacttaggattgatattaatcttgatcggagtagttatcctactggcttgttcatttacaggcaatgtaaacaacaacgccattctgggtacctcagtagtactggtagtactgggactcatttcttatatcgttattaataagaagatcgctgattaatttcgtagaaatcaataaaaaatcccgaaaacaaatgtttccgggattttttatttccagctatcggatgtcttttcattaagattcaacctccggtgtaattaacttgtaaccctttccgtgaatattgataatctcaatagaatcatcttctttcaagtgcttacgcaatttcgtaatatacacgtccatactacgtgcattgaaatagttatcgtcaatccaaattgttttcaaagcaaagtcacgttgcagaatctcatttgcatgtgcgcaaagcaagcctagcaattcagattctttcgtagtcaacttagtttgtttaccttccgtagccagaatttgcttctgagtgtcaaaagtaaacttaccaatcttatagatattgctttctttgttcttctttccacgaacacgtctcaagattgcttcaattctaaatgtcaattcttccatactgaacggtttggtgatataatcatccgcaccaatcttaaatccttccaggatatcttctttcagcgttttagctgtcaggaagataataggaatttcagcattcgctgcacggacatcttgtgccagagtgaagccatcttttttaggcatcataacgtcaaatacacacaagtcatatttattcttcaagaaagccttataaccggcttctccatcaggatataactcagcagaataaccttttgcctgtaaatattctcttaaaagcatgccaagattttcgtcatcctcgcataataaaatacgcagtttctcgtccatatcaattattttttaataaaggtaatgcaataataaatttagttcccacgttcaggtcactttccgcccggatcgtccccttatgttctacgataattttcttcacataagccaatcctaaaccaaagcccttcacatcgtgcagattacctgtatgtacacgatagaacttttcaaatatctttttcaggttctccttcttgataccaataccgttgtcctgtatcgaaatcatcagtttacccgactcattccacgttcttactttcagttccaaatcctcttccggcttcttatatttcaccgcattatccatcagattaaagattacatttgtaatatgcatctcatccgcaaatataacaggatcagtagcctcaaggttcgatgttatcttaccattataccgttccaccttcaatgcaaaagtgttgacaactcccgtaatcaattcgttcgcatcaatctctttcatcttcaaagtcgccttctgacggtcgaacatcgacatctgaagcactttttccacttggaaacgcaacctcttggtttcatcattaatgactcccgatatatgctggaacatctgtggagatttacctaccgccggatctttcaacatttgtgccgccaaggaaatggtcgatatcggtgtcttaaattcatgtgtcatattattgataaagtcattcttcatctccgtcagcttcttctgccggaatacgatataaatcgtaaagataaatgtcaccaacaataccagcgtaaatatcaacgacggaatcatgaagctcaccgaatcaaagagataatcccttctccccggaaaatgaactttcaaaacactcgtctttgcaggtggatcattcttaaacaatgcctgctgataagcctcatcacttcctttctcttcatagtccgcacaacgataaacacttcgtccttctttatcaagcacttcataatggaaaggcagatctataccattattatataaattcgcttgcaaataaccgttcaaatccccgaaccgaacccgttctccaattgatttgtcacttgcacgcctaatcatatccaagaccacctcatccagcaaagcccgctgatacatatagcgattcttaatagcctccaacatcgaattagaagtctggggaatcgtatttcgcccacgtaccattactttaggaagttcggacggtttgatagtcattactctcatttcaaaatcagaaataatttttccatcccgtgacttcactttgaatcgttgtgttgactgaaccacatcatcctgtcttaatgaagaattattctcagtcagagcttttctttctgcttctgtaatatcttcaaccaaccaacgctgggtttcagcatattctacatccttggaaacctggctcaaactattgcgtacagccgagtcaaactgttccttccgggttttcatcatttcctctatataacttacctgcaaatacagcaggctaaggaaggaaagccccattacaatacctaatatccaaattgttgacttcttcatagcaacaaaattaacactccctaattaacactcctaacacattaacttgatttaaccggaactttccggaaattaaccgtaagaggttatttaggttgtattctgattactacaacaataaaaccccttctttggtttgcaaatttaataaaaaattaaatcttttccttgcgtttttctatctttattaatcatagttaaacaaaaaccgtcgtcttttacttaaaaaagacgacggttttaacagtatcaagagaattactagttattcttctgtctgtttagcttcaaaatccttaatcaacttatcctgaacatctgtcggaacaagctcataactagagaacttcataatgaacgaagcacggccgccggtcagcgaactaagagcagtagagtaagatgacatttccttcaaaggtactttagccactagcttttcaaaacctttttcactactcatacccataatcatggcacgacgtccctggagatcccccattacatcacccattttatcagacggcacaaatacttctacatcataaatcggttccaaaatcttcgggcctgcatttttgaaggcttcgctgaaagcattacgccctgcaagcatgaaagaaatttcatttgaatctaccgggtgcatctttccatcgtacacaataacacgaacgtcacgagcatacgaacctgtcaacgggccttgctccatacgtgccataatacctttcaggatagcaggtaagaaacgggcatcgatagaaccacctacgatactattaataaacaccagtttaccaccccattccaacggcacttcttcggtacctttcacatttatcttaaattcctgtccgttaaacttatatgtatcgggcacaggcataccttctttgtaaggttctacaatgagatgcacttcaccgaactgaccggcaccaccagactgttttttgtggcgataatctgcacgggcagcttttgtgatcgtttcacgatacggaatcttcggttcttcatatttcacctgaagtttctcgttattttccagacgccatttcaaagtacgtagatggaattcaccctgtccgtgcaccagcgtttgcttcagttcttttgattgttcaattacccatgtcggatcttcctcgcgcatgcggttcaagatagtcatcatcttttccacatcagcctcgttcacaggtttgatcgcacgggaatattttgaattcggatatttgataaaattaaacttataatcgcagtccttcccgttcagggtattacccgttttcacgtctttcagtttcacggcagcaccaatatcaccggcttgcagttcttccactttcacacggttgccaccggctacgacataaatctgtgcaatgcgttctttcgaaccgcggtccgcattcaacaagtcgtctccttcgcgcactttaccactcattactttaaagtaggaaacttcaccgatatgcggttctacacttgtcttgaagaaatagagagattccggaccgttaacatccggagccacttctttaccttccgtattctgtactttcggcatttcggaaacaaaaggaacaacatttcccaaaaattccattaaacgacgaacacccatgtccttacctccacagacacagaataccgggaacatacctcttgcaaccaatcctttacgaatgccttcacgcatttcgtcttccgaaagagagtcttgttcgaagaacttttccattagcccttcatcattttcggcagcagcctccaccaatgctttatgcatttccgtagccttttccagttcttcggcaggaatatcttcaatcacaggagccccaccctcgggtttccacgaatatttcttcatcaacagtacatcaatcaaagcattgaaaccaggaccggtagaaataggatattggataggaacaactttagagccataagcttcttttaattgttccaggatattatcatagtcgcatttttcgttatcaagctggttgactagaaaaataacaggtttattcagtttttctgtatatcggaagtgattttgcgtaccgacttcgacgccgtattggccattaagaagaataattgctgtgtcggtcacatttaatgcagttacagtactgcctacaaagtcgtccgagcccggacaatctataatattgagttttttattgttccattctacgtggagaacggtggagaaaacggagtaaccatactcttgttcaacagggaaataatcactaacagtgttttttgcggcaatagatccgcgacgttttataacaccactctcgaaaagcatcgcttccacgagagtggttttcccagagccagaacttcccaacaaggcaatgttcttgatttcattagtctgatatactttcataatacacaagatttaaataattacttagtatgactcacataccattcatttagtgttgcgcaaattagggatttattgggggaaaaacaacatttagggcagtgttactaaacaatgttatgtagcatatacttaacatgaacaattccgcttagtataaatttgcttcctcaacagaaacaatttaacagttcattacctattcggaaatattcatatacagcggcgttttgtgttaagagaaaacaattctttgatatattatccgataatagtcttacttttgcacctacaaaactcaaacagcatagctatggcaggtatctatcttcatattcctttctgcaagacccgttgcatctattgtgatttttactcgactacccgtagtgaactaataacacgctatatacacgccctatgcaatgaactggaaatgaagaaagaatatttgaaagaggaaaagatagaaactgtttatttcggcggcggcactccttcccaattaggagaagaagatttccaacaaatatttaaagccatacaaaagcattacggactggaagattgccgggagattaccctggaagccaatccggacgatttatcaaaagaatacctgcaaatgctatcggctcttcccttcaaccgcatcagtatgggaatacaaactttcgatgacgcaactctcaaattattgaaacgccgccataatgcccggactgccaccgaggccgtccgcagatgccgggaagccggttatcaaaatatcagtatcgacctcatatacggactgccgggagaaaccaaggaacggtgggagaaggatcttcgacaagctatcagcctgaatgtagaacacatttccgcttatcatctgatttatgaagaagatacacctatatataatatgttgaagcaacatcaaatatgtgaagtagacgaagattccagtctggagtttttcacgctactgatagaatatcttcaaaaggcaggatacgaacactacgaaatatccaacttctgtcgtcccggctactattcccgtcacaacacttcatattggaaaggaattccttatttaggatgcggaccttctgcacattctttcaatggaacaacacgcgaatggaacatttcttctatcgaccgctatataaaaggtattgaagaagggcaacgggtcttcgaaaccgagtatctcggcccgatcacccgttacaacgaatttattatcaccaccatgcgtaccgtatggggtacccccatagaaaagctaaaacaactgttcgggattgagatgtgggagtattgccggaaaatggcaactccctacctgaaaaacggcaaattggaagaatacgagggcgctttacgcctgacccgtgaagggattttcatttccgatagtattatgagcgatttactctgggtagactaaaaaactaaactataagccgatgaccgaatctgaagttagaaagttattacggcaaatgaaggagcaggattcgcaaactgctttccgcgacttctacgacatgacttatgaccgtcttttccgtatagcctactattacgtaaagcaagaggaatggtcacaagaaatcgtacttgatgtttttctccgactctggaaacaacgggacacactgctcgatgtaagaaacatcgaggattattgtttcattctagtcaaaaacgcttcactcaactatctggagaaggaatcaaagtacaccactgtccattcttcttgcttgccggaaccgcaggaacaaagttgttcacccgaggagacattaattaccgaagaattattcgctctttacgtcaaggcgcttgaccgcttgccggaacgttgccgtgaagtcttcatccgtatccgagaggaacatcaaagttatgcccaagtagccgaggagctcggtattagcaccaaaaccgtagatgcccaacttcagaaagctgtcagccggttgaaggaaatgattgcaagcagtcagatagaaagttattaagaagaaaatggaatacgtttatatttaacctttatttgctaaatacgaatagggaaattctggttacctccggtctttatcaacaaataaaccgaatagaatatgaagtataccgatacagaattggaaacgatactaagcaagctcatcgcttccacacgctcgccacgtgggcgcttttcagcagtagccagctatccgcagttggaaaagcgactaaaaccacatatccggtgtttattcccgacgcgtatgcgtatattggcagcagcggcagctgttattctgctctgtctttcggtaggaacagtatatttatatatgcaaccgacttcactccaaacagtatccacaatggccgaaacacgtaatgtcatcctgcccgacggcagttctgtactgttgaaccgtcattcgtcgctatcctatccgaagcggttcaagtcggacaaccgggaagtacaactcaccggagaagcctattttgaggttagcaaagaccagaagcacccgtttatcgtacagaccgagcacatcaacgtacaagtgttgggaactcacttcaatgtggacgcctatcgtaacaacccggaggtaaagactactttattgacaggttcggtagcagtcagcaataaaagtaattctgtccgcatgattttgaaaccgaatgaaattgctatatataataaggtgggaaataaactgacccgtcaggtgacgaaaaatgcaaaagatgaaatttcctggcgagacggggagtttatattcgacaatcttcccttaggagagatcgcccgcgaactgtccaattcattcgatacaccgattcatattgccgacacgtcactacaaagctatcggatttcggcacgattccgcaatggagaagacttggaaacaattttatctgtactacaccatgcaggttatttcaactattcacaaaataataaacagattgtcattaccactaaaccagacttaaaatgaagataatttcccaagattacctgcctgtcagaacattcatcctgataggcatagtactccttaccactacacagacgtacgcccaaaatacaaatacacgtctttcgtttacactgaaaaatgccactctcaaagaattcgtcaaattgattgaaaattcaaccgggtattcttttatctatggtgaagaagtgggtatcaggcacaaaattacactgaaagcaaaagagatgcccttgcatgaggtgttggacactgtgtttaaagacgaacttataagctatcaattctccggacgctacatcctactgaaagagaaaaaaggacaaaagcccgtaagccgcaagtttactatcagcggatatgtcactgacgggacgtcttccgagacgttgattggcagtaacatcattgagagtcatcaatatcagggaaccaccaccaatccttacggcttttacagtatcacactgcctgaaggagaaaccgaactgcgtttctcctatctgggctatgctacggaaacacgcaaattcactctttccaaagatactctgctgaatatccgtatgcagggaaatacgcaactggaagaagttatcattatttccgacaaagctgaagccggagcaatagccacgcaaatgggtgccgtagagattccaatggcacaaataaaaaacaccccaagcatattgggagaggcagacgtgatgaaaaccattcaacttatgcccggagtacaagccggagtggacggttccgccggattgtatatacgcggaggaagtcccgaccagaaccttatcctgctggacggaacacctgtatataatgtagaccatttgttcggctttttctccgtctttacccccgaagcggtgaaaaaggtcactttgtttaaaagttcctttcccgctcgcttcggcggacgactttcctccgttatcgatgtacgtaccaacgatggagatatgcagaaataccacggtacgttcagtatcggactgctaaccagcaagattaacctggaagggcctatcatcaaaggaaaaacatcattcaatatttcagcacgtcgctcctatctggacttactggcaaagcctttcatgccggatgatgaaaaatacagttattacttttatgacatgaatgcaaaaattaatcataagttttctgaccggagtcggatgttcctaagtgcttaccacgggaaagaccattttgcagccgattatgacggtaataccgactttaaggacggaagtaatatggggtggggaaacacgattgtttccgcccgatggaactatattttcaataaccagttattcagcaatacaacagtttcctataacaactatttattcgacgttaacacatacaccaataaccagtattctaccggtgcgggagcaatcattctcaaccgttattcctccaattatcattccggtattaccgactggagttaccagattgacttcgattataatccaacgcctgcccatcatataaaattcggcaccggctatcttttccaccgttttcaaccggacgtaacgacttctgtcatctcagacaaaaccgataacagaatagacagggataccacttatcataatgcaaacaacagcaggattcatgcacacgaagttacagcctatgcggaagataacttcaagattggttcccgcctccggctgaatctaggcctgcacctttccctgtttcacgtacaagatcagaattatctctccttacagccacgcatttcggcacgttatcaacttaataaggatattactatcaaagcatcttatacaaaaatgaaccaatatgtgcatttgttgtcgtccatgcctatcgccatgcccacggatttatgggtccctgtcacaaaaaaaataaagccgatgcgttctcaccaatatgctttaggcggatattacacaggtataaacggttgggagttctcggtagaaggttactacaaagatatgcgcaatgtactcgaatacaaagacggtgtcagtttcttcggttcttcctccggctgggaaaataaggtagaaatgggaaaaggacgatcggcaggaattgagtttatggcacaaaagacagcaggaaagacaaccggatggctgtcatacactctttcaaaaagtgaccgtaagtttacgaaaggaggcataaacaacggtgagtggtttccatataaatatgaccgccgccatagcattaacctcactattaatcataagttcagcgaccgtattgatattggagcctcttgggtattctacacgggaggcaccagtaccattccggaagagaagactactgttatccgtcctcacaatggtgcaaacaacggttttctatggtatggaacctacgataataccaatagttcacctactatcggagatgtgtcttacatagaacatcgtaacaacttccgcctccctgcaagccaccgcctcaacttgggagtgaacttcaataaaaagaccaaacacggtatgcgaacctggaatatcagtctatacaatgcatacaacgccatgaatccggcatgggtataccgaggccacaacaaacaaggactaagcgttatcaagaaatacaccttacttccactgattccttcttttacttatacttataaattttgaatatgaaaactattttttacctatctatactgttcgttacagtcacaatgatgtcgtcctgcgagaatgagttacccttcaacatcaacaataatccgcccaaactagtgatgaatgctttgattaatgcggagagcacggataatcttcttttcctcaacttcacaagtaaagaaaatagtactcatgtacaaaatgtaaccgtagaggtacgtatcaacggcgaactaaaagagagccttcgccctctcccacccgagacggaaggtaatccacaatgcagattcggcattacttcccgatttacccccggagacgcagtgcgcattgacgctattaccgacgacggacaatatcatgcatggacggaaatcaacgttccccaacgccctttcgaaatagaaaatgtcgatactgtcaccgttccgcttgcacaaagcggatataccacagaatatctgcgctatcggattacgatcaacgaccgtcccaatgaaacaaactattaccgtatcgtgatagataagcagactacactttggggatataaccacgaagaaggaggagacgattacatctattggacaaaacacagttataacttcattggccgcgaggatgtcgttcttacagacggacaacccaccaccggtgatgatgaagataacggactattcgatacagctaaaaatatttatggtgtattcgacgacacccggttcagaaacacttcctacactatgacagtttacaacaatactaaaatcgaaacaggtagcgattccggatatttctcaggaatggacgtcattatccgcttgatgagtatcacagaaacggaatattactacctgaaagcacttaatttagtagactccgacgcttacgatgaaacaatcaacgaaccgatcaaatatcccagcaatgtgcacggaggtacaggaatggtaggaatcagcacggaagttactcagacgattcatattataagtagctctcactcaaaaggtaaccttgctccaccagtccacgtttatcagtaagctccaacaatacgccctcacgaatcagagtgagccggttaacaacttccagcacttttccgtaattatgatcgctgatcacaatccctttatttaccgaatgcttttttatcagctctatcagtttatccgccaaatgaaaagataaataatcaaacggctcatccaacaatacgaatttagtgtcgccaagcaacagtaacttggcttccagatatctccgttcacctccggaaagctgtgagacacgtcggtccatacacgattgtgccacttcatcatctttataaaaatcagacacgacatccgtatccaaataataacgtaccaattgtttcattttttgatgtttaggcagataaccttgctgcggcaagaaagcaatcgttccggaatgtcggtaaggagccggaagaattttgcatccatccaagcggataaacttcctgtcggctttcattgtaccgaatataatttgcataagtacggatttccccgtgccatttctgccgaacaatccgatgacgtctcccgtattgattctcaggtagacatccgacagtagttgccaggtaccgaagttcttgataacactatctatttcaagcaaatgatgcataatttcataatccagagaatgaaccaataaacagcaaatacggaaattatcaaattccgcttcggaataccggaattataataaaaatagtaggcttccttttcaagaatttccttgtaaagcaaacttgcaacaatacccaatccccctaacatataaggaaaaggttcaaaaaatatactccaatcccactttactataagaagactggccaacacggagaaaggtacattgattttcaacgtactgaagaaaaacaaataatatagttttatcctccgcatttatcttgtattgatttgctgccaaatatattaataaaatagggaatcttactacaatcggtcctcctatttcagcttttaccttaaattctccaacaactccttcatccgaaagaaagttcccgacagttttaattaggagcaaagcactttttcaactatctttgcaaccaaaaacgagtacagactatgtttatcatcattggaattatgctgacggggatgctgtttggttatctattacgtagcaaacgtctcacgtggatacataaaataatcactttccttatatgggtactgctatttctgctaggtattgatgtaggtggcaatgatattattgtcaaaggattgcatacattaggactcgaagcacttattattacgctggcagcggttatcggcagcacattattcgcctgggggctctggtacttattgtatataaggaatagaggaaaggagacgaaagcatgaaaggcagcctgattatcgtctcattctttatcgtgggtaccctgtgcggattctttcatctgattccttacgactttactgacagtaaacttagttattatgctctctgcggtttgatgttctgtgtaggtaccagcatcggaaatgatccgaacaccctgaaaagtttccgctcactgaatccccgtctcatgttcctgcctatcatgacaatactgggtacactggcagggtgtgccgtagcaggcttcttcatgagtcaacgttcatcatcagaatgtatggcaataggagcaggattcggctattattcgctttccagtatattcatcaccgaatacaaaggaccggaattggggactattgcattgctctccaatatcatgcgtgaaattacagccttactcggagcgcctttactagtgaaatatttcggaaaactagcccctatttctgttggtggagctacaactatggatactacgcttccaatcatcacccgatgttccggaaaagaatttgtcattatttctatctttcatggttttgtggtagacttcagcgttcctttcctggtcacattcttttgttcaatttcattctaataaaaatagatagcacgtttattctttttattatagtctcttatgtaattcttttgtatatttagcacatcaaacaataaaaacgaatttattatgaattcccccaagtttatcacgacaattttgttctgttgcttcctcacgacaaacatctaggaatatccctatttaacagtcaccattgtagctccaaagccatattcttggaaagaggcatcctgatagcgacaattactgtatttccgttttagttcgtcaatgatagctttccgaagtactccgtccccttttccgtgaataaaaacaatcttttgttcacgcttgttcttataggtttccattacctcccgaaacttatccaattgatagtttaagatctcactattacccataccttgtgtgtcatccagcaatgaatcaatgtgaagatctatttcgataattccattcttactcccatgaccggatttcacgatcggctgcgatttaggtttatcaacagatttcttctgtaataaagcaacttggatctcctctgcggaaacatagacttgcttggccggcatatcatctttcacaatatcataaattaaagccggttcttcaaagaagtcagaatcaccgaacgtatgaagtttatagaacttcaccgtatcaatacgtatttctacactaacggcaggtttgatagcagccgttttaccatccttgaaagctaccagttgcacagctacccgttccatatcattcagtacatcttttgtaaactcctccagcaacagttttgtattaggttccaccaatccgtgcgaacgagttttccatgcctttccttctgcgctcaagtaagtataatacagataataattgctatcattcaccaaataagcctcgaaaggagtagtcatcattgctttcgcatcttcgggcacataagccagaaaaacattcagtgtatctccaccacgtacttccggttgacgctgaatgacaggcatttctggttttacgggtttgacaggtccttccgttttcggagtcgatgaaccaggttttcgtttcatgttatagtcatccgtttctatcactacgcactcacgtatcggcatcggaatgtcaaagccgtccgcatcttctaccaaaacaaaatcttttccctggaatccggttacgattccgccacctacttcactaaggaagcgtactttatctcctattttcattgttgcatattcaatttaagtccaaactaaaaaatgagtaacaaagatagagatttctattcaattaaaccgggatttgattctaaaaacaaggaactcgcccttattcgtcttttttattgtaactttgcccaacgaaatacccaacatattatttaagatttcctattaacgacgagaaccgatgaaagaacttattaaagtaattgcctttgatgcagatgacaccctgtggagtaacgaaccttttttccaggatatagaaaaacaatacacagacctgttaaagtcctacggaactcccgaagatatttcggccgctttatttcaaacagaaatgaacaacctgaaatgtctcggatatggcgccaaagcttttaccatttctatggtcgagacggctttgcgagttagtggacgaaagatttcagccacagatatccaacatattattgagttaggaaaatcattattaaaaatgcctatcgaactgttgccgggagtaaaagaaaccctgaaaacactaaaaaaaacaggaaagtacaaactggtggttgctactaaaggcgacctgctcgatcaggaaaataaactggaacgttccggcttagctccctatttcgatcacatcgaagttatgtccgataaaacagagaaagaatatcagcgaatgttgaacatactgcaaattaccccttcggaacttgtcatggttggcaattccctgaaatcagatattcaacctgtcctatctttaggaggatacggagtacatattcctttcgaagtaatgtggaagcatgaagtggtagatagctttacacacgttcaccttaaacaagtaagaagattcgatgaattgctatctctgttttaaaaaaatccggttattctaaataaatggagaaaagattattgccaaaaccgcatatacttatctttttcctgattcagtacagtttcatctacacaatcattcgacctgaaccatgaacactctattgatgcgcttccttttttagcagatttactccaatttcctatcacttgtccctcatgaagaataaccggataaaacaatccattattggtaaatgccttgggataatgctctttcggcaaaacatccgtccggtctttatatcctaacagatactcatcgtatgaaggaagaagatgcaaacgaccggacactttaccgcgagtccggcaagcctcatggacataccatgtttgtccattccattgctctgccgtcaattctgattctattaaatagatagcctgtttagcctccgatacaggcagtccggaccaccatataaaatcttgcaacactgccggagcatgactacgaaaataactcctggccaaacgtgccagtgcttcatcttttgtaatctccggcacaggcggcactcgttcttccaaaagagcataggtatattttccacctttatcttctccgctacaaacaatgccttcctgctcggcacgtaccataaaccgggtcatacgatgattatcagcctcaaccaaaatccccgaacaacaaaagtgctcagcaatttcttgtttggtcaggcttttgtttccgcaaagaatcttctccagcagattataactttttgcataaagttcatcagttatttccaaatcataccctttggcaaaagagtcattagccgacttgatgcgccgggcagacaacttcagcatccaacgaatatcctctgccgctacaagatgccatgtcggacgcattacatgagtccgcaagatttcaccttttcgcaacgcttcctctacggtctgaatcgttgctgacttcaaacgcattcccactgcccactttaccatagaataattctgtgcctgcatagctcccaaccaagacacaagctctttcggttggcagaaaagcggattcaacaactgctgattctgtaaacggatattcggtattttcatttagataacttttattgcacaaatataaaacttcctcgctacaaaccaagacaaacaacagaatattgaactttcagaaagaagaatcaaagaaaatgactatttttgtcacctcaaaccaaagaagacagaaatgatgctctataaactcatccctcctccatcggtaaaagcaacgatccagttgcctgcctccaaaagtatcagcaatcgtgcattaattatcaatgcgctgggtaaaggtatttattcaccggaaaatttgtctaattgtgacgatacacaggtaatgataaaagctctcaccgaagggcaagagacgattgacatcatggctgccggaactgctatgcgcttccttaccgcctatctgagtgtgactccgggagaacgggttattacaggaacggcacgtatgcagcaacgtccgatacagatattggtcaatgcactgcgtgagttgggagcagaaatagagtacgtccataaggaaggataccctcctctccgtattaaaggttcagtactgaaagggaatgaaattaccctgaaaggcaatgtcagttctcaatacatttcagcattgctgatgataggtccgacactcaaagacggactaaccttgcatttgagcggagaaattatttcccgtccttatataaacctgacactgcaactgatgcaggatttcggagccagagccgtatggacctcccccaacagtatttccgtagccccacaatcctacaaaagcgttcctttcaaagtagagagcgactggagtgcagcttcctattggtatcagattgccacattatctccagaagcggaaattgaactagtaggactgtttcacaatagttatcagggagacagccggggagcagaggttttctcacgcttgggaataacaacggagtttaccccgcaaggcgtaaaactaaaaaagacaggtaaagcaccggaaaaactggaagaagatttcgttgatattccggacttggcgcaaacatttgtcgttacgtgtgctctgttgaacattcctttccgtttcacaggactgcaaagtctgaaaataaaagaaactgaccgcattgccgccctgagaaccgaacttaaaaagttgggatacgttatagaggaagagaatgacagtatattgatgtggaacggtgaacgctgtgaaccggaagaaactccagtgattacaacctatgaagatcaccgaatggcgatggcgtttgcaccagccgtaatctgtcaccccaatatgctaattgccgacccgcaagtcgttaccaaatcatatcccggatactgggaagacttaaagcaagccgggtttcaggttataaacagagactagctgcccagtacagtagagaatttcaataaagcatcaaaagcctattaaatcaattatatggaaggggtacgccaaaaaatgtaactccccaatataaaataacagaaatcaacaattaataagaaaataaccaagtactataagaactttccgaaatacatttaagtcaatcagagaactttttttcataagtacatcaattataggtttataaatcagaaatatagcgtcaaaatcatgaactatcttcacgtctcgctgatataaaaaactcccacttctggtataaggtttccataacattacttcgcaaatataagtacattttttataaaatcaagcagtaatactaaaaaaaataataaaagactgttttaacagagtaaagattagcatatatgaaaaagatttccccctaaaaagtatattataagaggcatataaattaacaacaaatgccttagttcttataggacttggtatttccagtagcctattctatccgaataatgcgcttgcagactcttacctcacaagtaagaatgaagtaacaacgactgtccaacagaccaaaaagattacaggtaatgtgactaatacggcaggtgagccgataataggtgccactgtattagaaaaaggaaacacaactaacggtactattaccgacattgatggaaattttacaattaacttgccggccaacgcaacgctcagtatttcttatataggatatataacacaagaaatacaagtggggtatcaaacttctttcaaagtagtactgaaagacgatacaaaaacattggatgaaatcattgttgtaggatatggttcgcaaaagaaagctaatttgactggtgcagtttcttccgtgaaaatggatgaagcgctgggggaccgtccgcttctgaatgctgccgatgctttacagggagctgttcccggactgttcgtttctaacggcggtaatgcaccgggaaccagcaagtctttccaaatccgcggagcttactcattaggtgtcaaaaactcggacggaacgtatggaaacacaatcaaaccactcgtattgatagacaatgtggaaggggatatcgacatgattaatccggaagacatcgaatctatcaatgtgctgaaagatgctgcatcagctgctatttacggtgcacgtgcagcaggaggtgttatcctggttactaccaaacgtccgaaaggtgcttccagatttgaattgaattacaacaataactttgcattcggcaaggcagtgaacttaccaaaacaagctcctttaatggactatctgcaagcctatctggactgtggatactctgacgcatactggtcgctaggttcacctagcgtcagcaaatggatggaatacctgactgcatatcaaaaagatccttcttcattcaacacagtaggcgacggcatctatgtagacgaatccggagttccttattatctgaacgaaaaggatttatataagaattttatggagaccagtttccagatgacacacaacatctctgcaagcggaggtactgataaactccggtaccgtatctcgggaggttacaactcgaacgatggtgtcctgatttccgacagagacaaattcgaacgcatgaatgtcaattcattcatttctgccgacgtgacaaagtggtttacacaggagatcacaatgagctatgcccatagtttacaaacctcaccgggaggaatgggaggagtatacaacactcgtctggtttcctattatccggaaggtgaactgcctgcttccgtaaacacactggcagacgaggatttgcctctcttcactccccgcaaccagatattatactcaaacccagtaaacaacaagaacgataatccgcgtattttcctcaaatccattcttaaacctctgaaagggctggaagcggtatttgaatatacctttgataaaaatatatatgattaccactggtacaccggacaatacgactatacaaccatccagggaggaagttccaaatccttcgtagatgattatctgagaaagtacaaacaacatacgaactataattcaattaacgtatatgctacttataacaaagacttcggtaaccaccactttaaagtaatggctggttttaaccaggaatccagctatcaagagacattggatacgtactcatacaatcaggcagtactcgatgttccggcaatgtcatcaggaacaggtacgataaaagccactgattcatatagtgagtatgctatccgtggaggattcttccgcgtcaactacaattatctcgacaaatatctgctggaagtaaacggccgttatgacggttcttccaaattccccaagagttcacgtttcggatttttcccttctgtatctgccggctggcaaattgcccaggagagatttatgaattccacccgtcattggctggacggtttgaaactccgcgcctcttacggtgtcatcggcaaccaaaacatcaatccgtacaccttcaccccgtctatgagcgtaaataataaagccacttcatggatcatagatgatacgtatgtaacctctatcagttccctgcccgcattagtaagccaaaatttcacatgggagaaagtaggaacaatcaacgtaggattggacgtaaacttgttcaacaaccgtctgagcggagtattcgaatggtatcaacggaacacgaacgggatgcttgcccccggtgtacaattgcctgctgttgtaggtgccagtgccccctatcagaacacagccgatatgcgtacacgaggttgggaacttagcctgaactggagagaccaaataggtaaggtaggctatcgaatcgggttcaatctttccgattataaatcagaaatcattaaatatgacgataatgcagctaccaaattattgagctcctactatccgggacaaacactgggagaaatctggggatatgtcgtagacggatattatactgttgacgactttgtggatacctcttcctggcaactaaaagagggagttacttctatcaacggctataatgtacgtcccggagatgtgaaatttaagaatctacgtgacgatgatacttccaccaacgtaattaccagcggtgacaatacatttgacaacccgggagatcgtaaggttatcggaaacacaactccccgttaccaatatggtatcaatctcggaatgaattatgcgggattcgacctgaatgttatcttgcaaggtacaggaaaacgggattactggatttcaaatgtactcactttcccgatgaacggtgataactttgttcctctttttgaaggattgagtgactattggatgcctaaagatcctgataacggtgattggagtgcagtaaatcctaacgctaaatatccccgcatctacggtaatcgcggcaactccggttcgaatctgagacagagcgacaaatatctgtccgatgcttcctatctgcgcatcaaaaacataaccctatcctacaaattacccaagaaatgggtaaaccagattttcctgaatcagatgaaggcgtttgtcagcatagaaaatgtagcaactttcacttcactaccttcaggtatcgacccagagagaattgaatggaactacccggcattccgtacggtttcattcggagtaaatatcacgttataaattactaatctgatacatagttatgaaaaagatactattatttctaacccttttcacagggatgacattgatgggatgtaatgacagttttttagagaaataccccgtgaccagcttgacggaagaaaatgctttccagtcatacgacaatttcaaagctttcatgtggccttgttatgaaatgttttccaacacaaatatagccacctccactaccgctatcggacgtaattctcactatctcggtgacgtatatgccggatatctggaacaaagaggtgcaagcagccaaaataaatatgcgtttcagacagtgacaaacgcaacctccggcaacggctggaacttttcttccttcattcgccgcattaacatcatgctgtcgcacgtggatgactctaacatgaccgaagaagaaaagaaccactggaaatccgtgggatatttcttccattctttctggtatatggaattgattgaccgctttggtgatgttccctgggtagatactccgttggacgatacttcggaagaagcttacggttcccgtatgccccgcctcgaagtagcggacaaggtattagaccgtttgctgtgggcagaatcgaatatcggcaacacagcgatctatgaaaaaaaggatggttctaacactatcaaccagaactgtgtacgagcagccatttcccgcttcactcttcgggaaggtacctggagaaagtaccatgaactgggaagttacgacagatatttcacagaatgtaagcgcgtttcgaaactgttgatgcaagattatccttctctgtatacaggaacagacggacaaccgggtgccggttatggcgaaatgtggactacggacgatttgagtacagttccgggcgtcatcctctaccaacaatggttggaaacaatcaaaccgggacactcatgttattacgaacacacttcttcccacgacatagagatgcatcaaggaacggtagatctgtatctttgtaaggatggaaagactatttccaattcagaattatatgccggagacaaagatatctattcgactttccgtaacagagacccacgtatgtaccatactatcatgccgccctataaagtagtggacggtaaaggggactataccacatggtcgtataccagcgatcctgccgaccgcgaatatattgacatcatgggtccaaacgagtcatgcagtaatccgggagtgggcatgaaacgcttgccgggacaaaactggagtgcttcgttagtacgacgggttcccaacttgcaaggcggtgcacaatacacaatcgaagggaagaaatacggaccgcatgcttatgttgcctgccgttcgggatactacgtatggaaaaattgggataactgggaagagaactataacaatgcacaggtaaatacagccgataaaccgatcttcaaaatagaagaaatactgttgaactatgcagaagcgatgtacgaaaccggcgcatttgaccaaaatgtagctgaagaaacaattaacaagttacgtacccgagcaggagtagaaaagatgacagttgctaatattgacgagaatttcgatcccaaacgtggcaaatactatccgaaaaacaatacaacgggtatcttggtagaccctgtcctttgggaaatacgccgcgaacgcatcatcgagttaatgggtgaaggattcggtttctatgatgtgcgtcgttggagaatggctccatggtttgtaaatatgcaacagaaaggtatgtggatatccaaaaacgaactaagttcactaaccctactgaacgaaacgaccggaacatcggacggcgccaatggttctatgactgaaggatatatctatctgttcaacgatcctatcaaagaaggtaaaggatggcttgaaaaatactacttatatcaggttccgctggaagaaatcgcgttgaaccccaacttaacacaaaatccgggctgggataaagaataacagttaatatcggcctactataaatatttcagctatttctccttcccccagagtagaaatagctgaagttttttataacaatgtactgtttctaatagccttcttcatttgctattttccatatccaaaagaataaacccttcagaacttatttcctaaagacacgttgtaacagagagttattctttttcgttctgtattcatatataccctgtttcagcttttgcacaacctcttgtaaatctgtaaccaaaagagaagttgaatcttgaggagaatcaaacaaaacaactctttgattcttagaatctatatacatatttccaaaacgccttataaaatgatttgtcagatagccattataaatctcctcttttagaaaataatcaggcaatttatacataccaacaccagtcagatgctgattattaaacttcattccagaagaaagtattagaaaaaccgagtcatccaaggaagtcgaaatccggccatgctcctccatttcaggtattttacccgatgttgttaaaggataagtattataataatcttcatataaatagttcttcagtttatcctccggagaaaatggtaaaagcaaatcacacataagcttataatctccaactgaaaccggttgggaatacaggcctgagtctaatataaacctcattggcatagtatcattaatcaatacatcagcacacatattgtttccaccacaatctattcgcatctccaaacaacttgctcccaaagataacgggatatctacatcgtaatcagctattaataatttatttgttcgaaaattgaacaaccaattatattgatttattaaagtgcgccctataactgccccactgagattcttaccacttacaccatagtgtttcagttcccctaccgcaaaaatatttgttactttactagagtctatctttgaaaaatctttttctccaatacaaaaaggcaccaacaccgctggaacggaaaaacgcccgatagaatccttttttttaattccttgctctattttctctgccagttcctcttccctctcatttcgaagattatactttactgccaattcagaaagaatagttgagactccagccccagtgtcaaatatataccaatgaacatcaccattgatagtcaatggaactttaatatatgaatcatgttcaaaagtaacctcagtccaactacgttgctcggcacaagatataccaaacaatataagtattatcgttccagccagatgtctcagcatagtcacacattttgttgtgtcagaactctctctcattcgccattttccacatgttaaggaaggacgccttagtgatttccacaatcttatcccaattcaggcggtcggcatgatcggacggttggtgataatcgggatgtccgtcagtatgataccagatgatcggaataccagctttagcaaatgaactgttatcacttcctcctacgggattatcccatgcgcggtaatccggtgacaaccgcaaaccatacttcttgatatcttctttcaaccaatctccaaaaaccggatgagcagccgtataaaaataaacaacgtgttcaggctgttgcggtttgttattacgacctatcatatcaaagttcagatagcctttgattcgagagatgaaagggcaagtttgcacaaaatatttggagccaagcaaccctttttcttctccgtcccaaaatgcgaagattacatttctttccggctgctttccagtggcaacaaatgcccttgctatttgcaatacagcggatacaccggatgcattatcatcggctccgttataaatctggtctccgtcgagagctggatctatgcccaaatggtcaaaatgagcacctacgattacatactcttttgtatttttaccgggaatcatgcctaatacatttctcatggaaagcttttgatgaacctcctgcttcagtttagcaatagaatcgggatgaacttcgaggcgacctttcttttgcctttctttgcgataggcttcaaaaggctggaaataactttcattcagaggctgcactcctatccattgcaataaagaaacaatatattccgaagctacacgcgagccatggaatccggcttcgcgtccctgcaactcgtcacctgctaaaaaattaataatagcttcagtagaagaacggctaatactttgcaatcctttttccatgtgagactgagctgatacaaataatgcaacattacacaaaaagaaaattaacaagactttctctttcattatattcaagatttaaaggtatatacgcaatatcgacaaacaaatattcacacgatcagtagtttctcattcataagaagtcgcctttttactatcttattcctcatcaactatccaatttttctctttcagtatttcttttaaagactccttatttccagggttattactataagagatccggcattgaggaggtctcggatattcaggagtcggtttcggaacttgtcctaaagaaacaaacaaagtcttcaaggcagcctcacccagttggttggaatgacaatagagatgtccgaaatattgtccttccggaactaataaacgggttaaccgattatggtcacaatgtagttcccttatagataaatgcttagtcaaatcaagttccgtcaatctgttaccggaacaacttaactcattcagagaagggcaacactccaagacatcgtcaaccgactgaaaagcacacccacttatcagtaatgcattaatcccattattctcatctagttccagactcgccaatgcactattatatcccagatccacagaacgcaatttgggtaaaccttttaatgaaaaggaggagaaaccattataagaacaatacaattcttccacttccggatgattgccaagctccattgaagttaatttaggattagaataaatttgtatattccgtaatcgggaacaatgctcaatctccaaatgttccaaatctgcgaaactaccgatattaatactttctacattaggacaaaaagtattcaaattcaattcacgggtatcggtaatactattcagaaccaaagatttcattcccggcatattccccaaatgcaaattacttatagaaatcaacagaccgcttatatcaataagttgtagttcttcagcccagattcttacgttatacgatcctttattaccatatctatatgtcactccgccagccatcgaagaaggatcttcaactttctgcattcgaccgtttccccagtctattaccattcgtccaccgtctgcaacaatgttcaattggcgccaatctcctgtaacattcactgtaaaacgaatcgtatttgcatccgttagtgccggaaaatcaaaatcatctccaaacacactattatccgtatctttacaagaaataaagatagtagataagataaatacgtaactccaaacgaacaatagactctttcgcttcattacttattatatttaagttagcaacgtacaaaagtacgaaagaaatagatagcaactataatagaatacaaataaataagtaactttgccgaaaattgatttgatataactatgtggatactcattataagtctgatattgctgggtatcattgcgctgattgccgggtatatccgcaacaaaagactacaacagaagatagaaagaggcgaactggaccgtatgccggaagtgaaggaagtggatgcagaatgctgcggccaacacgaagtatgcgaacgggatagcctgctggctgccgtcagtaagaaaatagagtattacgatgatgaagaactggaccagttcatcggtcgtgaaggcaatatgtatacggaagaagaaacagagcagttccgtgatgtgttatataccacaaaagacgacgaagttgccggctggatacgtagtcttcaacttcgtggtatcgagttgccggataatctcaaagacgaagtatttctgattatcggagaaagaagaatatgaacctattacaatatacattctttcagcacgccttgttggggagcctgctggcaagcattgcctgcgggataatcggcacctatattgttacccgccgactggtgtttatcagcggagggatcactcacgcctctttcggaggaataggattgggactgtttgccggaatttccccgatattgtcggcagccgtcttctccgtgctttccgcctttggtgtagagtggctcagcagacgtaaagatatgcgcgaagattctgccattgccgtattctggacgttaggaatggcattaggcatcatgttcagtttcctgtcacccggctttgcccccgacctgtccgcctatctgttcgggaacatcctgacaatcaatcagactgacctctggatgctcggcatattggctctgctgttaaccggatttttctatctgttcatccgtccaatcgtatatatcgctttcgaccgggagtttgcccgttcgcaaaagatcccggtagagatattcgaatatctgctgatgatgtttattgcgctgaccatcgttgcctgccttcgtatggtaggtatcgtgctggccatctcgctgctcaccatcccgcaaatgaccgccaacctgttcacttacagcttcaagaaaatcatctggttgtctatcggcatcggttttctgggatgtctgggcggattgttcatctcctaccattggaaagtcccttcgggagcttcaatcatattcttctccattctgatttatgccgtttgcaaaattggaaagagttgtttcaaaaaacagtcataataacagattaatatatggaaatcaagattcaatcattagaaagtatccacgaagcagcccgtgaatttatcgctgctatgggcgacagcactgtattcgcactatacggaaaaatgggagccggtaagactacattcgtcaaagccctttgtgaagaactcggtgttacggatgtcatcagctctcccacgttcgctattgtcaatgaataccgttcggacgaaaccggggaattgatctatcactttgacttttaccgcatcaagaaactgagtgaagtgtacgacatgggctacgaagattatttttacagcggtgccctttgcttcatcgaatggccggaacttgtagaagaactgctgccaggcgatgccgtaaaagttacgattgaagaactggaggacggaagcagagtcatcaaactatgaccggacaatatattgtacaaggaatttttgcactggcagggatcatctccctgctggcgtcattgctcaactggaactggttctttaccacccgcaatgcacaaaccattgtccggaacgtagggcgcaaccgggcacgactcttttatggaatactcggagttatcttaataggaatggctatcttcttctttgtagaaacacagaaagctatagcaattgccgtgacttcatctccaagtacttattaatcacatcaatcgaaagattctccggcgtggtcaataaagaatagattccattctgcttcaaggtggaaacaatcaaccgtttttcaaaagcaaacttctccgctatgacatggcgatagtagccttccgtatccctggcagggttggcgatatattctttcaaatcggcatcctcgaaaaagaccacaagaagacggtgctgacgattcagttgtttcaaataagccaactgacggttcatgctacccatactggagaaattagtatatagcaccaaaagactgcgcttgctgacatgcttgttcagatgaacacaaagagcggagaaatccgtttcgccaaaagtagtctgctggctataaagattttcgagcaatgtctgcatatgtccgggttgcttggaagccggcacaaaggtgtcgaaatgttcatcgaaagttaccaggccggttttatcatcctttctcatcgcaacatacgaaagcaccaacgatgcattgactgcataatcgagtaacgtcataccgcgaaaagcttgctgcataatgcgccccttatcaatcacattataaatttgttgggaacgttcatcctgataaacattcaccattagctcatgccggcgggcacttgccttccagtttatcgtccggtaatcatcccctttgacgtattcctttatctgttcgaattccgtatgatgccccactctgcgaatacgctttatccccaattcggtcagattgtcgctcatagccagcaactcatattggtgcaacatcagataagaaggatataccttgatatccaacggctccccacaagtataacgccgggaaatcaatccgatccgaccggttacaaacaccctgatccgcccgaaagagtaaacaccccgctgcgtagggcggagacgataactaatcgttttcccttcatttgcctgaagctgtatccggaaattgatattccgctgttggaagataaaaggaatctcgtcgataatctccaaagagacgggacgcggataactattttccacacggatagccacttcgttttcatcgccattggagaaacggtcggcacagtgacgttctgcctgaatcgcgttggtacgataaagtagaaatccgtccgccgacactaacgcaatcaaagccacaagcgcccactgcccgacaacaaacaacggagcaaacgcatatccgctacccagaaacaggataaccaacacaaagacaatatagaaacgattcgttaaatacaacttgtctgctaaaaattaagagttaaaaactaaagaccgtaatcggaacatgacagttggactatcatgcattatctatttcggaacctcaaccttgtcaatcaaacgctgcgtcaccttcaccggagaatagccttccatttccgcttcggcagtcagaatcagacgatgttgaagcacatacggagccacaaacttaatatcttccggtgtcacaaaatcacgtccctgcaagagagcataggctttggacgcctgcatcatagcaacggacgcacgtggagaagctcccagatacacagctttgctggtacgtgtctgctgcacaatcagggcaatgtactgaagcaacgtgcggtcaacaaacacattcttcataaaagcacggagcgtcaacaactcttccttcgtaagagcaggtgtgatatcatcaagtttcaccaaggcggcattgaagtgatgacgttccagaatattcacttcttcatccaatgagggataatccatagtaatcttcatcaggaagcggtcgagctgcgcttcgggaagtttgtaagtcccttcctgttccaccggattctgggtagccaaaatcgtatagagttctcccattcggtgtgtcgtcccgtcaatacttatctgacgttcttccattacttcaaacaaggccgactgcgttttggcaggagcacggtttatctcatccaccaatacaatatccgcaaatatcggccccttatgaaaatcaaactcattcgtcttcatgttgaatacggtcgttcccaacacatcgctcggcattaaatccggggtaaactggatgcggctgaagtctgcatcaatcaaccgggccgtgagacgggccagcaacgttttcgctactcccggcacaccttctatcagcacatgaccgtttgccagaatagccgtcagcaccaagtccaccgtttgttcctgaccgactatgacggaggcaatccgttctttcagtccttgtatcttctcggaaaagagagttaaatctatccgttgttcagtgttctcttccataagtttcttctttatatatgattgattatttcactcattttatctatatacagtttcatctgttccgcagaaatgacgcggccgccgtaaatcaccgggcggacttcgcggacaaacgtaccgatttcctccgcatccattcccgtcttctgcgcaatccggcggaaagagcgttcatcgtccgccacttcctctatatccacctgaatctctcttctcaattcttccgcaaagtagataaacttcttatggaccaagtctgcatgatctttcttctgataatacagagtccctatcagttcggtaaactcgagggatttgttttccggttcgcggataaccggtattacacgttgccgtctccgtgccgtaaatatcataaacagcagtatggcaatcatcgtcagatacaacgcccagcgaagcggttgccgggaaagaaggtaacggaaaggagactgctgcgtttccgccgtctctttgacatatccttcggtacggacaacaggaaactcgcccatttgagataacaagcggaatatgtaagccgaattattcccgtcgagtataccgtaattggtaaaaatcaaaggagtggagacaagaatcacctcccctttcccaaccggacaggtcatagctacaggaacataacgaagtgtgtcctgctccgattccgtagatacggaatcgacttctacctcataccggtactcattcacatgaagcgctttcctcgccaactcttttcccggcaacgaatcgccccagaaataggaggaacaaagctgagggtagaaatagaacgttcgcggggaatagactgccgaatctcccacccagcataaactatcttttgccaacaacgaagtggcatatttcttgagagccaacggactgaaataaaaacgataagattcaaagttcaatgtatccttcaagtaccggctgaacatagtgctcgccagcataaccttatttccccgttccgccattttcaggagagacttcacatcaatgtccgtcaatgccatgtcatgggcaactgccagtattccccggctatgcaacgtgtcttcctcctccaactgatagaatgtctttttcgacaatgtgtatccattgggcaaagaagcagacaacaggctatcgaacaccgcacatccgaaaggctggtcatcataatgaccgaaagtaggtgtccacacaaacttcttcggcaggtgatattccacagcgaacattatgaccaaaaaggctacaatgaaaatgataaaccagtggcttcctttcatacagcgcctcctttctctatttcttcctgcaatgcctgcatctcacggaaaagttcttccgtcgcttcgaagttaccgtaacgtacccgcaggaagtggttggtcatttgccggaaagccggcagccgcacttcatagatatattgcgtaggtgtcttataaagctgccagtcaatacgttcggcgtcgctcaactgtttcagtgtctgcaaatagagcaaacgtatcgcttccctgtaatcccgacgggacagtgcttcatcaatgcctttcggaaaatcaacgccataaatggtatcttcctcaacagtatacggaagtgaatttttatgcgaacgcatgaacagttcgggacgttttttgtaaacaaaccaaacaatcagaagcaaaagaagaatggctaggcaaatcatgataagcccggaatactcctccgcaaaacggctaccgaatattttacccaacaactccccgaactgaccgcgaatccactcgaaaatattaatttccggagttatcagctcacgattataatcatacgcagcatcggaccggaaagccgcaagctgtgcagaatcacaaaccaatgtatcagctggggaagtcatcatctacctgaacctgtttttagagtttatcaaaattatcaatatcagtttccaccgtaatgctgtccaccacttccgaggcgtgcccgtattgataagccatgccgacaaaggtgaaaatcattgccaggtaagcgccgaatgtctgaataatcgccattaagtagaggaagaaactatatcctgccgatacagtaacctcaccacttccaccgacatcactcattgcaaaaaagtacttcacgacagtagcaatataccaaggcatcatcgttactccttgcaggacgttagctataattcccattaacaatgaaactagaaagacacctccccaagtagcaaatcccaaccggaaagttttcttgaaagcctccattaaagtgatatcctcaaacaaataaatgggcgccaacagagcaagcggtacggagaaagctatgataaacggaatagtcagaaacaatgtgaaaggcgtcaaagcaaccagaagacctacaaaaataccaacaaacagtaccagtaatatacaagcacctgtcatcagtagcagtctttttatattacggaacaaccgaggtttcagcatacccaaagttactccctgcaagcgttcttcgcgttcattatatgtccggatcagcccatagaccaacgatgtcaggaggattattccaatcagataaaggaacatatataatccataataagagccgaaagcaatgagcgaagaagaagacgcagccattgccgtactacttgcgatagcggatatcgacaatgccccgctcattaatccgttcaggctcaacgcctgaataaggcaaagaggcaacaacagataagtagtaaacttcaacaacaatttccaattctcttttagaaaatcaaaagaagcgtttaacttttcaccgaaaggacgtttcacatacatcgcgatcttaggtttctgtgattccatgtttttttctatttggtaaataaatatagtagaaaataataaatgacaacgaaagtagaatgaatccaagcctcaacagatccggcagttccgtatgtcgggtgacaaagccttcaataaaacctgccattacaaatacgggaacggtacctatgacaatctttactcccttctttgcaccccgacggaaagactccaaccgtgaataggtgccggggaaaagccaaccgttacctaaagccagtccggcggcaccagccacaataattgcccagatttcaagcgttccatgcagccagatagcaagactggattcccaaagcaaatcgtgctgataaaagaaggtttgaaaggcacctatcatgattccgtttctaagtaacatatatcctgtaccgaaactagtcaacagccccattgcaaaacaattgaaagaaaccatcacattgttaagcgtaattcccaagaacatcggcacttcgtccgagacgttgtagaccgccattggctcaccgttggcaatattatccaaagtcatatccacatagccgttccctaaaatcaggcggacaaagttcgggtcattcgcagcggatatcactcctatcagcacgctgacaataaagataatgaaggaagtcagcagttcacgccgggcatcatacattgtctgcggaacttcacgcgtccagaacgtgatgattcgcgaccacttttcccgtttgttccggtaaatctcgttatgcagtgccgaagcaagattattcagatagatagtaatgcgtgaagtcggaaaatgtgtctgggcaaatgccagatcagcagtcaaatccgtatatacgccggcaagttggtcgggagacaagcccgcggcctgctccactaccttttcggtttccttccatttttcaatgttccgacggataaacgtaacttctttcatgctttccaagggatttcggataagttttgtccgaaaccggaagcaaaagtaagagaaatatgatatatttgcaacggaatcctaagaatgtttaatcagaaatggcagaatctacgattataaccggccaattcgtccgtatcagccagacgcccgccagtattggcgaacgactgttggcattagttatcgattatttcctaatcgtaatctacgtatattctactgccaccctcttaaccgaactgcggttgccttcgggatttaccctcattttctttctctgcgtcatttatttaccgatactcggttattcttttctttgcgagacattcaaccacgggcagagtttcggcaagcgtataatgaatatccgtgttgtcaaagccgacggtaccacccccagtatcagctcttacctgttgcgctggctgctttttcctattgacggtccaattacgggcggtttaggcattctagtggtcctgttgacaaaaaacagtcaacgaataggggatcttgctgccggaacaatggtgattaaggaaaaaaactatcgtaagatacacgtcagccttgatgaatttgactatctgaccaaagattatcatccggtctatccgcaatccgccgatttatcactcgaacaggtaaatgtcattacacgaacactgcaatccggtgagaaagaccgtccgcgacgtatcttgctactagcccaaaaggtgcaggagttgctttccattactccacgcgacaacaatcaggagaaattccttcaaacagtgcttcgggattatcagtattatgcattggaagagatataaagactactttatttactgcccgttccctttgtaccaaagatccgtagcgatgcgttcattgtcgtttccgcacttgggaactctagtttccacggttagaaatttcaatttccctacgcagaaagaggctgtctcaaaatagaaaaatgaagtgaccccaaaaatttggactggttaaacattatccagttatagaaagagttcggtattgtactggac

SEQ ID NO: 2976 - DNA, 22959 bp, Unknown
  gut microbiota DNA sequence
ggatacacaatgctgataataactgacttacgcattcacctaccacctccccctacgggtactcctccttcctgaaggaggagagttttagatactgtcgacttgttagtcagcctcttatatttgttttattttctacttgctttcaatattcaacacacccttcgccaatccttttccggtagcttccagtgtgatctttcccggcttgtccgaagaagaaacgattgcggtcatcattccgctgaataccttcatcttcggggtctggaacgattcgagtgaagccgggtttccgttggctcctgcgcggtaagttcctgcgcctttcactttgaagctgatagtgttatccgccagcggacagagattaccgtccttgtctactactctgacggtgacgaatgacaagtcttttccgtcggctttgatttgcgagcggtccgctatcagttcgatatgatgcggttttcctgcggtatgcatttccttttcggcaacgggcttgccgtctttgtcgtaagcgaccactttgacagtccccggttcatatttcgtattcatccacatcaggcggtaacgtcgctgacgtttgagatttgctgttgaagcagagtcggcactgttgtcaatcgttacggagagatccttggtacgtttgccctggctcttaccgttgataaacagctcggcagacgggtagttcgtgtagacaaataccgggactacttcgccttcgtgtccttcccagttccagtgcgggaggatgtggagggtttccacgtccttgttccagtgactgcggtagaggtaatagcggtctttgggcagtccggcaaggtcgatgataccgaacagggacgagtggctgggccagtcggtgtagtacggtgtcggttcacccagataatcgaagccggtccatacaaattccccgatgcagtaggggaggtcttcgtgctggataaagtcgtcttcgggcaggttagaccaaccgcaatgctctacgtcgtatgacgaagcctgatgatcgggatacttctgcatcgaacgtcgggcgacaggcaacttgtacacgccgcgcgaactgactgtggaagctgtctcactccccaggataatctgttgcgggagcttcttgtaattcgtccggtacttgtgcggacggtaattgaatccggctacatccattacggcagccatattattattcaccactgcgtccggagcatccatgccttgagtgacggggcgggtgggatcttcgcggtgacagatgtcttgcaggaagcgggacaacttcggtccgcggtcaccgttccactggtcgggaacctcgttgccgatgcaccacatcacgacactgggattgttgcggaactggtgaatcaggttcaccaagtctttttccgcccattcgtcaaatatcttatgataaccgttctgcaatttggctgctttccattcgtcgaacgattcggacataatcatcatacccatttcgtcgcacgcacggatcagttcgggagccggcatattgtgggaagtgcggatagcgttacaacccatatctttcaggatgcgtatctggcggcggatccctgcttcgttggcaatgccgcccaacgggccgaggtcgtgatgattgcacacacctttaaatatggtacgttcaccgttcagatagaatcccttgttcgggatgatttcgatagaacggataccgaaaggcgtggtatattcgtctttcagcgtattgccttcatacactttggacactgcagaatagagcgccggagaatcgggcgaccagagtgcagggttgtctaccacgaaatgttggttgaatattttttcgtcgtatttcgtaccctgttgttcgtcggaagctaccactttgccgtcgggagctttcagttcggtcacgatgcgatagtcggtgaacgccttgcccgaagggatgtcgagacgtgttttcaggttgactctggcgaaatccttctttacgacaggcgtggtgagctgcgtcccccatgtcgggatatgggcgtcttcgttaatcaccagatgaacgttgcggtacaggcctgcgcccggataccagcgtgaagattcggtttcgttttccagacggacggccaaggtgttctgttcgcccgcttttaaataaggagtggcgtcgatgtggaacgaattgtagccgtaaggccagaagccggcttcctgtccgttgatgtagacacgggcgtggctcatggcgccgtcgaagatgagggttgctttcttgccggaagaaaatgccggggcttcaaagttcaggcgataccagcctacaccgacaaagggaagtccgcccgtgcgtcctgcgtgttccagtgcttccttctgcccgtcctgggtgatagcgactttctgtttgtcattttcgatactgaaaggaccgtagatagcccagtcgtgcgggacggtgacggattgccatttggtgtcgtcgtacgtctgctgactgaagtccttgctgtcttctcgtgtaaacttccagcctttttcaaaggtctgttccgtacgcacttgcgcgaaggttaatgtcggtagagctactaatagagctgctgcgattttaagatgtttattcataaatatagggggtaaagattgtttttcatttctgttttgagctatgtgttgtctttggcttcgtcttcgggttttacttgcatttcgtctttcggattcagactgctgccgcagtatttgcaaaacccggcattgtcctcgtgtccggagcggtggcagtgggggcattccttgtcccttctgcgtttatagtctttcatcatggaggccgaaacgattcctgtcggtacggcgatgatcgtatagccgataagcatcacgcaggcggaaaggaactttccgaatccggtgaccggggtgatgtcaccatagcctacggtggtcatggtgacgattgcccagtagatactgttcgggatgttgttgaactgggaatcgggctgcgtgccctctatcatgtacatcaacgttccgatcgaagtcaccagaatgacgacgaacaggaaaaagacggctatcttcttgctgctttcgcgcagggcggtgagtagccgttcgccttcgtttaggaagttgaacagcttgaatacacggaatacgcgtatcagacggaaagcgcggatgatgagcaggtaacgtgcgccggggaaaagcaggccgatatagagcgggagggtagccagcaggtctacaatgccgaagaaactgaatatgtatttccgtgggcggggcgaacagtaaatgcgtgtcaggtattcgaaagtgaagaaagcggtgaaaagatattccataatgacaaacggagtcgtcaggtaggaggggatgcttttcaggctttcgatgataacgagcaatacactgaccaggatacaaccgataagaaccacgtcgaacaacttccccgcaggggtgtccgattcgaagatgatgacgtatagttttcgtttcaacttctcgtcatgcaggaaatcgcggattctttctttcagtttcatatatgtattcagtttcatatatgtattcagtttcatagatgtataatggtaaataataaattaaggaactcacttctagaagtcggtgctatcctgattctcctccttcgggaaggaggagtccccgtagggggaggtggtaggtgaatgcgcaagtcagttattatcagcattgtgtatccacctaccaccccggctttcagccacccctccttccccgaaggaggggaattggagatactctcgccttttgggggatgccttcgctttctggggagatgccctctcctttgttgaagcccctttctccttttataatatccttaattagtttctttatcattccgtatattaatttatatcattaatcaatcacccaatgcttattgtaagcaacagtctttttgggatcataatgcattccctcttgtgtggggatatggaggacataactctttccgcttctgttctttagagacgtttcgcgcagccagggattcgcatcccggagttgcgcgtaggtgataccttgttttttggcatactcgctcaagtcgttgataggtgtagatacggtcacctctttataaggaataggcgggtagagatgttctcttttcagcaggaacccgtaacgttggggattgctgaaaatctctttagctgccagcaaccggaacatgtagcgggaagtttcttctaccagccacaagtccatggcatggcttgccaactgtttttcgagttgggaggagatgcgcgcctgtcctgcgttgtaagcggcggagactgctatccagtcgccatatttggcatatgcctgtttgaaatatttgcaggcagctacggtagctttctcgatatgatagcgttcgtccacattctcgttcacttccagtccgaactcgcgtcccgtggtgggcataaactgccatagtccggctgcacctgccggagagcgggcgatactgttcaggttactttcgatcaccattagatatttgaaatcatcggggataccgtttgctttcagtatcggttcgatgatagggaagtatcggttggcacgcttaatcagaagcatggtggtggagtgcatataagtgaaagccaatatctcgcggtccattcgttcgcggcggtcgtagcggcggaggtcaatcgtttcaccgtcaaaggtaacctgggcgggtacggtgggcgaagtgacgcaatagggcacttccgacttggcggaatgttgttcgttgacttggctgctgcctatcaatgtaggaatggtggcaccaatacaaaacactaagataagtgtaaggatataattgattttaatctgtttcttcatttcaattcatcatttaatttaataagtaaaccttgagcctgacgcgatcacgccgcaaggaggaaaccttattccggcgctacgccggcggcagtggttggcagcctctgcaatagtagatgctgccgcccagataattctctttcacaatggtttctccgcaacgggggcaagccatgcctgcggtatcttttgagagacaggcaacgtatttgccgttcgctccgaacaagtcgctttccgtgcttcgcccgcctaggtggtagatgtcattcatcgtctcttttatctgatagaacaaattttcgcgctctttgtctgtcagtccgcttatttttttcttcgggtggatatgtgtatggtaaaggatatcctgcaaaacaccgttgccgagtccgggaatcgtctgttcggtggcaaggaaagctttggcggatttcttctgtgcgctgtcggcattgataagtccgaggaaatattccgggctgaaaccgtcggacatgacctgcggcttgcttctcgctgtcaggtaataattggagagcactccgttggcagcgtccttgtcatagcacatcagtccgccgtacattctcacggaggcaacgaggcaactttcgtcctcgaaggcgatgagcagctgatgtttggcgggtaacttggaacccggagccagatagcgcaggtttacgccgtccgtcaagatgagaaccttgtctcctatggtgatctccaccatgccgccctgtgactgtgcgtggtctatcgtcttgccggacagctgttcagcatactcctcggaactgcctgtgaaccaggcaaacttgtgaggactgaactgcgtgtacacgtccgttatcttttttcctctgaccgtttcgttcagttgccggcagagaatgcgggcttcgggggcttctatcatctcgtttttcctttcaatgtttacgtcttccttgcaaagataacttcattttgtttttttcaaagaacttttcctgcattttatacgtttttctagtagagttaaaaacatacaatagaatcaagatgaatatagcaatgaccggagctaccggatatataggtaaacatctttccagctatctgactgaaaagggcggacatcgggtgattcctctgggaaggtcgatgtttcgcgaaggtatgtccggactgttgattcaaacgctggcgcattgcgatgtagtcattaatctggcaggcgcacctatcaacaagcgttggacaccggaatataaacaggagcttttcaatagccgtatcgtcgtcacccaccgcatcgtccgtgcgctgaatgccgtcaagacgaaaccgaaactgatgatttcggcttccgccgtaggttattaccctcccgaagtggaagcggacgaatacacccgtacccgtggggaaggcttcctgtctgacctttgctatgcgtgggagaaagaggcgaaacgctgtcccgaacctacacggctcgtcattacccgctttggtgtcgtgctctctcccgacgggggagcgatgcagcagatgttacgcccgttgcaggctacgaaggtggctaccgctatcggtcccggcacccagtccttcccgtggatagcactgcacgatctttgccgtgccatggagttttttatcgggcatgaggagacgcaaggtgtgttcaatctggttgccccgcaacagatctcgcaatacgattttactcacgaaatgggtaaagcctatcaggcatggacgacgattgttgctccgcaacgtgctttccgtatcttctatggcgaggcggcttcgtttctcacagccggtcagaaagtccgtcccacacgtctgctggaagccggtttccgcttttccgtccccaacgtggaacgtcttttcaaaggaaccgaccataccaccgtcaagacacttgacctgaagcgatacatgggactttggtacgagattgcccgttacgaaaaccgtttcgagcatggacttgtcgatgtgaccgccacttacacgctccgtcccgacggcctgattcgcgtagagaaccggggatgcaaacgtaattccccttatgatatttgcaagaccgccaacgggcacgccaagattcccgaccccgcgcagccgggcaaactgaaagtctctttcttcctcaacttctactcggactattacgtgctcgaactggatgaggagaattacaactacgccctcgtaggcagcagcaccgacaaatatctctggatactgagccggactccgcaactgccggaggatataaagaaaaaactcgtcaccgccgccgaacgccgcggatacgataccaaccggttgcaatggattgagcaattctaaaggctaccagcctgactgcgacacgccgtgcaaccggaaaacaggattatggattacaaaaacaagattatggagtacgaaattattcatcagcccgaacagaatttgttcaagacagaagtggacggccgcaccgcctttgtacaatatcgccttttaggtgattcgctcgatattatccacacgattgtaccccgtcccatagaggggcgcggaatagccgctgcattggtgaaagctgcctatgactatgcactggccaacggtatgaagccgaaagctacctgctcgtatgcggtaaggtggttggagcgccacccggaactggataaaggataaaaggatatgaatatgatgtgcgttccgagtggcaactatatagagaactggttgtgatgttgttacaacttgaatgagaacagttcaagtagttcttcttttttcaaaggctttgtcagaaatgcattgcaacctgcttccatggcgcttaccctgtcagcatcgaaggcattggcggtaagtgcgataatggggatgataggattcagctccctgattttccgtgtcgcttccaaacctcccataatcggcattttcatatccataaggacgatgtcgaactcttcatcgcgtactttttccaccgcttccactccgttcactacacgggtgatctggtattccttgaggatatgtttcactaacgagtaattgctgtcgttatcttcggcaatcagtatttgcaggtcttttccgtttataccttttaaagatatggagtggttcaaagaaactgtctcttgtgtctgtgctggttgtggcgttgctttcggatcgatgtcttcctgcatacttacatcacatggaatccatgcccagaaagtggaaccgacaccgggcgtggaagtaaatcctatttctcctcctgcgccttcgataattgcccgcgaaatggctaatccgagtcctgttccctgtgcgaattcattgagtttctggaatcgtccgaacaccctgttctgcacctcatacggaatgccgacacccgaatcttcgacatagaccttgattcctccgttttcgagactatatcccattttgatatgtccgctatgcgtacatttcacagcattggtgaggaaattcatccagacctgtttgaggcggtttctgtccaggaatatccagcaatccggaccggaattgccgaggatgaactctacctccggattagtgatcttcggttggatcattgtataaagctcaccggatacttttgccagattgaacttttccctcttgcgttcgaggatgcccgactcgattttggaaaggtcgagaatatcattaatcaaccgtaacagcaggtcgttgttcgattcgataatctccatgtattccgctttttcttcggggtcgtcacaatttaccatgaggccggaaaaaccgacaatggcattcaacggggtacgtatctcatggctcatattggccaggaaggctgatttgaggcggtcggaaagttcggctttgtctttcaatatctttagctcttgtgccattttctcccacttcgtattgttgaagccgatgcctgtgtaacggattatttttcctcttttgtctctttccacttgaatgccggtgatgattaaagtctgccattccttattccatttcgttttggaacggtactggaaattgaattcttgctcttttccttctatcattccctcgaaatatttgcgtacaagttcccggtcgtccgggtgggcagcgctcaaatattggtcgacatcaatcggagtttcagggtgataatcgttgacgggatcattgaatgcggtgaacttccggcctgtcacatcgaaatcccagtaagacataccgacggtcttgaacgtaagctccattttataatttctctctttaagctcctcgttcaggcggtggagcttggagatattctgtcggaagccggtgaagcgtatggtgtttccattctcgtcctgttcgaaaggaacgccgatgacattgcaatattgccaggtttcatcgtattttgtttgcatgcggcaagtgaagttgacggtttcgttttcgcttgacaacatagattggatggcatcgaaataggtagagcggtcgtcagggtgtacgacactttcaaattctttgagagtaacaagtctgttaggggcgtagtcgttgatcggatcattgtaggactcgaacttctgtgtggatacgtcgaagtcccaatgtacgatattgctcacctgcatggccagctcgcgctttgttgtcaggtcttgtgtctttttcaacatttgcactttatccgttacatccagttgtgtaccgacaatcaataactttccacggtgttcggaagataagcgcatccggctttcgtagtgacggtattgcctttcttccttgttataaaaacgcagggtggtgtgcacctgttgcgtttccttgtttatcagttgagcgaacagttgcattaactgtatacggtcttgcggatgcaggatactttgcatctgctccaaagacatttcttcttttgctagcgcgtttccgtgtaatgtgctgaatgtctttttatgcacattatatatccatgaagtcatgttggcagcttccatagccatttccagattcttcttgctttcttccgtgcgaaattctatttccttggcactggtcacgtcattagaaagcaatatatggccgatgatagtacctttatcggctaataccggcactacttgggcttcataaattatagagtttttattttggctgcagaaataggcatcgctgttgatacggtcgaagtcatactcaaattctaaagtgacatcctcacctctctgtatcttggattttaattcctcgtccatataaggactgttaaaaagattgactttacctatgactgttgtacggtcactgactccatacattttcaatgccttatcgttgattttacgtaggacaccattagcatcataaacttcgatactcattggcagactggcgtagatgttttctgtaaacagcagttggtcttgtgtcaatccggccgctccattttctgaagacatattctcatccttagaagaaagtgaattggtttgtttcatttgtttcctatttttattcgtaatcaggactgaactgttatttttatgatttgctgtattgttttacaatcctaatgacagaatatacgtttacaaatgtataataaaaaaccgataagaagaaataatgcatgataaaaaggaaaatctgaacaattcttgttgtttaattgtggataacggattgttagaaacggtgtgctttcgtttttacttatttcttccaccttttcaattgcggaaagaattctttcatggtggcgcgtgcttcatcgatcgtgtactttacttccgaatctttgttgaactcgtcgagatactttaggttaagctcgatcatttcgtccattgtacagtctttggtgaaatgcccgttcttgtagcaatacaggcagtaatcttggtttttgctaccgtccgcttctgttccgaatgtagattcgtcgatcggcatggcacaacactggcaaattttctgttccattttttagttctttagttggttaagggaatgatagacagatctcttgtctctgtggacaaatatagagttttttcccgaaaatagtgttatcctatcttgctctttttagcttttggtttttacgggcaggcgtttccataaccggcgggggatcagtcgccagaagaaaacgagcacgcggtaacgtccgtcgatgattaccgtccggcgtttgcggttcagggcgcgggtaatggcttggcccactttgtctgctttcattagcatcgggtagtgtttaccgtcacctagtagggcggtggcaacgaatccgggacggatatcggtgaagcggatatttagtttttgcaggtgggagagttgttcgagagcatcgatataggtattttggaaacgtttcgtggcggagtaggcgggagctatacccaaacctttggttcctgcgatagaactgataacggcaaggtgtccgccgccatgctgcttgaagtaatcgaaggcagtgtccaccatgcgggtaaatccttcgacgttggtacgtgcggtgttcagttctatgtcgatatccagttccgggttctggaaaccgatgccggagctgagaaggaagaggtccatgccgcctagtttacggataagggtgttcagtttttccgcagcgtctgcctgggtgacgtccagtgactggatctttatttgttccggtgcaatgcgttggaagtcttcgagtgccggttgacgtctgccggctattccgatttgccagccttctctcaaaagatttttggctacttcttgtccgatgccggaggtggctcctatgattatggctcttttcataatggtatatggctgaatgggtgatgtatttataggtttagtaaatgacgtatggcggcccaaggggagtagaatatcattctcggtccggcgaagcgcatggtttgccgcatccgttcacgcatgacaggtttgtagcagtgtacggtacatttcttgcacgaactctttttctcaccgaacgggcaacggtcgagacgggcgtgtgcatagcgcagcagttcttcgcagtcggggcaaagaacggtatttttttcttttttccgacagtagaggcgtatcatcagctctactgtttccttttcgcgtgcaatacggtttttcttcattttatccggttttgtagatcgggttcacaaagatagtgtatctttgcggcatgaaaaagttattgtgcccgcaatgtaaaattgctgctatgtatgtgaagaatgaacaaggggaaagactgttggtatatgtactcgaaaatggtgaagtcgtgcctaaatacccggaggattctatggaaggcttcgacctgacggaggtgttctgtctgggatgttcgtggcatgggtcgcccaagcggctggtgaaacggtaggttttccgttatgataagcgcttcctcgttttttgatttacgtcaataaaagaggaaggtgaatccggattttattcatgggattttccgtatctttgcgcgcaattttaggacatagacgtatggcaacttctaaagagatgacggcagggccggcattaccgttgattttaaagtttacactgccgcttttgcttggcaatctgctgcaacaaacgtactcgcttgtcgatgcggcaatcgttggaaagtttctgggtattaatgcgttggcttcggtaggggctagcacatcggtggtattccttatcttggggttctgcaacggatgttgcggagggttcggtattcccgtggcacagaagtttggagcgagggattatagcacgatgcgcagttacatatccgtcagtctgaagctctctgtggtgatgtctgtcactatcgctattgttaccagtatcttgtgtgcggatattcttcagatgatgcgtacaccggataatatattcgaaggggcgtatgcttatctgcttgtcacgtttatcggggtaccttttacttttttctataatcttctttcgagcattatccgcgcgttgggggatagtaagacgcctttctggtttctgctcctctctacggtgttgaacattgtgctcgatttgttttgtattttggtgctcggctggggagtggcgggagctgccattgctacggttatctcacagggactttcggctgtgctctgttatatttatatgtatcgtaagtttgacattttgcagagtactccgaaggaacggcggttccagtcgaagctggctaagacgttgctttatattggtgtgccaatgggattgcaattttccattacggctatcggtagtatcatgcttcagagcgcaaacaatgcgttgggtacggcttgtgtggctgcctttacttcggcgatgcgtatcaagatgttctttatctgtacgttcgagagtctgggaatcgctatggctacttatagcggacagaattacggtgcgggcaaaccggaacgtatctggctggggattaaggcaagcgtcttgatgatgattatctatgcggcgtttactttcgtgctcctgatgtcgggagctaaatactttgccttgatttttgtagacccctcggaaacggagattttactggatactgaacttttccttcatatttcctgtatgttcttccctgtgcttggattgttgtgtgtcttgcgttataccattcaaggagtgggttttacgaatcttgctatgttttccggagtggcggagatgattgcccgtattctcgtcagcctttatgcggttcctgctttcggttttctggctgtctgctacggcgacccgttggcttggatagctgcggacttgttccttgttcctgcttttatctatgtctacaagaggttgaagaagcaggtgcttacaaacgcttcggttacgcaagcggtggcataggggttgccggcttgcgcaaccggagagaggttagtcttgtatcggatatagcgggttgccgctttcgtctacttcagtccattcttttacgcttacattggcgaatgttaaggagttttcgtcaatgatcgcccggaaaagatatgagtttcctgccgctagcagactgttggggggagtaagcggagtggtgtaggtgcgtgagaaactttctccgttgaccagtaattccagtgttaaagtcatgggtaaggaacttttcacaggcaacatggtatattgtacggtaaagtcattgattcccatgatagcggccttgtcataagttgtttccgaagtgatgattccggtagacaaatccatgactgcgcccggtttcggcggagtgatagaggcggagataatcttgttgagagttatattggcacttcccgacaaggcgactactatttgcgtagctgcgtgctggtaggtgatcggaatgttgatctgggagtttgtcacgtcttggtgcgtagcgtgccaccagagatagtctactccattggataaaggggcggatatcccgttggtaaaggtcggggcgggattcttggaattgcaggaaacggcatagaaattatagatgttgttgctaagatacattttatatccgttgttgcctgccagtacgccgggagaggaggtgatgtatgtaccttcggcaataggatctccggtgattatgttcgaggtattggacaggtaagcacacaaccaactttgtaatcccttgcccataggcgacatggcgcgggtgatgtttcttccttctacggatgcgctgaaagtaactaaagtacccttttgggaaggattgccgttgtcgttgccactgtcattgccggacgggtggtcattaccgttttcttcgttaggatcggcgaggtcgatataaatgttgtttttggagcaggctcctaatagcagcatggctaatgcagatacagccaggtactttgtaattcgaaaattaatactcatagtcaggttctttttgaaagttaatagttacacctatatacatttcaaaaaggttttggttcatggcataagagtctttttcttaaaaatcaggctctttctgtatgcagatgatgtctccgtaaatggggtgacggaattctatgtattcggcatgaagatatagcctgtctgctttctttccgtagagctcgtcgcctagaatggggcaattcagacctttcgggtgggcggcgtgtacacgtagttgatgagtgcgtccggtcaacgggcagaaagcgatacgggtatgtttctctgagtttgtgatgatctgatactctgtgatagcttccttcccatgttcttcgtcaacgctctggcacggtcggtcgagagggttcggacagagaggaagctcgatccttcctgcctttccggttgtacttattacttctgttgctcttaccttttctgtttttcttgtgtttcctgttgtttgatttgttgtttcttcggtttctgttatgcacccgtccagtaaggcgatatatcgtttttttatacttctgttctcaaattgcgcctgtaaatgttgatgtacttcttttgtcttggcaacaagcagtaaccccgaagtcgccatatcgagtcggtgtacgatcatcggtccggttgcgtccggatacttttctttcaggcggtgataaacggaatccatatcctcctcctttcccggcacggataacattccggatggtttgttgactaccaccagccattcatcctcaaacaagatttccagttccgtgtctttatgcgtattgcttaatagcggattttcgtctacctccagtccctgtaacatatgttgtagaatcggctcgcacttccctttacaggaaggatagtaatatccatgacgccggatttcgtttttgggagagtccccccaccaaaattcagccattgccaatggctttagatgatgaagataagcatattgcagtagcttgggtaatgcacattcacccgcacctccgggaggtactttctgaacagtctgctcaaaaattgtacataagtctttcacttctcctttcgcgtttaacatccggaactgcccgaataacttttgttgcaaagccgccgaacgttctttccgttctgttttcaagctttctatgtccgtcttgaaacggttaacttcggtttcaagttcttccagccgttttttccatcccttctctttccgtttgtattcagctttttgatattgactttcccgaatcaagacggcttgttcttcttcggaaagtccgggcgaggactgacggcggatttctctggcctcctttgctgcttttaactctgctttggcttgactcaactccgctttagcctgttccgtttctttcttccacctttcttttgcatccagatagggacggctgttttctaattcattgatgcggatattgatagcggagatctgttcttcctctattttgaagaatccttgtggttggagcaagtcataaacaggaggaacaaaataagtatgcagattcttccctgccagattgccggaaaaggctgccaggtaaccgattccgccttcttcgtctttatcggtactttctcccgtttctttttccctcccgtttcttgtcctttttcctgtctcttgtacaatcaataccccgaacatctttccaagcgtcaattcttcctgccattccttccggcttgaaatatactttttcacttcttccgccgctaatacgcacaacggatgaggcgtatagtggaaaggataagtgaatttctccggtagcgcaatatgagaaacgctcttcttgaaaaaatgtatcatcggtttatatatgaatgtgattatcggtgcaaaagtaaagtaaatccgcgaattttgttctatatttgttctggagtttaaatgaaataaaatgaatgtttgaatgaaatggataagatagaggaaaaaccgaaactagcttttgtaggcaacagtcatatagcgttctgggcattgaatatctattttccgcaatgggaatgcctgaactatggtgtgcccggcgagggattggcttatgtcgaagcgtttgatgtggacacatcggattgccaggtagttattcagttcggaagtaatgacatctatcagttgaacgatgaaaatgtggacggctatgtagaacggtatgtaaaagcagtgttggctgttccttcccggcagacttacttattctgtatcttcccacgcaatgattacgatgattacagtacgtcggtgaataaattcatctgtatgcttaatcagaaaatacacaggaaactggagggaacggacattatctatctggatgtgttcgaccgtttattgcaggacggaaggctgaatcccgaactcactattgacgatctgcatctgaacggaaaagggtacagtatcttgtcggaagccttgaggcgaaccttggaacaacctttgaaacaagcccctgatttgtaaactatccccgacttcttttgttcctgcttttattgcgtaaattaatggcatatcagtttattttttctatttttgtccccgattaacatttataataacccccataaagcgataagactatggaaaaagtaattatcaattcgtacgaagaattcgaaaagctagtaggacaacaaataggtgtttcagattatgtggaactctcacaggaacgcatcaacctttttgcagatgcaacactggatcatcaatggattcatgtggatacggaacgtgccaaagtagacagcccttatcacagcacgattgctcacggctatctgacattatccatgcttccttacctgtggaatcagattatccaggtgaataacctgaaaatgatgattaactacggcatggacaaaatgaaattcggtcaggctgtgttgtcaggacaaagcatccgtctggtgactacccttcattcattgaccaacttgcgtggtgtggcaaaggctgaaatcaaatttgctattgaaatcaaagaccagcccaaaaaggctcttgaaggaattgccgtattcttgtactatttcaattgatttaattcataacgacataagagagaagctgttttccgtagcgggagacagcttcttgtttttttgttcgttatttttttgctttcatcgcctttagggtatttctgcgtacagcacgaatggcgggattcaataattcgggttccatgatttccagcattgtgcgtagttcctgttgcagttcgggaatggaacaggtcagttgataggcaagttttatgcaaagagattgtacaccgcccggttcatgtcggcttatgacacgctccaggcagaaatcgaggaaatccattcgtggcggattggctgccggttgctggctgagcaggttcaggagcatccttcgttttcctgagtgcggacaggtcattgccgcgtcaatcagttcgttttgtcgccggctcaaccattctacatcctcctttgagaaatgcgtacaaacccacaatgcctgataagagacaatatcgtcctcgtcaaagataaattgatagacttcttctctgagttgttcgtcatcttgtataaagtgaagtatttctctaatatcttcaatatgcacacgttcggataatctcgcacgtaggttcatgtaactttctttttgagggttaacctttactcttacttttttcgacagttgcttctttcagctgcaaatgcaggatcggataaggttttcccataccgtccgtttcgtcccttccgatgatttggaatcccatgtgaagatagaagctgagtgctttttcattctgctcgtttacgtccaccttatccaactgctttttccgagtagcgtattccagtaatcgcttgccgtatccttttccctgttcgccgggatatacgaataacatctcgattagttcatcgctcagtcccatgaaagctacaatctttctgccggcatcccggataatgtatagttctaccgccggtaaataatgattgcgcaccaatggcttgtaaaactggatatgttcttccgtgagaaaatgatgcgtgtggcgtaccgatgcttcccaaacttccagaatctcgtcatagtcttgcggggcaggctggcatatattcggaagatagtaacacaaatggtcgaatatattcccgttgtaagtcagttccgcctgatgcagtacaccttcatagataaatccgttccgttcaagcacttgttgtgaccgtttgttgtgtgggtaacaattggcggtgatgaggctgagttgcagttcgttgaaaccgtagttgagtatagcctgcaccgcttccgtcatatatcctttgccccaatgcgcttcgtcaagccagtaccccagcatacggacctgtggattctcccgtttcgggtcggggacgattccgatagaaccgataagttgctgcgtatctttcagtatcatcgcccagatattctcttggccgataaacacattctgaagaatctcccgcgattcttctatcgtcttgtggggcgcccaaccggcattattacccaagttcgggttctggcaacaggcaaaaaatgcatccgcatcctcttcttgaaaagggcggatcagcagccgtaccgtctctaggctacggggcgtcacagtttcctctgtctcagtcttcttctccatattctttcttgtatacacattctatacggttcccgtccgggtcaaggatgacactttcaaaatagccgtctcccgaagtgcgcggctcaccggcaatggtgtaaccttcggaacgcatttcctcagtgaaacgaagaacttcctcctggccgggaaacgtgaaagcgagatgtgtcaatccgactctgttttcttccaccaccgtattctgtacatcgggacggctcatcaattccaaagaaggaccttcaccgaaagatatgaagtaagactcgaatcccttcttgggattcacatatttctcattgctttttccacccaggaagcggacatagaactctttcaactcttccaaacggaaagtccaaatggcgatgtggtgtagtttcatttttaatctgatttttcttttttatcattaactattactctctttatttggcagactgcatcgcgtattcataaacaatacgtgaaatatcagcgataatcttactgttttccgcaaagctttcttcggaatctttcacaaagacagctatgctgtaagtgcgtccgtctggcaaaagaacaaagccgatgtcattacagcctatctgttgtcctttggcattaaggtcgcctgtccccgttttatgtcctattaccactcctttatccgctaaaggagcaaccagccggtcttgcccggtcttgcattctaccattgtctgatagatgaaatccttatattcttgtgcaaacaacggttcccgtcggaaaatctccattaattcggcagcagccaatggtgtactccagttttgataacacaaatccaaatcttcgtgcatggcagtttccgtaccgacaatagcacaatcccgaatgcctaacgaatggatatatcggttcacggcatccggtccgccctgataatcaaaaagtatatcgcaggcattgttgtcactctgctgaagtgtgtatcttagcaggtcggcaatgctcatctcaattcccccttgcggatatttatcccgtaagggactatacgtatccggtttcaaatccgatttctctatccttagcagagtatccaatgactgattccgtttcgccatataatcggctaacgccaacgcctgatgaaacttgaaaacactcatcaaaggataatgaatatcattattgactgttaccgtatctttttcatctatgataacggcaatccctatttcagctttcttgtctttgatagcttctttcagttgtgtttcgagagaaacactccggcaggaaaacagcagaacgggaatgaagcaaagaaacacgatgaatgagcgcataatcaattttttctttttaataggttactaattctttatcgaagtcacaaaggtatgaatagtaatttgaaaaagtagggataacatcttaaattctattatgacaaagttgtaaacaaagaaattagattttatttgcttattccgttatatagaagagctgtcccttgtgaaatagggaggtatcgcatttaaccatagaaagataagtcgttcaatttgtaacctccgtacttatgagttgtgtcctgccttgaaaccaacggtttcaaggtgcgaaactgttggttctgcggtttgaaactttagtttcatacgcttgaaactctagttccaattgcttgaaaccattggtttcttactgatgaaactatagtttctcttagctggaactttagtttcacgcagagaaaactattacccccctaatttgtgacagatgacagcaacttaccaaatatattcttctgtgtagcgttggtaagttggttcttcttttatccctttattacggaatatttgttttatataagcttggtctttaggcataagtccccgttctccacggtagaaccggtagtatcctgttttcccatagtgccccaccagttgcattctgatactgaccgcatcctcataaggaattctgtcaagcaatcgttttagtccccatgccacatgaactttgacagcggtcttgaaacattcgcattggtttccgtctgcaggataacgtgccggattgacgatagagatataaaggtaatcagttatttcatttttggcagctatgtagcgcaggcatttcaaggcttgtggacattggtcgttgaaacaacgggagaaattgtaggggacagacagactgtcgggttcttctttcattttgtagggtttattttatttgcgggattattttgaatatgtacatctatattctctacaaaagtaggactttattttgataatggaaagtgtttggattgttttatttgtacataatgtcattttaagatataaatattattggtggtgaccataagtattcactgtaatgtggttagtcaatttaaattataaaaaacataggtgtttactacattgcggaacaactattttgtatctttgtagctaggagattttaattgcattattgaactctcacacattggattgggtgaatgcctcaacgttagtttggctataaggagaagaatattggcgcaattgaaggacttgaagttgattgaaggaatgggaattgatgaaaaacaggacattgtaaagtaagcagtaaaggtaaaagtcttaaaaacagactgaaatgatgaaactaaaatttaaataaaatgcataaggtttggttatatgctccgggagagaatgcgtctaaatgggatgtgtgtctatctcaaaacataatgtgtattggttgggatgaaatgggcaatcttttggaatatgcttcaaagaaagaaatggcagctaggttgcaggaaatatatgataagccggaggcctcgtttaaaaatgacagcctggcattatgggagttcgctcatgagatgcaggccggtgatattgttatagtcaagaaagggcagaatcaaataatagggcgtgggattgtggaaggtgattatgcctttgatgagtcttttcctgattttaagaatgtccgtaaaatgcaatggacgaatgccggagaatgggagaatataggtaagaatgtccaaaagaccttgaccgatataaccaagtatccggattatgtggaatctttggagaaactatttgaggataaatctcaaaagcaatattggtggcttgtggctagtcctaagatatggagcttttcgaaagctccggttggtaaaatacaagactatactctttataatgatagtggaaatcagcgaaggatatttcaaaattttattgatgcaagagaaggcgatattgttataggctatgagaaggtgtgtcgtaatacacgatgcgccttcttttttttcattgactataaaaatcggttcattttcttt

SEQ ID NO: 2977 - DNA, 37164 bp, Unknown
  gut microbiota DNA sequence
agaaaatgaaccgatttttatagtcaatgaaaaaaaagaaggcgcatcgtgtattacgacacaccttcttttacttttctccttttttttatggctatatgaaatctttcatatatttttgttgaaaacataaaacaaatacaagcaaagccaacatatgccgtctatctgtcaaggaaattgggattgtcaaaactgtccaaaagctgtgagcaatgccattgctcatattatttatcagcggggtttccataggcctgcgcataaatgcgaggaaaatttcattctttttttgatgaagggagagatgctggttaatagtcaggaatatgcaggtacgatgctcagagaaggtgagtttattcttcaggctatcggatcaaaatttgagatgcttgctatgactgaatgcgaatgtatttattatcgtttcgttcaaccggagttgttttgcgatttgcgttttaatcatatcatgaaagaggtatctcctccgcttatctattcccctttaaaaataattcctgaattacaatatttcttgaatggctctataacctatttgaagggagataaagtctgtcgggaattgttgtctctcaaacggaaggaattggcatttgtgttgggttactactactccgattatgatcttgcgagcttggtacatccactttccaaatatacaaatggctttcaatgttttgtcattcagaattataaaaaagtaaagacggtagaagaactggcacaattaggcggatacactatcagtacattccgtaggattttcaatagtgtctttcatgaacctgtgtatgaatggatgctggcacgccgcaaggaaaacgttttggacgatttgcaaaactcagaatgtacaatctctgaaatatgctataaatatggatttgagtcattacctcacttctccaatttctgtaaaaaatcctttggggcttctcctcgtaatttacgtagatagaaagaagttacgatttgctgataaatgacagaggctgaactctctacattgagacaacctctatctatatttatgctttattatagattctcagttctgctccattggtttcctcaatttttctgctacttgcagtaactgtgctttataatctatcatagaaatagcaggaattgcaccaggaggcaggtttttcttgatttcctcgtttttctttattaagtctgcacaagttttttcgcaccattgagcagctttttcgcgtaatgacatatctgcacatgctttgttcatccatttcacccactgcaataattgttcttcatcgcctagaattgtgtgtgaagcgagtagtttgtctccccgttttacaaacgagtcccactggttcataatgccgtctctgttaagccgtagattttcgcctatcatgtcggcttctgctacattcatctgtttcatacgagtgacataagcattcagtccttgttcgtcgaatgtacaatgtttcgactcatccactttcagatatgtataagagccgctaatccagtcttcaagtattctgcggttgagcgaagaagcttgttgtggaaatctgtcggctatctctttcttatgatttaccacatataaaaatgccgaggagttgatatcatgtatatagcggtagaatatggagaaataaccttcatattccagtattttctgttcttttccctgtaagaaatcagcagctacttttcctgcctcttcttcacggttggcggcagaaagtacattgatatatccgcagacaaaagcagagtcacgctcacccgctttatagcgtttcctaagacctgaaattccgccggactctactcccagttttactttttccaacagtgcagacgcttcgtcggcaccaagaaggcgatgtactacttcaccacttgaatttaggaaaagaagggtgggatagcctcgcacatcatatttttttctgatatctatcccttctcctttttccatatccattttcagattgacaaaatggcggttgaagtaatcggcaaccagagaatctttaaaaactaccttggacaacattcggcaaggaccacaccaagtggtaaaacaatctacaaaaagtagtttgttttcttctttagccattttcaatgcattggcaaaagagagttcgcggaaagcgatgccatccggttgtgcaagagtcatttgcatttttttggcagggatcatttgtgctccctgtgcaggaactacttgctgtccttgtatcgtttgaaacgatagcagacatactgttgtcatacagacaagaaagagttgtttcatattaattattttgtgttgataagaataaatcccctgccggcatgccggcaggggattctgtcattaatcaaattgtccctcgactcttaaaacttagcaataaatttagtctttcagttttgcgatgatgaagtcgcggttcaagcgggcgatgttgctgatagagatgttcttcggacattccgcctcgcaagcgcgagtattggtacagttaccgaatcccagttcgtccattttagacaacatggcttttgcgcggcgcaaagcttccggtttaccttgcgggagcaaattcaactggctgacctttgcagaaacgaacaacatagcagaaccattcttacatgcagctacacaagcaccgcaaccgatacaagaagcggcatccatagcttcatcggccacaggcttcggtatcaggatagcgttggcatcctgcggagcacctgtacgaacgctcacgtaaccacctgcctgcatgattttgtcgtaagcggtacggtctaccattaagtccttgataacagggaaaccggccgaacgccaaggttcaacggtaatggtgtcaccgtcgttgaagcgacgcatataaatctggcaggtagtagcacctgttgcaggaccgtgcggatgtccgttgatgtaaagagaacacataccgcagataccttcgcggcagtcgtgatcgaatactaccggttcttttctttcgctgatgagctgttcgttcagaatatccagcatttcgaggaaggaagtatcaccgggaatatctttcatttggtaggtttcaaaagcacctttagctttcggaccagcttggcgccataccttcagtgtaaatgatatatttttatccattgtcttctaattcttttaaatgtttaacttcaccgattagctcttgtagttacgggtctgaaccttgatagcttcgtataccagcggttctttgatcaatatcggagccttttcatcgtcaccttgatattcccagcaagctacgtagaagaagttttcgtcatcacgtttggcttctccttcttcagtctggtattcttcacggaagtgaccaccacaactttcgttacggttcaatgcatcgtaagcaacaagttcacccattgtgatgaagtcgtacaggcggattgctttgtcaagctctacgttcatgccttctttagaaccggggataaacaggttggtttcaaattccttgcggatttctttcagtgcagcaatacctttcttcaagccttctgccgtacgtcccatacctacatattcccacatgatgtgacccagtttcttgtggatagaatcaacagattcattaccttgtatgctcatgaacttgtcgatcttagcttgaacagctttttccgcttccgcaaattcgggaaggtcagtagagaaacggggaacagtaatctggtctgccagatagttctggatagtgtaaggcaatacgaagtaaccgtcggccagaccttgcatcaatgcagaagcaccaaggcggtttgcaccgtggtcggagaagttacattcaccgatagcgaacagacctttgatggtggtttgcagttcgtagtctacccagataccacccattgtatagtggatagccggataaatcatcatcgggttataatatttcacgccattgatttcttttgccagttcgcccggattaacgtcggtgatttcttcatacatatcgaagaggttgccgtaacgttgaagaacaacgtcgatgcccaaacggttgatagcttcggagaaatcgaggaatacggccaaaccggtgttgtttacaccgaaacctgcgtcgcaacgttctttagcggcacggctggcaacgtcacgcggaaccaggttaccgaatgccggatagcggcgttccaagtagtagtcgcggtcttcttcaggaatatcgcttcctttgatttcgcccttctggagtttcacagcgtcttctttcttcttcggaacccagatacgaccgtcgttacgaagagattcggacatcaatgtcagtttagactgcttgtcaccgtgtaccggaatacaagtcgggtggatctgaacgtatgcagggttagcaaatacggcacccttgcggtagcaagaaacagcagccgtacagttacaacccatagcgtttgtagacaggaagtaagcgtttccgtaaccaccggtagcgataactactgcgtgagcggcgaaacgttccaatttacctgttacaaggtttttggcaatgataccgcgggcacgtccgtcaacgatgacaacgtcctgcatttcatagcgggtgtaaagttttacagtacctacgtttacctgacggctcagtgcggagtaagcacccagcaacaactgctggcctgtctgacctttagcgtagaaagtacgtgaaacctgtgcgccaccgaaagaacggttgtccagcgtaccgccgtattcgcgagcgaaaggaacaccttgagctacacattggtcgatgatagcgtttgatacttcagccagacgatatacgttagcttcgcgggcacggtagtcaccaccttttactgtatcatagaacaggcggtaaaccgagtcaccgtcattctgatagttcttggctgcgttgataccaccttgtgcagcgatagagtgtgcacgacgcggagagtcctgaatacagaagttgaatactctgaaacccatttcaccgagtgaagcagcggcagaagcacctgccagacccgtacccacaacgatgatatccaaacgacgtttattagcgggattcaccaatttctggtgagctttatagttggtccatttctcagccaccgggccttctggaatttttgaatctatcttgatcataatattatttacaatttaatcatttacaatttactatttagcaagcaccgccacaaatcagtgatttcgcgaagaataccactactacgagtgcgaaaccgagtactacaatcgttgaatagatgttagaaatacatttccaacggttgatccatactttgttgttccaccccagtgattgcatagagctccagaaaccgtgagtaaggtggaaccacagagcaaacagccaaacgaggtaaagaaccacgtaaatcgggcaagagaaagtctgctggatgtgataagcaccgtttgcggcataagccaacgtcagtgtgtcggcgtgcatacccatgttgtgcatcagttccggcaactgcatttttgcccagaagttgaacaagtgtaagccaaggcctacgattacgataagacccaacaccagcatgttttgagaagcccactcaacggttttcggcttgtcaaccactgcatagcgttcgctaccacgcgctttgcgattctgcattgtcagccagaaggcatagatgatgtgaattacgaaaagagcagccagtcctacggtagccgctaacgcataccagtttgctcccaggaactcacaaaccatgttgtaaccatcagccgagatgattgcaaccaggttcatcgccatgtgaaatgttagaaacaggacaagggcgataccggtaacgctcatcaccactttccttcctacagatgaattacttaaccacataaatgattgaatttaaattatttaattgttagaactaaaatttcaacgttttacacctcttacggactgcaaaaataggggaaatagattgattgagcaaggaattaaagaaattattccttaatcggcaacctttccgattttttcaccgttggccgccttctttcgcagcgctcggggagtgtcgccgaaagagtctttgcaaaagtgtgcgaagtgggatagagagtcgaaaccgtagcggttacaaatctctgtaattcgcatattggtacgctggagatcttccagaatgccttcccgctttttctccagtatccattcgtatacaggtatgccgtagaggtttttaaaaagccggcggaaagtagtggtggtataacctcccaaatgcgcaaattcttctacgttcttcaccgtgttgtagttttgcattacaaaataatggaaactttttgtgtacgtactgatcggatagaagaatgaacttaattgaggcgtcggataataattggtgatgaggaaagccaactctttgcatttcagttcgatgaacttgctgcaaggtgattcttcaccgagaaattcgggcatactggtgatgagatgatgaagcctttcactcatgatcagcggagtgtaggtcagcggtgcttctgcctgttccgttatttcacggtaacgttcttcgcaaagcaggggtaactcattaaaccagtagacgatgtattcaacgtccgtgagggcaagcaactctattttcgagccgatagcttgcaggataaattgcttttcgcgcaggatatttccgggatattcttcactgttgataagtaattcgccttttatcatgaaaagcatacagttttgcgtgcacttatccttcgggatatgcgctcctttgggtaggtttctatacacaaggatgttctcgttgacattgggacatcctgtgcagttggtgtattgtatgcaaaatgaatcttttggcatgagttttatgcgtgaattattatcttccgggaacaaagataagtttttttgcggaaaacggaactttttctttcatttatgtttgagcagaaagttgacagcaccgttataaaaactctgtgtcctccgtagtgaaatcttatttatagtacttctccagtaattcctgcatctccggatatttctcgtcggtgtcacctacttccttgcgaagattcaataaatcttttttcatctgtctgatgataggagcgtatttcggatcgttatacaaattatgattctcgtgcgggtcttcttctaaatcatagaaatcccatgcaggagtgaaatcaaagttttccgtatcggtcatgtccagattctttgcgtaatagaatatgagtttgtagcgctcggaacggatagcgaaatgtgccgggcggatagcgtgattcgtccagtaacggtagtagatttctttccgccagtctgccggagtttttccttcgaggttgccggtgaagctgtgtccttgtacattctccattttcactccggcaaattcagccagtgtcggtgcaaagtcgacgttgagtatcaggtctttcaagcgtttcccggcggggatttttttcggataacgaatgacgaagggcatacgggcggcttcttcataaaacattcgtttgtcgaagaagccgtgttcgccgaggaagtaaccttggtcggagacataaacaacgatggtgttgtcggcaatacccatttcgtccagtgttttgaggagtttgccgatgttgtcgtctatggtggctccgcaacgcagatagtcgcggatcagtttttgataaattgcacgccgggcggtggtccgttgcattccgtcggtgttgaaaggtagtccgggatagcggcaccaccacttgtccgggtctttggaagcaactcgccagcgatgtcccagttcttcgagcgtttgcccttggaaagaacgcccgttcgtttccggtccccagtcgaggaagttctccggttcggggaaggtgactccgtcataaaggtgttccatgcgtgtcgggtagtcgtatggctcgtgggtggctttgaaatggcagcacatcaggaaaggctggttgctgtcctgctgcttgatccagttgatcgctttttctgcgacgaggtcggtggagaaaccgggcacgcgctcgccgaacggacggttgcccggccatgggtcgctgctttcgatgaaagtagggtcgcggtattctccctggtcgtagaaaatggaataatagtcgaacccttgcggttgcgatttgatatgccatttaccgacaagtccggtattgtagccgttggcttgcaggacggttgccagtgtgggaattgaagtatccaacgaatcggctaacgtataaagcccgttccggtgactgtaaagtccggtgaggatactggcgcggctgggggcggagatagagttggtgcagaagcagttgtcgagcactacaccttcgtttgccagccggcggatattgctgttataagcataatctgccagaactccgccatagattccccatgcctgtgaggtatggtcgtcgctcaggataaaaaggatattgggccgccggcttttatccttcgggtcttgttgttggttttcttgtccggcaaattgagcaccttgaatgtgtgtcattgctccggctgccagcaggccggttagtattagtttattcatagatatataggtgttgcatttcttcaaatataagtttgtgcttacatctatttttttattgtacgcctaaagatagagaatattttactactttctgtctttaggcaagttctttttactattctgatcgtatttctcatagcttcgccctgccataataccccggcatcggcgcatagatcggattataatacgtattgatattctgcaatttcttttcctctttcagccgtctgatgtgccgggcggcagtggtagcggtaaagttgcacagcccttgaaagtcggggcgcgtcaatatcgagttgttgctgaagtaatttgtcaggagcttgtcaacctcttcgttcgtgcgggaggctgaatgccgtttcactttgcttcgttccagatgtacgacgcttaccgactttttaagtttgatatccgccttgaaactgatgttggctttgagtttgatttggtttgcctttagtttgggcgaagtgattggttcctgactgttcagctttatctgaaagtaaccgataccatccaaatggacgctttccccttctcggagccgctcccccataaagtggcttagagattcgaggacagattttacgtctccctcggtcagtgaagttgccgtttggatttgtctggccagataatccgtgtcgatatgctggaagttgaccacacgtgcgtggtatgtctctttgtctgcctcgtccttgggacggggagttttgtacaattcaaattgtattgccattattttctatttattttatttgtaaggacatcgtattttgtcgttgcaaaccgggttaataatctttgggacttagaggggattgtgttatatagctgttgtttgtttgttatcaagcggctttatataagttgtcctgcctttattctttgattaaggcataaggatagttgtgttccggtgccttgatcgttcgtttgtcacagccgtggtaactacttgccacggctgtggtagcttctcgtcatggccgtggcaggaattcgtcacggctgtggtgagtagactatatcggtagcaaagataaactatataagggagaaaagcaaagtattcctgcttgtttaaggaacttgttcaccttgtcatgatgactgtatatgcttggaaaggggccgaactatattgcgaagcgtaatccggcggtgataggtgatagatgtggtgataggttaagaaacaacctgtcaccgctggaaacctcgatgaataaagcgtttgattaccgacggtgataggtgaaagagaaatgtgtgttttttatcgggagagataaggattaatttgctctcagtttcttctgatattcctccgaattgagaatctccaacgccttctgtacgctttcgttcgtcgtattcatcacccggaaatattcgttcatatcccaaaggtcgcgggcgatcaaggctttgagttgcgtcttgatgagcgggagcgatttctgatactgctcttcattgaacttcacgccttctttctcacccatttcacgcaaggttgccagcatatcatcgtctatgatgaacttctcattaaacgattcgaacttcttgtacttgttggccagttcctttcggtgtccttcgataaacttcatggtgaatttgataacggcgcctttggctaccaggttgcggtgataatccgtgtaaagagtggtgtcaatcggcacgaaataatccggcatgataccgcctccgccgtaaacggtacgaccgagtttcttggtctgtactttcaatgagtcggggaagtgaatgctgtcggcattcatcagttcaccgtggttgaagcgctctatcaggtctttattgtaatctgtcgagctgtcgtaaggcttttggatgcagcggccggcgggagtataataacgggcgatcgtcaggcggatcattgagccgtcgggcaagtcgatcgggcgttgaaccagtcctttgccaaaagaacggcggcctacgatgatacctctgtcccaatcctgcactgcgccgctgacaatctcactggcggaagctgtatattcgtctaccaatacgatgaggcggccgttacggaactcgccgttacctttggcgtagaagtcactgcgtttggcagtccgtccttcggtgtagacgattaattccttttgatccaaaaattcgttggcaaggtcgatagctgcattgaggtagcctcctccgttgccttgcaagtcgagaatcatatccttcattccttgcttctgaagttctttcattgctttcttgaattcttcggcagtcgttgccccgaagcggttgatgcggatatagcctgtcttcggctgaatcatataggacgcgtcaaggctgaggataggtatcttgtctctttttacggtgaacaccaacgggtcttggacgccgcgacggacaattttcagatttactttcgagcctttcggaccgcgaagacgcttcatgatttcttccgtactcatctttacacctgcaatggcgctgtcgttgacggcgatgatacggtcgcctgcaaggattcctattttctcggaaggaccgttgctgacaggttgcaccaccaacagcgtatcttcaatcatctggaattgtacgccgatgccttcgaaattaccttgaagcggttcgttcatcttcttcacttcttcggcgtccgagtaggtggagtgcgggtcgagttgggccagcattttaatgatagcttcttctaccagcttgtcttcgtctactttatctacataaaagttggagattgcaaactctgccatttgcagcttgcgcatggcgggcgagccgaaactctgggcctgtacggctgatactgtccataggcaagccaggagaacgtatattgtaatcttattcataatcttgttattttaggttctattcttctcaactgatcttcatccctttcggaataaactggctgatgtctttattaaaggtcaatagctcgcgtacaatagtagagctgacacaagtcagttccggctccgtgaaaagcagaatggtttcgataccagccagtttgcggttgatgtctgcaatcgtttcttcgtattcgaagtcttttacggtgcggataccgcggacaataaactttgctcctacttcctgtgcgaagtcaattgtcagacaatcgtatgacattacccggatacgagggtcgtccttgtagagttcccgaatcatttcctctcttttgtcgatagggaaatacgtattcttgttttcgttgataccgattcctatcacgatttcgtccataaaggtgagtgcacgttccactaccgaataatgtccgatggtgaaagggtcgaatgtacccgggaatattgcttttctcatgatgccaagtcttcttcaataaccaagttgtctataataaagttctgtcgttccatggtgtttttacccatgtagaattccagtagttcttttactgcgtccgttttgcgcaatgtcacttgttccaggcgcatatctttgccgataaagtgcttgaactcgtccggcgagatctctcccaatcctttgaatcgggtgatttccgggttcggacttagttcattgatagcattgacgcgttcctcctcgctgtaacaatagagcgtctttttcttgttacgtacacggaacagaggagtctgcaagatgtatacgtgtcccttcttgatgaggtcggggaagaattgcaggaagaaggtaatcagcaacaggcggatgtgcataccgtccacatcggcatcggttgctacaatcactttgttgtaacgcagtccttcgattccgtcttctatattcagggctgcctggagcaggttgaattcttcgttctcgtacaccactttctttgtcagcccgaaagaattcaacggtttaccacggaggctgaataccgcttgtgtgttgacatcacggctcttggtgatggaaccgcttgcagagtctccctcggtgatgaagatgcaggaatcttcttccagcccttttcctttcgggtcgttgaggtggatacggcagtcacgcagtttgcggttatgcaggttagctttcttggcacgttcgcgggccagtttcgttacgcctgcaatggctttgcgttccttttccgattcctgtatcttttgctggatagcttcggctacgtccgcattcttgtggaggaagttgtccacttccagtttgatgaagtcgcctacgtatttattgacggtcatgccgccgggcgccatgttggtagaacccagcttcgtcttggtctggctctcgaagatcggttcctccacgttgacggcaatggcggcaacgagtccgttgcggatgtccgtataatccatgttcttgttgaagaactctttgatagtacgggcgatatgttccttgaaagcactctggtgagtacctccctgggtggtgtgctgaccgttgacgaaggagtaatattcttctccgtattgtccggtgtgggtgaaggctatttcgatgtcttctcctttcaggtggatgatagggtagaggccggttgccgtcatgttgtcattcagcaggtctacaagaccgttacgtgacaggatgcggtgaccgttatagataatggcaagccctgtgttgaggtacgtatagttacgtagcatggtctcgataaattcgggcttgaaacaataattcaggaataatgtattgtccggttcgaagaagatataagttccgttgtcttcttcggtggtctgcgtttcgtcagtcagcagggtacctttggagaaagtggcgatgcggactttcccgtcgcggtaactgcgtacctcgaaacgggagctcagtgcgttgacggctttcacaccgacaccgttcaacccgacgcttttcttaaatgccttgctgtcgtacttaccaccggtattcagcatactgacggcctcaatcagctttccttgcggaatgcctcgtccgtagtcacgcacactgacacgaaggttttcttcaacggtaatctcgattttcttaccggcttgcatcttgaactcgtcaatactgttgtcaatcacttctttcaggaggacatagattccgtcttcggcatgtgcaccgtcgcccagcctaccgatatacataccggggcgtgtgcgcacatgttccatgtcgctcaggtggcggatgttgtcgtcagtgtactctactgcattgttgttgtctacaggtatcaattcgttctcttccatagctgtttttttattttatctctttgatgaacgcacggcggcgcttatgttgttgagtctcaaagtaatcccattgtgcctgaacctttccgttcagttccagttcggggttgctttccgcaaagataaaacctaatttttgataaaccggaattaaatcggaaaataacaaagcgttaacacctttattctggtattccggtttcacggcaacaagtagtaaatcaagcattttcgcacgtcgtttcatgaataatgctttcaacagatagaaccatccgagcggcagcagacgtccgtgtgacttttgcagcgcttcggcaagcgacggcatggagatacctacgcaaaccagtttgtcatcggcatcggtgataagagtcaccattcgcaggtcgagtatcgggaggtacatctttacgtactggttgatttgtcgctgcgtcaacggagagtagccgtagagcgggctgtacgcttcgttcatcagttcgaatatttcctgtccgtagtctttggctatttttttcccggaggtatatttctttatcttgaggttgtattttcgttgaatcagttcggagatacgcttgtgcttgtcgggaatggcgtccgggatatagattttgtattccacccagtcggcgtctttctcgaagccgagtttctccatgtgtacgggatagtaggggtggttgtagatagtggccatggtgctgagttggtcgaaaccttcaatcagcataccttccgcatcgaaatcggtgaatccgagaggtccggcaatgtgagtcatgccccgttcctttccccagtcttctaccgttttgatgagagcggaggatacttcagggtcgtcaatgaagtctatccacccgaaacggacgttcttgcaaccccatttctcgttggcacggttgttgataatagcggctacacgtcctacgatcttgtcatcctggtatgccagaaaataatctgcttcacagaattcgaatgctgcattcttacgcttgttaaatgtattgagcatatcgtcgtaaaggtcggggacggagtacggattgcccttgtacattctgtaattgaaacggataaatttcttaagttctctctttgtagagactttcttgattgtaatagccatatctcgtatttatgattgaggaagcaaagatacgtgataatcttcaaagtacaacgcagaggggggcaaaaactgtgtgagaggcaggtcggttttggaaaataaaaagcaattagtagttgtttaaactgaatttagggctacctttgttcgaaatactataacacatatcatggaactacaaattattcagaataagatatatgagattcggggacagaaggtaatacttgattttgatttggcggaactctatggaacagaaacacggttattgaagcgtgctgtgaggcgtaatatggaacgttttccagatgatttcatgtttgaattgacaaatgaagaggctaactgcttgttgtccagtagggtatcccaaattgggataccccaatataattttagtgcttacactccatttgcgtttacggaacagggggtagccatgctttcaagcgttctgcattcaacagttgctattaaggtcaatattaatattatgcgtgcctttgtcagtattcgtcaatatgtcttggccagtgataccaagaatcaagaaatagacgaactgagacagcgcatacaagaactggaaagtcaaggaagtaaagcattcgcaatgattaaccaaatcggcgaggagactttggaagccataaacgacctcagtgaagatacccggaaggaattggatagtatttatctggctttatcagaattggccgataaagaaaaaacggaatctctgaaatcaaagcatcgacgaccgattgggtttatacattacgataatgaggaataagtttattttgatataaagcaataaacatttcctgcaaagtcacagacaatcatccggtttcctgatacggctacggttgagaatatcggtgctccgagattatatttgtcttttataattcccgttgtccggtcgatagcatatagataaccatcggaagctccgatgtaaataactccttgtgatgccactgggcttgtttctactccggcttgcggagtggtggaataaggagctgtgtataccagcgaaggcaaagtctctgctctccatttattgaaaagcgtagctttgtccagtgcgaaaactccgcggtcggcagtgccgaagataatttcctgttcggtaataagtggcgtggatgttacgtccaggttggctgacaactctttctgttggagtacttttccggtttgcggttctatgacgaagaagcttttggaggagatgatccataatttcccgtctttatagaccggagaggctccccggttacgaagtccgttatcggagagtttccagagttgttttccggtgtgaatgtcgttaccgtataatcctccccattgagttccgctgactaatacatttccggcaacagttagcgttgtagtagcaccttcccgttgtctccagtccttgttaatccatattgtttgtcctgtctttaagtcataggcggatagtccgacaccaattccggcgtagactactcctttatctattgttattccttccgttaagtaaggatagctgttcagtttgatatattgtttccagagtaatttcccggattctgcatccaaagcgtacagattgcaggcagcgtcctgtgctattacaattccgttttcataggcgattgtgttcttcaccgagtttgccgtgcggaatttccataacagtttgccggaattgaaatcgaatgcacagacaaatgtgttcaatggtatattgtcatcggtggtagcgataaatactttctgtccgccgataataggggaagtcatgaagatgttgctgcctgtgttggctgtccattgcagttgcagggggagcttgatttgagaattattgattcctccggagtgtgcggcattttgaagcagggtattccagtcctcgcccgggattgtagccggcttgaagtctttttgataagtgaatcggctggtggcggttgctttcttgccgtcattaaagaatgaagttactgtgagttgtagctttcttccgttttcattcgcaggcatttgaatgtctctgctccagttccagtcggtgagggagataaggttgcctttggctatctcctgattattctctatatcgtttaggatgtaggagacgtgtgatgttttagcctgtgcatgataggtattgacagaaacaggaagccggtctccggtagctgcggaaatttgattgttcatcggggagactatggcaatctgcggctcgatgaaggtataccgtagttgcgttgtgatattgtcattgccgtctacttttatttctctgaaagaagaaggagaatggtcgataccgcctttatccaatgtaccggtacagattgtatagattccgttttgattgcggacatagttgtagtgcatgtgtccgtagatttgggcttttgtattgaaagcacgtaggtcaagtgtatgctctttatcggctttgaatacgaatgtgtcacttgcggtaaacaggtcatggttgaagaggatcaatgcctgttctttcttcatcatggcaaggtcattcttcagccagttgtatacatctttttgagtataattagtcgggtggtctccgtggtcgattggggtgactacataatgaacgttacccatatcaaatgagtaccacgtcggaccatagagagattcataaagctcttcgccatagctacctttcactaagtcgtgattgccgatgcagtagtaaacggggcaatccattgtctgtgcgttcactatttggttatgcattgtcagccccggttcgtaacagatgtctccggtatgaatcaggaaagcgggcttttcattctttacatattgctgaaggtcagttacccaacgtcccattccaccggtcacttcggtatcggtgatttgaacgaaagaatgttccctggcttttgtccgttcactttcagttaagataaagtcgtagctttttctattctctttggtggaaagatagaattgctccgtttcaaatccggcgggagttgtaatgctgataaatcttgttttatcgaatccgggtaaagagaaccgacctttcttatctgtttttactacgttcaagccgtctgttaccataactcccgccagcggtttatcacctttattaaatagtcctgattggtcggtgtcgacatagactgttcctttaaattgagcgcttagtggcagatatagtaaaaatgatactaggataacagataatcttttcatggtcagtcctccggtttttagtgtgttaagctaattatttctttttatttcacttgtttcatttcttcattgtaacgtgcttcttctttgcacaaaggtttgtaccaagtcttccttagtataagtgtggtgactaaaagcaaagtgatagagctccagagccccagttgctcacggacaacgagatacatcggaatgatagtaagcgcacattgccagatgataccgattgctacgttgaaagcatcccttttgaagttcttgttcggctggatatgaggataacgcgccaatgctttttcttctaccggtttccaccagccccatgggcggacacgggtgtagaagttgatcagtgtctcttcgtcagtcggaggtgcgctatacgttccggcgatacatcctatcagggaaaccccgaacagaacggggaagaaatacaatacccatgcgtcgggaacagtgaatttcatgacgattgccgctattactccggcagtcattccccagaaatagccttcaccgttgaaacgccaccaatgccatttgagtacgttggctgcgatgtatccaccaaagagtgcgcctacaatccattggaagatttcattaatatctttcagaaagaatccgataacggtgctgaccactaccactgcaacagaaatcacataactgctgcgtatctgcgtttttacactcgctttcggattgatgtatttcagataaatgtcattcactatatatgcaggagccgcattcaccgttgaagcgaaagtagacatgaacgctgccagtagtcccgccaataacagaccggctaatccggaaggtacataacgggtaatcaagtgaggaagaatcgtctcaaagtccgttcgtgtaacttccatttgtgtcattccgccgtcttccttgaagaagtaaatagccagcaatgcgaatcccataatcatcaggtagcgagggattaataacaccacagatacagaaccactcatcattgccgcttctttcggagacttgcaggacagaatcttctgcatatcatagttaggagcgggaccagccatgctcataaagattcctttcagcaacgccatcataacaaatatgcttatcagactgtaaggctcgttggccattcgctcggtaaggagattcatccggctgctccagtcgatatcaagtgtccagccgaagaagggcgaatcccagccggcaggaacaaatgagtgaatcatgtccggtgccaccatctgcataccaatgacgacaataacgatgcctgccacggtcattatcagaaactgaacgacatctgtccatacgatactcagcattccgccgagcatcacatagaatgtggcgatggtagtaaagaaaataccatatacatgaggaacatattctgcaggaacattgaaaggaataaatggagatactacttcccaagggatgaatatctccataaatttaccaatacctatgaacccataacttaaaaaaccgagtacgctaagtaatgcgaatacgataacaatcgtatgtgaaagagtagaacctttcccttttccgaaacgggttttaatccattcggcaccggtgagaacgttcgaacggcgcagccacacggataagtaaaccattaggaatatctggttgaacaccggccataaccagggaatccaaagacttttgaaaccataagcgaatgcccagtataccattagcattgtgcccgtaatatcgaacattccggaggcgttggataatcccaacatatagaaaggcaatgattttccacctaagaagtaggagtccatattctgggctgcccgttttttaagaatgagaccgatgacaatcatagcgataagataggcgcatatgataagaaggtcggtagtgtgtaatttcatattattattttgaatcgatttatatattgtatcttctttgctgcaaaggtagggggaaagtcttgggcaaacaaatattattttagcacatactgatactaaaccaataaatgtttcttattccttatggtaaattagttcattcctaagattccatgcttgtatatgttttatgccattgtgagacggtaagaccatatcatcaattgatactaccactttcggaaagttatcattaatggtttccaatggagaaaattctctttttatggtactttgatctgacattatataagagcattgtatataaattgtttctcctgttttttgagccacgaagtcgatctctttacctttggcattgccagtgtaaacttcatatcccatacgaagtaactccaagtaaactgcgttttctatcaggtagccaaagccataaccgtagccgggatagagataatttttataagcaaggtcattaatgtagaacttacttgtcccagcaagggtttcttttcccttgatgtcataacgttcgcaacgatggattaagaatgtgtcttcgatatatcctatataagcagctacaatatcataactaatgtttctccctgaatttttaaagtatttcactatgctattgaccgatatcaggttggaagcgttgtttactaaaaagataaaaatatcttccagtaatttggggtcacgtatattgtaacgttggataatgtcacgcaacaaaatggagtccttaatagtagacatatagttttgtctgatttccagtttattcgggagagaaaacaactccggcagaccaccactatttatataatcaagataactttgtttcatttgctcttttccggttaccataagatattcctgataactgaaaggaaaaacattgaaacatacataacgaccggataataacgtagccagttctcctgaaagtaatttagagttagaaccgcttatgaatagttcgtattcagctgtatagtcttgtgaataagaatttattgtcttttcccaatctttgatgagttgaatctcatcgatgaaaatataaacttttcctgttggttgtataattgcctgatacagcttgatgatttcatctaagtctttgtaggtctttatgaaatccagatctgtcatttctctgttgatgaatagtgtatttgcggcaggcacgccattttctatcagttgcctggcagtctgtcgcaatagataactttttcctgctctacgctgacctgtaaggattttcacaagtctgtttcctgtaaagtccataatcttttcattgtattcactacgcctgaatccaaaatcaaatgcagtgtctccccaaagattatactttcttagaatgtttatcctttcgtccatatcctaaagtttttagcaaaaatacaaaagtttcggatatatccgaaacttttcttgcttttgtttgcgatttcgaatatatccgaaattatttgttttaaagataaacttgttctgtttctactgtaacggctttgttagcttctatgagattgcaaatattttctacggaagcagcagaacgtaaaccgtctgccggtgtgtgaaaacaataatcgatcagtctatcaatggtggaagttgctacatgcatacgagtatccgaggatgcataatagatatatactgttccatcttcatccgcaatccagccattcgagaaaagtacattagatacgtcacctattctttcttcatctatcggagccagcaaatatccacccggttcggcaattgtctttgtcggatcttccagagaggtcatatacagatagagtacataacgcagtccggcagcacaagcccgtacaccgtgggcgaggtgtaaccatcccttggaggttttgataggatgaggtccctctccattcttcacctcttttatagtgtgatagtgacggtggttgatgatagtttcttctttcacttctgcatgagtcatatcatcaatgagtgcccaaccgatacctccgccgtttccggcatcaataaagctatcttgcggacgggtgtacaaagcgtacttaccgttaacaaattccggatgtagaacgacattacgttgttggcttttggaaatcaggttgggtaggcgttcccaattcttcaaatctttggtgcggacgatacctgctttggcaacggcggaagataagtcacccggtgcagcgttggggtcaaggctttcgctacagaagataccatatatccagccgtcttcatgtgctgtcaggcgcatgtcgtagacgtttgtttctgtcggatcagtatccggtagttgtatcgggtattcccaaaaacgaaagttatctattccgtttggactttcggcaatggcaaagaatgacttacggtcgttcccttccacacgtactgccaacaagtatttgccgttccatttgatagctcccgaattcatggtggcattcactccgatacgttccataagccaagggtttgtttccggattcaagtcataacgccattccaaaggaatgtgttttgcagtgatgacaggatataggtagcgttggatgattccgttataatgactattatcttctttattcttgcgagtgagaagctggaaatataactctttgaattgtttaaatttttgcttattataacttgacataaggtttttctttttaacagatcctacaaatgggcgattataagtggacttttccaaccaatgtaacaatactaaattgtggtattgtcagattgtagtatttattgcttacgggaacgatatttgttttattccatctattgtctttattagtaataaattgctttaatgctccttttatatttgctccgtctaggcgaatgttggtcgatattgttttttcagataggttgattgcaactaagatatatttatcgttctttttatatgctgatactaaaaggtctttgttcttaggttgggttacctgtattcgtgtacttccttcagaaatatatcgagagtaattgcctaagatatcatacctttttgataatgtataatcttttctatttttgttcaaaatgataagactttcattgttggatgtcggcatagctcctccccaccatataattgcatttacatttgccttagtcagataattgtggaatgtaactgcccacttaagtccatcttgaattgaagtatcgagtggggttacatcacttatttctgtaatccataccggtatgtgcgctttttctgctgcgtcaaatggaatgataggagttttaagatattctttatctacttttattggcattatgtcaggagataagctatagccatgtcctgctgcaatgagattgaatttcttgatttcaggatagtcctgaagaattgtatctgtgaagtctttggatgagaccatctttagttgaggcatgactactgaccataaaggattctctccaaatatgatttttgcaggaatattttctttctgaaaggtgggaccaagattggaagtgataaatttccccatttcgtctgctgtccataaagaagaattccagggggcggcataaccaggctcgtttgagggtgatatggcataaggtgtaattcctttggatttgtaagctttgtaaaaagctgcaagataattagcgaaatcctgataacactccggtttgagttttccgtttgatacttttccgttgcttttcatccatgcaggagcgctccatgtagaaaaaactaatttgttgatatgatatttatttttagcctctaaagtaagccataattgtccgcgtctcaacaaatcatcggatttattgttaaaatcagaatcgcataactcgatgttaatatcatcgttaagattgaagtctttatcttctttattctcccaataatgtgggaaaatctctcctcttaggatgtttaaacgcaatccatcgttaccgaacattttatccatgacttgttttctgtttttgaaagcgaacagttctttagcccagccagcttgggctattccaaatccgtctattgtttgttcgcaatcgttccatctgattacgatgccggagcttggcgaattatctgaaattttagtagcagggttgctgaaacaaactagactagtaaatagtgcacttaaaatggggatgcaatgtagtttcatattttcagaatctgatataagggaggtagctttttctttggtaagacaccacctccctaattttattaatatctatttaccgatcacgcttatgttagtcgatatcccaccatatatgtgtggtaactttgtctgctccttgttgctgattcgcagtatctacatttgctctgttaatactatattcatcggtaggataagggagtctcgtagggataactcctgggctcatactacctgaataattggttggaataagtttggggtatccggtacgacgccagttggcataactttcgtaaccgttgatgaaagttgctacccagtattgctctccgataatttgcagtttttccgtattgtttgcagtactgaataggttctgggctaagtaagtctcgatttcttcatctgtgattttactttgcgttccgtaagcaatctcctgttctttcatggatgatgtgatggcttctttataaagaacctccgcgtttccgtttgtccagtttctcaatacagcttcggctagcaacaatttcgtctcagatggcattaggaagatggtaggggcatccaatctcaaaattgtattgatattgaagttggaagtattttctaagccgacaaagcttccacttggggcgtctgcaatggtatgactatcgtaaccgttaggtaaaccaaattgtttgtcaaattcagtatttccgtctttcaaagagcaatatacatgaatacgaggatcttttgtttttttgagataatccatgaatgttttaccaattttgactgcatcactttcgatgaagttgtcatctagataacggaaactcaatggatttttaaatgcatttttcccgcttccgtcatgtctcagaaggcatatatcttccggttggctcattacgccgatagttacggcgtcggctactgtctgttttgccaggtctggagccacttctgacagacgcattcctatacgaagtaataaggaacctccaaactttttccacttattgatgtcgccatcgtagaataagtcaccgtctattgccggattattggcatttagcaggttgaccccgtctttgacttgctgaatcatatctttatagatggtctcctgattatcatatttcggcttatagatttgctgatagtatcctaatcctgcttcagaatagggaacattgccgtatatatctgtcaaacgctggaacagataagcgccccagatttttgttgcaccgaggatattggaatattttgcatctgacgaggctttttcttccaattcgcgccagttttttatcagatcgctataagtgtcggtaaagaaggtgttggcgtaagattccatctggtaatatttgtcacctggcatatcgttatttaaggaagcggcttgctgtacaagcatcatgcaggttcctacctgaatgtttttagcaataccaccggtagtcgtatgtaattgagtataggtcaacagaggaccgggctctatcgaggtaggactgttggggtctatatttttctcggtgaaatcacaggcataaaccatacaagttagcgtggatgccatcattagttttattatattgatcactgacataatatttttatttaaaatttgacattcagattaaaacctatgctacgtgaggcgggtagtccgtaagattcgaatccctgtccattgtcgatattgaaagaagattcgggatctaccaaaggtactttatcgtagatattccacaaattccgtcctacgactgagagagacaaggctgacaaacctattttacggatccattttgtcgggaagttatatccgaaagaaagttcgcgcaacttaatgaaagaagcgtcatatatacagttctcggtaatacctgacaatgccatataatatttcatcgctgtcacttttacatcatttggagttacaccgtcttcttttactccctgagcgataataccttcttcgcgtcctggtagcgtgtctgcatggcgtccgaacataatcatgtgtgcatttgtttgagaatacatctttcctccgaatttgccatcaagtaagaaactcaatgtgaatccgtgacattcaaatgagttgctgaatcctaatgtgtatggatgcacgctttcgcctaatttctcgatttctcctttcataggaagtccattttcgtacatgatttcacctttgtcgttgcgtttgaaagttacgcctcggataatcccataaggttgtcctacttgctggtaaatccaagctgggccacagttgtcgctatcgtggccagtacgagactttgccagttcgaattcggtgacatcatctgttatgcgtttaatttcactcttgttgtaagcgaagttgaaggaagtgtcccaacgaaagtgagatgaaagaattggagtgccggtaagtaacagttcaataccatgattattcactttacccgcgtttattttgacatttccatatcctgacgcggttgatatacctgcgtttactatatcgtctttagtatttcgtacatagtatgtgaaatcaatgccgaagcgattgttaaagaacctggcttcaaatcctccttcatacgaaatagaagtcagaggttttaaatttaagttcggaatagtgccattgtcaatggatccaacaggatatttgcgatatgcatccgcataactgtatgtcaatcccagttgataggctccaacggcgccgccggactgtgcccatgaaccgcgtagcttgaggtatgggaaccaagacggcatctgaatagcttcactaaggataaatcctaatccgacggagggataaaaaatatgattgggagaggttttccctttgtaagaaagtgcggaaaaccagtcgttacgtcctgttaaggtcaaatatatcatgcttttataagacatttcggcttgtccgaagagggagttgatgtaactttcagaagtagaatgaccaccggattttgtttttgtattattaatggtgttgaatcctggtacaacaaattggtcaccgtacgaacttgttgcatctgaccaacttgccattgtgttccagccaataaatgcatcgacacttacaaggccgtctttgaatgagttggtatatccggcaatggcttctgtgttgaattcaccgtgatattcggcactattggatatattaccttcttttacagctccgcgggctgtgccccaaggggtgacattttcggcacgacggttaatcatatcaccgccggcacgtccgcgtagataccagtttggtgtaaagttgtattgaacttcgacggagccaataatacggtctttagcatctttttgactattcttgtaaacaacaaataaaggattgattacatagccttgagcgtttacttcatattccgtaccatcgtcgtttgtaatcttcatatcagaaaggccgtaattaggtgctagttgccataaagaagcatttgcattggaggtaatatcacccaggtttggacggtttttggcacgttcgcgtacgtacataatattggcctttagtgagaagtgctcgttcattctagaagtcagattcaatgtaatattgttacgttccagtttggaattcggttgcatatcatgaaaacgttgatcacctgcaccaacacggaactgaattttttcatttccgccggatacagcgatgttgttagtcactgaccatgcattgtcgtagaaatctttgaaattatttcttgcggttggtgaatatgggcgggaaattccgtcatattgcgttacatttgatccgtccattttgctaccgaagctcattacactcatttgcttggctaatgttggagccaattggcttatagcctgttctggtgtcattccatatccagctcctgtcgctatagccagttgatcaggattcatcccatttgcaccacaaccatattcccattggaggtcattattctttaggatgggagagtctttagtataagacatattgtattctactctgacttttcctgctgttccttttttagtagtaatgacaattgcaccatttgctgcacgggaaccgtacaatgcagcagcggtacctcctttcagcacactcatactttcaatgtcttcactattgatagatgaaattccgtcaccagcatcaaaaccaccccattctccggcttgaccatagtttccgttattcataggcacgccgtcgataacgtataaaggttggttactaccgttcaaagaaccgttaccacgaattgttatacggcttgaacccatgacgccggatgctggtttcactacatttacacctgctacttttcctaccagactgttggctatattggaaaccttgacacgattcaactcttcgctcttgacttccgttacggagtaagctaatgcttttttctcttttttaatacctaaggcagtgacaactacttcatctacttggacagaactctcctgtagagtgactttcatgggggtatctgtagctttttgttctactgtctgatatccaataaatgaaaaaattagggtatttcctttctttgcacgaatggtgaactggccgtccatatttgtgattgttccaaaggttgtgccttttatactaatgctgactccgggcagaggctcgccggaagagtcggatactattcctttaatatccgtttgttgggcatgaagtgaactgcatataaatagtaggcagcacaataataaataagtaatgtttttcattgcgaatatgattttagttgttaaactctgggagcaaaggtagggtagtttgcggtggaggacaaatatgattttatcaaatactaatacaaaattaacaaaaagcataaaaatgagtaaaaataggggtttaaactctttgatataataccagaattctgaaaccgatatgtttattagtgagtatcgttctgttttgtaaaatctaaagtggcattttaagggtgtaaagcatagctttgtattgcttaaaacgacgcttttcaaaagctaaaaagtttgtttcattttattattgattatcttaatgtctgactatttacttataagaaataaaatgaataagccggaatattataaaaattttctgaaacggatattatctatatcaataaagagtttgcggaaaatacctgcgatacttattgtaccgggagtaatgttgctatgctttcgagcgaattagccacttttctgagtggtagatatatagaatttaaggtatatagtcttacatatgccgaaaatttctggagtttcataaattagaagattctgttgaagaacgcaatggagaaaaattatatgttcaggtagtatattcagttattgactctaaaacacatgagtgggaatttggaaatttgttggcatacaagataattatccgaaaatagttgttacaatggatgaaattgagggcgtttcttatcagggtatcaaacagatccctatccgtcagtttttactttgttggagataatttttctattaaagaaaaaagagagaaaaataaaaggagaagcaaaacatcattagcttctcctttccctttccagtatataatctcaaagcgattatttgaaaacaatcttcattggtctacctatccagacttgtggttgttcgaggttgaaaatgtgagctattgtagaagctacatcatattgcatcatgcttacatcatcaaaacgaagtccttttttaatattcttaccggaaatgatgaaagctgtttccatttcttgcattgttttgccgccgtgacccttcttgatgcctccatggtcggaagtcaatatgaaaatagtgtcatcaaggatgcctgcatcttttacggcctggacaatctggccgacataagtatccaactccttgagtttctcataatatgcgggagtgtcatgtccttcagtgtgtccggtatggtcgggactatcatagcagatagcaacaagagtcggatgtttctcctttatgtaagcagatgccatattgcctaactctttgggagtcttgttgtaatcggccacatgataatgatagcttagagaaagtgtatctactaaatacttgattccgttccattcatacaggcagccgatttctgctttcggacgggcatcacgcagtaattggaagatagtggggaagattccattcttgtttaaaacacgtgacggaagttccggagttttagatccccattcggtgtatccgtgaagttcgggaccggctcccataaacatggatgcccagttgatagcactggacgaaggaagtgccgagcgttttttgagcgtgtaagctccgtcttccattagtttcttgacattgggcatgtctgctttaggcaagctgtaagctccccaaccgtccagtccgatgagaacaacatgtttggctttgtcttttcctttggcattgcaggagaatgtgaaacaaaaaagcagtgcgaatgtagcaagtagcgtaaaagcgttttgtctattcatgatattttccattaagtaattaatattgttgatttaatgaattaagttttctcatgtattattttattagacaaaggtagagttattctgttggtggaacaaatacaatcttagcattaactaatacttttgcattttttatttcaaactcagccggaagcttttttatctatgtattataaatcaataccacggtatatgctacatagcagagtatcataatgcttccttctatccgtgtgattgtccgtttggcgaagaacaatccgaacagccagagcaggatgcacgagccgaccagtgtgagcaagtcgaagttggtgattccgctaaggtggaggggagtaatgctggcgctgcatcccaatacaaagaagatattgaagaggttactgccgattacgtttccgatagctatttccggattcttctttagtgcggcaacgatagaggtggcaagttccggcagagaagtccctccggccaccagtgtcagaccgatgattgactcgctgacgcccagattgcgggcgatacccgtagccccgttaacaaataattgtcctccgtaaattagtgcagccagccctccgataatataaagaaccgatttccaccaggggagcaattttatctcgttctcttcttccggtacgggatgttcttcctgtccccctgtggagggcttggaagcgatagcaaatgtatatcccataaagatagcgaagaaacaaagcaataacagtccgtctaccctgttcaggatattttccggtgctttatccagaaagacgtcattggcgcaaaccaacaggacgacagaagatagaatgcagagcggaatctcttttttgagtgtattccgggtgatgacaatcggagcgaataaagccgtgcagcctacaatcatcagtgtattgaatatattacttcctaccacattacctatggcaatgtccgcactgcctttaagagcagaagacacactgacggtgagttcgggggcagaagtaccgaacgcgacgatagtaagcccgataacaatggaggggatacggagacgtttggcaactgaagcagccccgtccgtgagtccgttagctcctagaagaatgaggattaatcctccgataagaaacagtatattcatgtttttttctcttttagtggcaaagataatcattttcaaaattgatatgtcaaaaacaatccgtatgtttgctctgttttagtgaaaaaatagattaaccttaattcactgtcaggggatataggatatggaaatgaataaaatgaaacgtttagtgttactgctcattgtacttttgggaacaacgggagtacgggcacagttgggagaagctgtcaagaagatatttgcaggtgatagtgtaactaccgtgcacaacacacctctgaaccgggattcagactctgtctatgtggccaatctgcaaaaatccctcgaagcagcccggctcaacgaggcgaatatgcgtatggaaatggagcagatgaaactgcaaatggctgccgtcgactccgtgaagtacgcccggcagcgtcaacgtatcgattctttgcgacagtttaccaaaggaatccctgtggtagccgacggagataccttattttatctttttaccaaacgtggcggatacactccccagcaacgtgcgcaaatgaccggtgctgcaattgaagaactgggaagacgttttaacctccgcccggactccgtgtcgatcgaccattcggacattgtttccgatttgatgtacggtaacaaggtgttgctttcccttaccgatcaggatgctttgtgggaaggcatttcccgtgattctcttgcgaaggaaagacaacaaaacgttatcaccaaactgcacgatatgaaagccgaacacgggctttggagaatggcgaaacgtgtgctttatttcattctggtgattgtcgggcaatacttcctgtttcgcctgacgaactggcttttccgtaaactgaaagtacgtattttgcgtctgaaagatacgaagatacgacctgtttccattcaaggatatgaattgttggatgcccaaaaacaagctaatttgttagtctttctggcgggcatcgggcggtatattcttatgggattgcagttattgattactattccgctgattttcattattttcccgcaaacagaaggactggcttatcgtatattgggttatatctggaacccgatccgtggcatttttgtgggtattattgattatattcccaagctgtttacaatcattattatctggtatgcagtgcggtatctggtacgactggtgcactatctggcccgtgagatagaagcagggcgtttgaaattcaacggtttctatccggattgggcaatgccgactttccatatcgtccgtttcctgctttacgcatttatgattgcgatgatttatccttatttgccgggttctgattcaggggtattccaagggatttcggtatttgtcggattgattgtatcgttgggttcaagtacggtgatcggtaatattattgccgggctggtgattacgtatatgcgcccgtttaagttgggcgaccggattaaactgaatgatactaccggagatattatagagaaaacaccccttgtcacccgtatccgtacaccgaagaatgaggtggttaccgttcccaactcatttatcatgtcctcgcataccgtgaattacagtacctcggcacgtgaatacgggttgattatccattcggaagtatctatcggatatgatatcccttggcggcaagtcaatcagatattgattgatgcggcattgaatactcccggagtggtggacgatccgcgtccgttcgtgttggaaacatctttaagtgactggtatccggtttatcagattaatgcttatatcaaggaagcggataagatgactcaaatctattcggacttgcaccagaacattcaagataaatttaatgaggcgggcattgaaatcatgtccccgcattatatggctgtccgggatggaaacgagacgacaatccccaaagatgacttgagagaaaaatcaggaaaatagtttctttactctatgatactttcttgatagatgatgtaatgaggaagtttctttctcatccggcaggaatcagactttcccgcaacggatcagtattttctgtccatcgtttaaggtgctggcaaagaggtaggtatctcccccttccgctaacttgatacgtttacggagttctgccaccgtagccggaaagttgcggactgtgatattcgcttttttcaggtctgacagattctcctttatttcctttttgttgaggctgcaccggttgatgatgcggaatgttctgccgggaaaaccctcaatctgcgtatcggaagtgtagagatgactgttgggatgcagcttcttgacggagtaagccgcggcaatgctgcggaaagcaccggctttcaggagagaagcattgggttcgtacagataattgccaagtgtgtctgtatagctgcactcgctgtgctgttcctgttcgcgggtaaatacgaagagttgtttttcctgctctccttttgtggagaggtttacgcagtgaaccgggatttcttccggtgctgtctgtccgagtaacaacaggagttctttgcattcgttattgacggagatgatatgtacctcctgtgtgtgcggcaattctttcagtgcctgtgaaaggtcgagcatgggggaaagtttaatcattatccggttggctttgctcaacaggagcccttcgagctcggccacattaggctcacagtcggaaatggcaacggtttttccgccgtgctcattgcggcgggcggggtcgagaaagatacagtctaccggagacatggcttccagataggctactccgtcgtcgtttctgacacttatatggttgaggtcgagtgcgggaaagttgtgggctgctatggcgcagagttctgcctgacgttctacgtaagtagccgatcggaatccggtggcgaggaaagagcagtcgattccgaatcctccggtcaggtcggccagagactcaccttgcaggaggcttgctttataacgggcggtgatttctgaagaacattgctccagtgaaagatgtttcggataccatatatcgtctatctctttccaggaggggattttctcggctgcgatttgtcgtcctgctatttgggtgatagcagccggtatgtctacatcggggtatttccgggcttgcagggccaggttgcgtacatcgtcggattgatgttcgttgataaacagtcgggtttcgggagagattggagtcataggtcgttattgttcgggaagtgagataaataagtctgatgtccggatattgccttgttatttatggtattaccttatatttctgccttgctacatcccggctacaaaagttgaagtgccaccattcgctgggcagggcgcgaaatccggcttctttcattactctccgcaacagtatccggttctgccgttccgcctcacttatttttccgtttcgtaccagttcactttcttgtgtgatatgggcttctatccccaagtggtctaccttggttcccataggcaagggttgtccgagagaatcctgaatgctgatgtctaccgccagtccgtagttgtgaagtccgccgccacggttcgggttggagacgtatttgtatttgggtgttcctttcactacattccacatctttttttgtacggacatcggacgggcggcatcgtagacaacgagattgtaggaaggatgcagttgtttcagtgcctcctgtgctttcacgagggcgtatgctgcatcgggatgcagataggcttccgacaaatcatcgtaaagcacctctccggtgaaattgtcggcttgtgtgtacatcaacttcacggtgatactgctgtccagttccgctatattgaccagtcctaaagaattcatgtagagagccatggcacttttctttggttgaggggcaggggaacattcttcgcggggttgcatatcatccgacggatgtttgtattctgccatggtgagcctttccttttccttgtgaccggaaacggaagtacattctgccagaagcagacagaggacaggcaaactatattttagaaatctcattcgggcttttgtatttagtgcgtcaaagatacttctttttggctttagctccaataagctacctttaaatcctgattgttggagtgaccgggtaatgccacggggctgtcacagttgtgccaccggcttggcacaagtgtgacacttcgatggcacaactgtgacaagccggtggcacaaggtagaggaataagggcttgtagcggctcttcctatcgccggatgttagcgactgctttcttcggattggctgttcctttccatacgtcaagcaggtgcaggatgtatccgctttcgcttttgctgttattgaccgatagcagttccgcatagatttcccgttcttcccggttcagcccttgcagaaaggggatgttggtggttgttacttgctgtcacaattgggtctttcagcatcgaaagttgggcgggagtcaggttgaaactggattgtactacgttggacagagcgatgaggcagcgtgccgtcatataaggttgcgtcaacttcccccaaaagaaacagggagcgtcttttttctctatttcactgtatttggcgaggcatagttcgtcctggtcggcagcgcgttgcaatgcagacagagcggcgtattgataagaaatggtatcagccatagttggataaataggtattgggttgcttattgccccaatatagaaatttatttcttgcaagaaaagaagttgcgggatttacattacttctgagggtatgtttcacattataagttgaataattgaagtttgtagaagtaatataactacaattctttataattttgaactattctttatacataaaaatattattctttataactaatattaaatcatattctgcatttaaatgtaaaatgatacctttgttcgagatttaaataccgtaatgac

SEQ ID NO: 2978 - DNA, 83299 bp, Unknown
  gut microbiota DNA sequence
atgcttaattataaacgttttacgtttaattatcgtcattctgttttttattgcatttctaaatattacttacatggcgcgccatacctgggctacaacggcttattattgcgaaattcatccgggcattatctccgaagctatgggacattcgtccattacagtgaccgagacgtatctcaaacctttccggagtaagaaaattgatgaagcaaataaacaggttctcgattttgtaaaacgctctgtgataggtgtaagcgcttgattgtaagtctgttacttcgtaggtaacgggtttgaatatcggtgcaaatatgagcatatttcttaaaacaaccaaacgaaatcaaacattttttccaataaactactcaaaagcggaactaggacagataaaacacgtggattctttgtattagggctttgttaacttctaaatattgcaaaaggtttccctcccctctgccgctcgtcagaagcaggggtaaaatttttaatcgtattttgtttcatttttcagtattgactactccaaaagagcaggaacaaaggtttctccgttacctacgaagtaacgggccgtctattattgaaacttagtgtttaataatatattattaatgtaatttttaagtagttatgaagaaaaattttgttagggtaatgcttttcggggcattgacgcttgcagtcactacaacagtcacaagttgtaaggacaacgacgatgacattaaaaatctgcaagagcagattgataaaatcacgtctaccagtcctgtaagcacagaagacatgaaagctgccgtagatgcggcaaaaacagaattgcagactaaagttactaatctggagagtcagttgaaagataaggaaactgcaattaaaactttggaggagaatattgtaaagctgaaggaagatttggccaaaggagaaggtgttgacgttgttgcgttggctaagaagttggctgagtctgaaaatgaattggttacgctgattaaggctaacgatcagactataaaagatctgaatgcttctgttaaggaactgaacgatatgtctggcatattagataagttggtagcagctgaaaagaactataaaaataataatggtgatttgagcggcttctatgacaccagcttcgacaaattcatcaatcagagcattataaatgcactggaagatgagagtgattccaaaggtgcgattgccgaatatgtgattactgccgtacagggtgctgtcgcatcaaatggtaaagaactgaatgaccgcattgcgaaattcggaatgaccggtgtagcaaatctgacagattttgtagataaaatctacaatgaaatctttaaagacggtggtgctatcaaaactaaattggatagtttggatgaactgttgctagctatcgatgcttatgtgggcactgaggaaggtcagtctaaagactatgcagcacttatcaatgagattgtggctgcaaaaaatgctttgacagcactcaaacttcctgaaggacagactttgaaaggagctgtacaaagtattatagctgaagaattgggagatgcagaggctacattagccaaattgcaatcggaattgaaagcagaaattacagcactgaaaggcatgatccaaagtatcgtatacgtaccggaatatgcagacggactggttcagcttagtacgttctatgctaagtttagttctgacggtaatgcaaatgattgggaaccgatgattagcggtggcgatgtgaaagtgagattccgtgtatctccgagtagtgcagcgaaagaactgattgataattttggaaaggaaactgctaaatataatgttgcagtagattatcagacggtgaaaacacgtgctacaggtgaattgttcaatattacaaagattgaagctgtagaagacgaagccaatctgattgaggtgactttagatgctagtaaggcagcagctagctatgcaatcgctttgacactgacggataaggttgaaggtgaggcgaagactttgaatgatatttcttcaaactatttcgttgctgtgaagaatgttctgtatattgacaaggtagagtggactccgaaagaaaagccgacaacattagttaaaggaaacactatcgactataaaacgggtggtgattatactttgacagttcattcatcagtaggtgctaatggagctgttgagggcgaagccgacacaagaacgaagctaagtcaatatggaatttctgcagataagttccctatggagttaactctgggaggtactaatgccgctaattttgaattgtctgaagcaggcgtgttgtctgcaaaagcagcagcagaagtaagtaacaaggcgaaagtatcgtatacaataacagtgtctggtctgggtgcttcttctgaaaaaacagtagaatatactggtgattatggagatgttaaattgatcactgaaggtgaagcacaagaagttgtacttgctgctgcgcaattacctcttctgtggaatggagcagagaaatcatatacactcgacgtaactgcagaaagtgctaccgtagctgccgtagctaagataaaggaagcattgggcgttgataatttcaacaattgtacatttgcggcagttccggaaactcagacaattaagttgggcaattctagcggtgctcttgtcttgaaagttccggcaagcacagtatgcgaagctactgatatcactactagaattactagtcaagacggtaacaagagcattgatgtaacagtgaaaggtgtaacggtaagctatcctgatgcaaatgatgcagctttcaaactaattaataatgctcagacttgggacggaagtaaagcagtactgggtcgcacatttacaggtgaaggtactcaggcaagtaattatacagctgtaaaagcaactagaaacctgaaagaactttattctaactatgcagttgttgagagcagttttactggcttaggttccggtgctactttaacgtttgctcctgttcttgctgaaggtgaaagtactattacaggtgtcactgtaagtgaaagtggtgatgtaactgtaactaaatcttatgaaggcgatcctattaaagtaacactgacaggaaagtgcggtgaacatgaagtattctctaaagaaattgcagtgacaattcctgctgataagctgaacggaacatttgcatatagtgcagaaaaaccggaagatcaaggtaaacttacttatgatgtaacttcaatagaaaagagaaaagaaggtcttgatttgaaaactgctcttgtttggaaggatgctactgctgctgaaaacaaaatatggccggaagctgctgaggatatttacaacagcaatgatcctatgaccatatatggtttcagtgtagaatatacaatggaagaaggtgctaataatggctcctttgaatctactattactgacggcgtgctcaaattgacaacaacggcagccgaatggtctgtaagttcaaaaccaatggaagtaaaagtaacagttactcctaaatctccttggggtgctatggaggctaaaactgtaacagttacagttcctgcatggtaataagcctttgatgtatcagacgatatctctcgtgattcccggattcattttctgaaagaccgggagatatctttgaaatcaacaagataaacccttcttcgcccttgtggtgaagaaaacgccgagaagcaccagtacgaagccattcgcttgtgaaagtcaatccttctatgctgtgcttcttaagaaaagggatgtcttcctaataatttcccactgacatcccttttgctaactcttaatgcatctcccttattataccggtcacaattagccggtcatgatttcccctatgaaagggggatgtcttgagaatacaaaaagcccgtgcttgcgaaagtccgggcttttcgtccttacatctccttctctcttattctaaaggaaaaatgttctttgtgaacaactcattttttattccaaccagttcttattcaacaaaaaagccttatctttgttgtaagatacacaatcaacacgtataatgggaagatttattaatccctttaccgattacggctttaagtttttattcggcagagaggtagaaaaggagttattaatcagcttcttaaatgatttgctcgtaggagagcatgtgataaccgacattcagttcctcaacaacgaacaacagccggaagtaaaaaatgaacgagggatcatctacgatatctactgcatgaccgatacaggtgagcgtattatcgtggaaatgcagaatcgggaacaaccttattttaaggaccgtgctcttttctatctctcaagggccattacgcaacaagccaaaaggggacaatggaatttccggttggatgctgtatatggagtgttcttcatgaactttgtaatggacaaggacatgcctgcaacgataaggacagatgttgtcttatccgaccgggctacaggaaagctctttaatgacaagtttcggcaaatctttatcgaattgccaaactttaataaagaagaggatgaatgcaatacggattttgaacgctggatttatatattaaagcatatggatatacttgacagaatgccttttaaggcacgaaaagccgtcttcgaacgactggaaaagctggcttccaaagcaaatatgacccaggaagaaagagcacagtacgaagaagaatggaaagtctacaatgactatttcaatacgctggattttgctgaaaagaaggggatgcagaaagggatgtagaaagggatgcagaaagaaaaggaagtaacagcccgtatcatgaaatccaaaggtctttctctcgaactaatttcggaatgtaccggacttacaaccgaagaaattgaaaaattggaatgatagaaacaaaaaggcgacccgtttcccacgagccgccttttctgtctatttgatttcgatttcttccttcatgtcgatttcttctccatgtgtatcatagaacacatattgtaagaaagcgagtttctgacttggaataaccttgataccgaatccgtatttcatctgccatttccgtttcagggaaacgagtccctgattgatgtaggcggcaacatacggatggacgtgtaacgagaatttcttaaccttcagtttgttgaccagataatcaattttactctccaaagtgtccgtaaagagaatggacgacttgatagtgccttttccgaagcaggtaggacaaatttcggtcgtgttgacgtccatagccggacgcacacgctggcgtgtaatctgcatcagcccaaatttgctgagcggcagaatattatgccgtgccctgtctttctgcatattggcacacatccgttcataaagcttctgacggttttcggcttcattcatgtcgatgaagtctacgacaatgataccacccatatctcttaatcgcagttggcgagccagctcgtcggcggctcccaggtttacttcgagtgcgttaccttcctgcccgttggcattcttggtgcggttaccgctgttcacgtctactacgtgaagcgcctcagtgtgctcaataatcagataggcaccactcttgtaagagactgttttaccaaacgatgatttaatctgcttggtgataccgaaattgtcgtaaatgggaagctggcctttgtacagtttcacgatgtttgcccggtcgggcgcgatcagtgatacatagtctttgatttcgttgtacacagcctcgtcgttgacgtgaatattctcaaaagaagggttgaagaggtcgcgcaacaaacctacggcgcgactggtttcttcataaatcaacgtcggatacttggtggctttctgtactttagccattgcatcttcccaatgtttaaccaggactctaagctctccgtcgagttcggctacgcgtttgccttcggctaccgtgcggacgatgacaccgaaatttttcggcttgatgctcatcagcaactgtttcaggcgggcgcgttcttcgctcgatttaattttttgcgaaacagaaaccttgtcattgaaagggataagtacgaggtagcgtccggcaaatgaaatctcggacgtcagtcgcggtcccttggtggagataggttcctttacgatttgcaccactacttcttgtcccaccttgagtgtgttggatacggttccgtccttgtcaagatcgggaagtagggttgctttgctgatagaagtcagcttcttcttgtcgcttaaagtctgctttataaacttttcgagtgagttaaattgaggacccaggtcaagataatgaaggaaagcgtctttctcgtaaccgacgtccacgaaacatgcattcagaccgggcatcaatttcttgatacgtcccaaatacatattgcccacggagaaagaaatgtttctcccttcgctttgaagttccaccagactcttatcttcgagaaaagcgatagagacctctttgggttgtacgtcaactactagttcacttgtcactgtttgtttccttattattgattgaatctcatttactatgaacaacttttttgacaaattgttcattttgggttagctacttaaacaaagaacaaacttgaaagacatcgagcttcgcaagtttgttctttatttctgtgtgatccagacttaaaaattattttttgcttttatgtctgttctttcttagtctttttttacgcttgtgcgtagacattttatgtctttttttcttctttccgcttggcatagcttcacattttatgggttaatactcttgttaaatttatttttttactgagattgtaaatgtcttagccggtttgaaagccggaatgttgtgctcggggatgatgatagtagtattcttggaaatgttgcgagcagtcttctgagctcttttcttcaccacgaagctaccaaatccacgaaggtatacattctcatcgttagacaacgaatcttttacggcatccatgaatgcttcaactgttgtaagaacggttgtcttgtcaataccggttttctttgtaatctcgtttacaatatctgctttagtcatttttccttaaaaaaaatattattactaggtttttgctaattttttggactgcaaatatatagctttttggtctgctaaaaaaatatattctgcacatttttctaaaaaagtggaggcattaagttttcttagagtcaaaagagttacttttgtactgcttttggatagtatttgcaagataaatgtaagacgaacaaccgatatgggaatgaatatttttagtaaagcaattatagactggtataaggagaataaacgagaattgccctggcgggaatcttcggatccttatctgatatggatttccgaaattattcttcagcagacacgcgtggcgcaaggctacgattattttctacggtttatcaagcgttttcctgatgtgcagagcctggcggatgcggacgaggatgaggtgatgaagttctggcaggggttgggatattattcgcgtgcccgtaatcttcatgcggcggcgaaaagcatgaacggtgttttccctaagacatatccggaagtacttgctctgaaaggggtgggagagtatacggcagcggctatctgttcctttgcctatggaatgccttatgcggtggtggacggcaatgtgtatcgggtgctttcccgttatttcggtgttgatacgccgattgattcgacggaagggaagaagttgtttgctgccttggcggatgaaatgctggacaggaagcagccggctctttacaatcaggggattatggatttcggtgcggtacagtgtacgccacaatcgcctgactgcctgttttgcccgttggcggagagttgttcggcactttctgcgggaagggtggcacaactgccggtgaagcagcacaagacgaagataacgaatcgttactttaattatatttatgtacgtgcgggcgcgtatacctttataaataaacggacggcggatgatatttggaagaatttgtttgaattgccgttgatagagacttcggttgctttgtcggaggaggagtttctggctttacccgaatttagggagttagtggcagagggggagaaaccggtcgtggtgcgttcggtttgcagagaggtgaagcacgtgctgtctcatcgggtgatttatgctaatttctatgaggtgactctgcccgcagagtcggcttctttcggtaactatcggaaaataaaggcggaggaactggggcaatatgccgtccccagattggtgcacgcttttattgagaagtatgtcgattcgaaataaaagttacaacaatccttgcattctattgttattctgtttaattttggcagcagatttgaattaaagaatgataaacttgatacatatatgtcagtaaacagagtgatattgataggtaacgtgggacaagatccacgggtgaaatactttgatacggggtcggcagtggcaacttttccgttggctacgaccgatcgcggatatacattgcaaaatggtacgcagattcccgaaagaactgaatggcataatattgtagcatccaaccgtctggctgaaatcgtggataagtatgtacacaaaggtgacaaactgtatctggaaggaaagatcagaactcgctcttacagcgaccagtcgggagctatgcgctatatcaccgagatttatgtggacaatatggaaatgttgaccccgaaaggggccggccaaggtgcgggtacttctgcacaacagggggctgcaacaccgtcacaacagccgcagcaaatgcaacaaaaccaacagccgcagcagtcgcgggcgcaacctgtacaagataacccggcagatgatttgccgttctaaatactgtgacagtgtgccaactggtttataaaagctgattggcacattgtcttttgtttaactaaaatatatactctttggactcagatggttatttaagccaattggctgatattttcaacggtattaccgtaaacactccttctatctctgctattattgccatagtgctggctggtgtgctcctgcttgcttccggctttgcttcggcttcagaaatagcttttttctcgctttctccctcggacaagaatgatattgacgaacgcaaacatcctgctgacgaaaagataagctttcttctggatgattccgaacgtttgttggcaacgatattgattactaataattttgtgaacgtaaccattatcatgctctgcaatttcttctttatgaatgtgtttgtattccattctccgttggcagagttcctgatattgactgttattcttactttcttactgctgttgttcggtgaaatcatgccgaagatttattcggcgcagaagacgttggctttctgccgtttctccgcaccggggatttatgccttggaaaaggtattctatccgattgcttctgtcttggtgcgctctactactttcctgaacaagcacttcgccaagaagaatcataatatttccgtagatgaactgtcgcatgcactggagttgacggataaggcggaaatctccgaggagaataatattctggaagggattatccgttttggtggcgaaacggtaaaggaggtaatgacgtcgcgcctggatatggtcgatctggatatccgtacccctttcaaggaggtgatgcagtgtatcattgaaaatgcttattcgcgtattcctatttattccggttcgcgggataatataaaaggggtgttgtatattaaagaccttctgccgcatgtgaacaaaggagataacttccgttggcaatcattgatccggcctgcttattttgtgccggagacaaagatgattgatgatttgcttcgtgattttcaggcgaacaagattcatattgctatcgttgtggatgagttcggaggtacttccggactggtgacaatggaggatatcattgaagaaattgttggtgagatacatgatgaatatgatgatgaggaacgcacgtatgtcgtgttgaatgaccatacttggatatttgaagctaagactcagcttacggacttttacaagattgcgaaagtggacgaagatgagtttgagagagtggtaggggatgccgatacactggcagggatgttgcttgagattaaaggtgaatttcccgcattgcatgagaaggtgacttatcataattatgagtttgaagtgctggaaatggacagccgccgtattttaaaggtgaagtttacgatcctgccgaaagaagaaacggaaggggcggaagacaaagagtaaaatgggattatttctgcaagataaaacgaatgatacacaatgggctgtctggaaggtggaggaatcactggaggcattgctggctcttttacctgatgcgcgcagggtctgttgtgaacaggaacttttgcaatttgcttccgaacggagaaagatagagtggttgtctgtccgtgtcttattgtactttatgttgaaagaagataagcaaataggttattcctcggaaggcaaaccgtttctgactgatgattccttttttatcagtatttcgcatacgaaagggtatgtggcggtgattcttaatcccaaaactcctgttggcattgatattgaacaatatggcaaacgggtacataaagttttcgatcgttttattcgtccggatgagcaggtagaggcttatcagggagatactacgtgggggggactgttgcactggtcggcaaaggaaacggttttcaaatgcatgaagaatgccgatgctgatttgcggaaactttgtttatcgcattttattcctcaaaaggaaggcacttttcaggttagagaatatgcgacggaagggcaatcactcttttctgtggggtatcgtatctgtgaggactttgtgttgacgtggacttcgtgttgacgcggactatgtattctataaaaaataacggtgagcaatgagtggagtctccacaaattgttcaccgtttatctttggtcacttatctttcttgttaagtctgtaacttagtgcgccagacggacagaatgattgttttatttctcaattaacgtgataccgtcaagacagaaataggcagcagtttttataccatattcatttttatcactagagtcgggtataaatttaacttttacagcattttggagcggggttaggtcaaaccatatccattctttaacaggaaggtcattatcggtcttataatttgctaataagatttctgcttttcctgtttcattaccagcttcatcgtatcctgttgctgtaactttataccaatctcccgccttgaaagcccttgcataaccgtctccttgtatcatacccatgtatgcccatgtactgtttgctatccaggttccttttaatttatagttagtatctaatatggtcagaattgctggagttccatattctccgtcggtactgtctacaccaatatacacactaccaattttagctttacctgttattggtgcaggactattggctgtttgattatctgttatattcatataagaaaatccggcaaaactataaccggaaccccagtcggcataatagtggttgaaattaattaagtttttaggatctttgaaatcagtttcttggaatgcctgattgttgggggtaccgtctgcgataaattgactgttttcctcggtcaatagattctcaaaactaacgaccacttcgttttttacatcatcgtcatcatccccgcaactgcaaaatacaaatactgacaacagtagtaataaagataatttcttcatgtccttttttaatttttagttattaattgttttattgattaattcttgaaatgcaggttttcgacagttgttacttctgtcgatatttctcccatttgccctgcgtcttgattgacggcagtcatgattttcacaaagtctatacaatccaaaacgatggattctccattgttgtctattgcccagtctattttaaaattactgccttctttatcattgcgatgattgtcggcatatccccacggatagcaatatcctacccataatccattttccggaacagcattgtcctttaagcgtgttccccggaatgttatttcattttcctgtatccatacaggataataggactcttgattatgaaagctgttccggaggatttcaccttcgtttccttgattgtctttccaagagacattctggtttgccggttccggtcgataataagtgatctcatatccacgtgtctccgtatctttcccgtattcgcttccggccagctcataccactcatcatcgggttctccattaccatttacatctttagatacaaatacgatacccggttcggcgcttccccctaattttcctgtttctgttttcagattgtaataagcatttccttttatcttgaaatcatactctccttctacgttcgggattgattgcgggaaacccagaacaatgtaaccgccgaatcctcctaaagtgatgattgatttttgccgtattttgcgggttgcttctttcagtatatcatcataggtaaatccatttttataggcagatgtagtagtattgataaattgtcccggagccggcctgtactcccataccttattggcaaaagccaatgaattttctgtttctccggtatcatcaatatcgcttcgggaagccttgtcgctgaatacgattgtatttggattcagtccgatattattcaggcggaacaagagttgtccttgttgattgaaacaaagcaaatctccatatacggtgtagtcataagcgtctgtgatatatatattcccactgtagggattgacattgattccataaggagtgctgatattggttccgtccgtaatgaaattttcacggacggtttctcctgtttttagattgaatgtcttgatagaagcggtttgtgtactgtaattatagttatatagataagcaatctctccgtcaatagcaaagttttgtactctctcattatagtgggtgactacctttgtccggcagtctatttttgcgaaattataatctccggcttctacatcttcgccacgggtggctacataaacgactttttctttcgtatcggcaatgatctttcccggattcggacctacgataattttatcggtttccttgaatgtagcgatgtcaaccacggacactgtattgtctactcccaatcccgacgcatggtccaatccgccggagttggaaacatataacttgtcatcctgtacacaaattccgtcaggattacgtcccactgttgtcatagcgtctatggcaagcgaagccgtgtcaatacgtgctaccgtaccgtcataagaacagacataggctttttctttatgaaaagcaatgtatcgcggttcccggggatttccgttctctgtcagcatttgaatctgtttcagcgagtttcccgtttggaaatccactatttctatcgtactggaaacgttggctacaatatatatcttgctaccgtaaattgccagatcattagccgtatctcccagtccccggtgattgatcgtcttgaaataattgcgtaccattcgctggttattgaaagaaaaacgcatcagcgaactgttattctgattgaacaatccttcgcacaatgcatagagttcggctgtatccgtctctgtcgggtcacctgtgatgtccgatgaggtgaagggcttgtcctccatatcatcgcaagcgttgagtaataatagtagcggcagacagaaccagaatatatatgtcaatttccttttcacgtccataatatccttttataatattaatatcttatcttcaacgttgccctgactgaacggccgggcatggggaagaactgaacaatctcgtaatttttatccagcagattcaaaacctctacgctaagagacgttgtaacttttcttatccggaagtctcggccggctgaaatactgtggtcgctgtaactggccaaccggttttcgggaatgttctgtcccaacgcataacgttttcccgaaaagaggaacgaataagataaatctatccagggtgtttcgatgcccgcttgtcccgaagcggagacacggggggtgtaggctatctgatgtttataagtcgatttgttcgagctggcgtccggagttgtgacatctaatgcccgttgataagtatagttcccggaaaaattgatacggatactttcccagggttggagcgataggcttcctgtggcgtcaatacctttgatctctacactgcccaaattcctcatgctccacacagcaaggttcttggtcgggtaagcaatgattttgtccgtcactttgttataatatgcgtcaacggttgccgacaggtagggcaggaatgtacatacatttctgctatacgtcaaaccgatattgtattgacgggcattttcgggtttcaatttgctgttacccacttcctgataatataaatcattgaaactaggcaaacggaaaatatctttgtagaagaaacggacacgaaattcttcattccggaaaggcttgaatgtggcgctgacgtaaggagttaatttgcggtgattgcctgcgcttcctcccttgtcggcctgctcgttgataacagttgccaaggcggaaacagatagagtgaaccattcgttgacgtattttccggcaatggctgtcaaccacgaatagcgtgtgggatgtgcaaagtctgccatgttggcattcatcgtgttgatactgccgtcggtagacaatgaaaacgaaagattgttcagcagcctgtataacacggaggcggaaagatagtattcctgctggtaatagctgttctctgttttgccttcattgtttttgatagcagggtccagataatgctggtaactccagttccatttggcagaagtccggaatacccattgccggctgaattcctttttatattggctttgtataaatgtatttttgtcccagaggtgctgtgcggaaaagtcgttatatagcgtggtcgctttcggcaatcccctggaagactggaagtagtaagcttttagccgccattgctctttgtcggagaagttgccgtaaagcccggcttcggcacggaacgtttcgacatccgtgttcttccgtttttcacgtgaagtcaggtcgtctgctgcgtttccataacgtagcgtgtacggatattgtccgtctgacgacatccattcaccgttcgccgaaactgtccattgggggctgagttgttgttccaataagatagagggattgacaagtccccacgaaccggttttgaaagctgcgcttatattagttcgtttccctttctcaaagcggggagtgagcgtctgtatgtccaatattcctgcagaagcgaagaaacgtgccggttggaagatattgtcactctgcccgttgctcaacgaaagttgatctacattatcaagtgagaaacggccgatgtcgatctgtcccgtctgacagtccgttatggcaattccgtcatagcctacgacggtgtgctgtgctcccaaactgcgtatggagacagttttcagacctcctatgcctccgtagtcttttacagtcacaccggcaaaatgcttcaccgcatcggacacttgcaaggcgtgcagattcttcagggcttctttggaaaatagttgtagaggtgcagtagaacggacctcacgggtctggtaaatatcagaaacggtaacctccggaataaaataggtatgcgttgtatccactttctgctgttgtgcaaaaagcggtatggatagaaattggcagcagaatgctgcacagatactcatataaaacgtcacatatctcatccttgattttctggctgttttcacattttaaaagtgtccgggcgaaatcccttcgaccggacacgctaaataaactttggcagagtttattaatttaaacatactttctctgaatcagagtgatgaatgaaatgatagacgaattgtccggttcattagactcaacgctttttcctcgaaagcagtgaaattggttgcacggcaggtcttctgacttgttcctgttgcgggcgccttcccggaagtttctttccagtggctaaaagtaggttgctcgcaacgtaatgtgtggaacttacagcagcgggactgttcaggatttacacctgattcccttttaatcgcttccctcgtatgtgagagttgcaaaccgatgcgcgacaaagatagatagtttatttgttttatgcaagaaagaagaagattattgatgtatcatcaggtattcttcaatcgcttgtgtggtagcatctttcaacaatacggctttctctttatttaataggtataaagtagggatcgctttcaggtcatacagttgtttctctttgattgtgaatttcttatcatatccgttaatccattctttgggaaattcattcagatgtttgcgccagtcatccaactcttcatcggggtagatagaaaggacgatcagcttcttctcctttatgagttggctgatgataggggcttgctttaaaccttcgattgtctccgtacaagcgtggcaaccgggattattgataaatagcagaagataatcggcattaagctgatagagggagccttgagcgccggaagcaagggtataggtgaagtttatagctttggtgcctatgcggttcttttgagctaattccaaccgtgccttggggcgtactttttctatctcttccaatacgggagaggctgccattgcttccaatacgggaatataaaattcctcgttacgcatcggagagttggggtcatataagtatttatccgctaaatcggtgatgtaggcgaatactttcttgtctacgtttgtgcggtcgatcgttttgcgtatagcttcctgtgcggttttgagggggacatgattcagaatgtcgcagtaatccacccacgcctgttcggttatttccggatgatgaatgtagttggtgtcggcgaagttcacattatcccagtagtgctttactaagaactcggcacgttgttccggtgctaccattatttgagggatagcgggcagcgtgaaagtcttgatagtgtcctgtgacacttcgtttttagtctggcttgaagcattcccgcttttgcaggaccaaaggaggaggaagcagagaatgggaaggatatttaagtttgttttcatgacttgctgttctacatttatctgattatttttcaagttgcaggcaaagataactccctttttattttattcaaaacattcttctttttttgttcggcaggatattatttgaagttatcagttaactataatttcgtcggagggacttgacaaatgcttttttatgttgtatatttgtagacagagaacgtgaaatcaataacagaagaatgaaaaagtatggaataaaagtagaaagtggtgtaattttacaacaaatatagattgtctcctccttttttgatgaggggaagggcgatcaatactggctaaaggctgcgaattttataaggttcgcagccttttttgttgtattatttcggatgtttttctgtgaatttttattttaaagtttataataaacggaggggacgtttataataaacgatcattgaatttattaataacgataagaacgtttatgtagtggaatgttcgtttttttatataacgcttattctaagtctcgagatttgtatttttatggtaataataattgaagtctttctctggtaattttttcggaacgtgtaagcaggctcgaatgaggtgatagaagtgatttacttcctcactacaaagttccggcattttggctgatgaattaaaagatgtttgtttggttgaattatagttaatatatatctgttttttgccattaaataataacgactaaaaaaatagtcatacatttgattcaatttaaaatcttgtaaataatggaactgacaaaggctgaagaacagattctgcactatctatggaaattaggagaagctactgtgcaggacatcctttcatgtatggaagaaacgggaaggccttcccgtaccacggtatctacaatcattcgtattcttgagaataaaggaatcgtggggcataagccgggttcgggacgcggctacatatattattcgctcatcaagaaagaagaatattcgcgcaagcaactattcggatttatcagtcgttactttgataattcttttgcatcgttgacttccttttttgctaaagaaagtaatttgacggtggatgaactggacgtacttcttgcagaagccaagcaaaagttggaagaagaaaaaggaaaggagtaaaacgatgtggatgttacttctgaaattgtccgtgctaactactcttttgtatagtttgtatcattggacaatgcgtgggaatacctttttcctgttcaatcgcttttccttaattggggggattgtgttggcgctggtattacctttcattcctatctattaccggactgtggcaatcgattcggtagttttgccggaggagactttccaaatagggaatgccataattataaaaatgaaggtaaatgaagttgccgatatcggaaggataatcacttttgtctatttttcagggattatgttccttacactatcacgtggctggagtattttccggttgctgacacatataagtaaaggtatcaaaactaccgtctcaggttttacattagtagaatctgcggctgcatcatcttccttttcttttcttcattatattgtgcttcctcaagggatgaatgaagctgatacgcaggtgattctctcccatgagaagactcatgtccggcaacatcattatatagacttgttcttgggagatattttctgtataattcagtggttcaatccttttgcgtggttttataaacgcgatatgatagagaatcatgagtttttggcagatagggctgcaagccatgtgtcggggatggatgtttataaggatacacttacccgttattggctgtatggcagcatgaaaagtctggtgaatccttttgcatattccaccagactgatgcggctttccatgttgaaaaagccttcttcattaacggttcacaagtgttggttggtgtgtcttttgcccttgctggctctttatgcctgggcgtttgccgaaccacggggcgttatatatgaggcggatcgggaggtaacggtagcgggaatagttactgatgaagaaggcaatcatgtgattgctgcatctgtactttgcccggcaaaaggcataggaacgatcagtgatgcagacggccgttatgtagtgacggttggaaagaatgacacgatccacattcagatgtccggataccaaagccggaaggtctgcgtcggcaatcgtgaaataaaggatcacaaagtcactataaatgtgcagttaaatcattaaaacaataatattttttacaaacaaaattttgaacactatgagagcatacttgattctttttctatgtttgagttgttatcttgatatttcagctcagaagccaatcgtcattaatctggcacgtactatcggcaagtctccaaaagaaatgatgttgagtgaactggcagccgatattaagtacattccacttgaaacgactgatgattgcttgataaacaatgagttttacatcatgcaatatacaggtgaggacattataacaagcggtatcttccatttcaataaagaaggaaaatttctgaataggataggaagaaaagggcaggggcctgaggaatatttgcaaggattatttgcttttggtgactggaagaacaagctgttgtatgtgcagaactggacctcaatgacctgctacacttttgacggaaagtttgtgcgaagtgtccctgcacctaagcagaatatgggggcggcggggctgtttgatgaaaatcatctcctgtatagcaatgatatgtatttcgctgataaacaaaatcctgtccaactttatttgatagatagccggaccgggaagacggctggtaagtggcgcggacttttggaggataataagaagtatggtttgattctgacttctcgggatttcatgtatcattatgccggccagttatactttaaaccagcattggagaatgtaatatataaaatggtatctcccaaaaagcgtcaactggcatataagtttgattgttcggggaaggacatcgacgtttcggttaacgaagctgatccgaataagagatttcaattcttgtccgtttattgggtgaaagagactgataaatatctgtttgtcaattatggtatgagagaaatctcgcggttaggaatatatgataaggcgaaaggaacctttactaatatagtgataaaagataatttagcgggtggctatgacattcatccggcgtggacgagcgatgacaaacatttgatcatgacttattttcccatagggatattgaaggagaaacgttgttcggaaagtttactgcctgagaggaaaaaggagttggatgaattggcaaaaaatataaaggaggatgataatcctgtggtggttgcggttacgctgaagtaatatgtgtgtttacactggagaaagattacttctctttccccagtgtaaacacgaattccagtccaccgctttgactgcttttggcggagatattgccgccatgaataatcacggcattttttacgatagccagccccaaaccggtaccgcccagtttgcgtgagcgacctttatctacccggtagaaacgctcgaataaacggttcaggtgttcggccggtacgcctacgcccgtatcggagaaactgaaatagtagaagttctcgtcctcacggaaacagttgatgttgatttgaatattcgttccggcgtaagcaatcgcattatccattaaattgcggaaaatggagtagagcagggagtaattacccttgatctgtattcccttctttaatgagtcgatgatagtgatatgtttttcttccaattccaaagcaacttcgttgatgatgttacctaccaatacactgatgtccacccgttccatgtcgatcatgttggcggcttcgtccatgcgcgtcaatacagatatgtcacgcaacagccggctcagacgattactttgtgcataacaacgttcaaggaaagtgttcattttctcccgtgaaatattatcattgttgacgattgtttccagatacccttggatactgctgacaggtgttttcaattcgtgggcaatgttctgcgtcagttggcgtttcaggcgcacctgttcttcttcctgagtgacatcgttgatagaaatctcgaaactggcatcttggaagataatacattctacgataaatgtacgtccgttcttattaatagtaatagacatccgcttctcatctttactgagcgaacgttgttgctggttcttgtttataaaatggataatctctttcagctcactgattgcaaagacctcttccgtcgtttccaggttagagtcggaaatcagattgctgtattgggtaaaaagattgttgaccagaatctcctttttgtctttcgtgaatatccctagtccctcgtgcgaaatctgaagatgggtaatcagtttttcacgttcgatatagagtgcttctttcgtttcgtgcagacgtttgtagatctgaatgatatgctgtgaaatttctcccagttcgttgtgcggaaaggctgactgcatcgccatttcgataggctcattccggtcggcacgcatggcaaactcgcggagttggctgatcgaagttcccagcttattggtgaatttatagaaaataatcatcagcaataaagaaacaatcacggtgaaccacaggtaatgcgggtctgctttcaggttattgattaagctgacattatacggcaacgccgaccggacaatataatccccgtaacgtgtggcggagtaaaaataaggaagtccggtggtttcggaagtacggcgtacatcgaatccgtttccttctttcaaggctctctgcacttcgggacggtcgcggtggttttcgtgttttatttcttgtgtcttataactgtcataaatgacatttccctgcaaatcaatcagcgtcacacgcaaatccttcaatgcatggtcacggatatatttgtcggtagtttcttcgatagccggactatcgttcagttgttcgtacagccggctgttatagtcttgtaactgtgtattcagcagttcgactttatattccctttcccgttggtactgataggcgatgaaacagattgcgaataccaggaacaacgaaatgaccgaaagaaagagtttccggctgaaagagaggaaatgtttttgattgacaggtaggttcataatcaataattattctgcttcgaaacagtatccgtatccgaggcgggtgacaatgcatttgccgtattcgcctatttttttccgcaagcgggtgatatttacgtcgatagtacggtcgagcacgtaaacttcatcgctccagatgcgggtgaggatatcttcgcgtgaaaatacacgtcctttgttctgtaccaatagaagcaatatttcaaattcttttttagtaagctgcacttcttcgccgtcgatactaacctttttcttggtaatatcaatgaccaatgactgatagacgagccgttcgggggctctttccgtttccgctgttgcggtacgccggagtacggccttcacacgtgcgatcacttcacgcagggagaaaggcttggaaatataatcatccgctcccaggttaaagcctgtgaccgtatcgttttccgtatctttggccgtgataaagataatgggcactttagctgttttcttgtcttttttcagcatattcgccattttgaagccggagatttctcccatcatcacatcgaggagaatcaggtgataactgctgatgtccatttttagcgcttcttcggcagaattggcggtatccacttcataaccttcgttttcaagattgaatttcagaatttcacagaggtcttcttcatcgtcgacaactaaaatacgggtttcgttcataagatatatgtattaatgtgatatgacaaagttagtctttttttttatttcgggacaaagatgaggagactttgttacgggcggatgaaacaaatattacaatcgtattacattcggcggaatacggctgttcggacgaaatttaatagtttttattggccgggggaggaaaaaacgtttgttatttgttatctttgttagagaaatagaatagcaatagattaaaatacaacttgcaagcaatgataaaatttgacttgaaaaatcacaggcgcgaagtgataggggcgatcatcgtccttttccttctgataggagggatttccgtttttaaatacacctctttcaattccggtttcgagattgttgatgatctgggagggaatatctttccttccgccatactgtcggtagccaccacggatgcgcaagtaatcacgccttcggactctatgtatctgggaaatccgaagtcatgtattgccgtgcgggtgaaatcaagaaccgcttatagccgtgtgcgtatcgaagtggcggagacgcctttcttctcccgttccgtgtcggagttcgttctaaatagaccgcggactgagtataccatttatcctgatataatctggaattatgaagcattgaaaaataatgttcaggccgagccggtcagcgtagccgtgaaggtggaaatgaacggagacgacttaggccagcgggtgcgtactttttcagtacgcagcatcaacgagtgtctgttgggatatgtggcaaacggaacaaaattttatgataccagtatcttctttgccgcctatgtcaatgaagaaaatcctatgattgaccaattgcttcgcgaagcgttgaatacccgtatcgtgaatcgttttctgggataccagagtaaggcgaaaggtgtggtagacaagcaagtctatgctctttggaacatcttgcagaaacgcaaattccgttacagttcggtttccaataccagcctgtcgagcaatgttgttttctcgcaacgggtccgcacgtttgatgatgcactggactcttcacaaatcaactgtgtggacggtagtgtgttgtttgcgtcgttgcttcgttctatcaatatagacccgattctggtacgtactccgggacacatgttcgtggggtattataccgacaactcccataaagacatgaacttccttgaaacaacaatgattggggatgttgacttggatgatttcttccccgacgagcaactggattccaccatggtaggtaaatcacagaacgaaatgtctctgctcaccttcgagaaatccaaacaatatgccaacaagaagtacaaagagaacgaagaaggtatccattccggaaagctgaattatatgtttttggagatttccaaagaagtacgcaggaaaatacaaccgatagggaagtagtgaacactttttttcgtatttttgcccgagtaatcattttaatgaaaaaggatgcaaggcaagaaatttatctctcccggagcatggttttctatgaactatccgtcggactggaatgagtttgaagacggcgaaggctcttttcttttctataatcccgatgtatggacgggaaactttcgtatatctgcatttaaaggcaatgctacttacggcagggatgccgttcggcaggaactgaaagagaatgaatcggcttcattggtgaaggtcggggcattggagagtgcatatagcaaggaaatgtttcaggaggaaggaaactactatacttctcacctgtggattaccggtatcggcaatatcgctttcgaatgttcgtttaccgttcccaaaggcggaagtgtgaaggaagcagaggaggttatcgccactctggagattcgcaaggagggtgagaaatatccggcggaacttattcctgtccgtctctccgagatttatcagattaatgaaagctacgagtgggtggtatctaccgtgaaagaggaactgaagaaagattttcagggagtggaagacgacttggagaaacttcagcaggtgattgacagtggcaagataggaccgaagaaaaaggacgaatggctggcaatcggcataacggtatgcaccattctggccaacgaagtggaaggcatggaatggaagactttgattgacggcaaccgtgaagctcccgtacttgaatacaaggaccggattatcgacccgatgaagatagcttggagcaaagtaaaagcagggcagccttgcaatgttattgaagaatataaatccttgattattaattactaaccacttacctaactaattactaaactacgtggcagtaccttatttacaagtagacaacctgaccaagtccttcggcgacttggttctttttgaaaatatatcttttggcattgccgaaggccagcgtgtgggactgatcgccaagaacggtaccggaaaaacaaccttgttgaatgtcatcgcaggcaaagaaggatatgataacggaaatatagttttccgtcgtgaccttcgtgtcgattatctggagcaagacccgcaatatcctgaagaattgaccgtccttgaggcttgttttcatcacggcaacagtaccgtggaactgataaaggagtacgaacgttgtatggaaaccgatggacatcccgggatggatgagcttttggtgcgtatggaccaggaggaggcatgggaatatgaacagaaagccaagcaaatcctttctcaactcaaaatccgtaacttcgaccagaaagtgaagcagctctccggcggacagttgaaacgtgtcgccttggctaacgccctgattactgaaccggacttgttgattcttgatgagcctaccaaccaccttgatctggatatgaccgaatggctcgaagaatatctccgccgtaccaatctcagcttgctcatggtgacgcacgaccgttatttcctcgaccgtgtctgctcggagattatcgaaatagacaatcggcagctttatcaatataaagggaattatagctattacctcgaaaaacgtcaggaacgcatcgacgcaaaaagtgtggagatagaacgtgccaataacctctatcgtaccgaacttgactggatgcgccggatgccgcaggcacgcggacataaggcccgttatcgggaagatgctttctacgaacttgaaaaggtggcgaagcaacatatccgcaatgataatgtgaaactggaagtaaaagcctcttatatcggcagcaagatattcgaagccgatcatctttataagagtttcggtgacttgaagattctggatgatttctcttatatttttgcccgttatgagaaaatgggaattgtaggcaacaacggaacgggaaagtctacatttatcaagatactcatggggcaggtacagcctgatagcggtacggtggatatcggcgaaacggttcgtttcggttattattcgcaggacggtctccggtttgacgaacagatgaaggtgattgatgtggtacaggatattgccgaggtcatagaactggacaacggcaagaaactgacggcatcccaattccttcaacatttcctgtttactcccgaaacgcagcatagctacgtttataaattgagtggaggtgaacgtcgccgtctgtatctctgcacagttctgatgcgtaatcccaactttctggtgcttgacgagcctaccaacgacctggatattataactttgaacgtgctcgaagaatatcttcagaacttcaaaggttgtgtcattgtggtgtcacacgaccgttactttatggataaggtagtggatcatttaatggtattcaacggacagggagatatccgtgactttcccggaaattacagtgattaccgagattggaaagatgcgaaagcgcgacaggaaaaagaggctgagaaaccgcaggaggagaagacggtccgtgtccgtctgaatgataagcggaagatgagcttcaaagaaaaacgtgagtttgaacaactggaaaaagaaatagccgaactggaaacggagaaggcgcagattgaagaacagctgtgcagcggtacgctctctgtggacgaactgaccgagaagtcaaaacgattgccggaagtgaatgacctgattgatgaaaagactatgcgctggttggaactcagcgaaatagaaggttgaattccgaataacaataaacccgaaaattctgataaccagatacccctgataacataaacctttatgacaaacctgaccaattatcatagtcattgcctgtattgcgatggacgggctaatatggaagattttatccgctttgctatcagcgaaggctttacttcctatggcatttcttcccatgccccgttgccgttctctactgcatggacaatggaatgggatcggatggatgattacctttctgaattctcccgtctcaaagaaaagtatgctgataaaatagaattggcaatcggccttgaaatagattatctggatgaggacagcaatccttctttgcctcgttttcaggatttgccgcttgattaccggatcggttcggtacacatgctgtattctccggagcgggaaatcgtggatattgatactccggcagatactttccgtcaattaatagacaagcatttcgatggtgacttggattatgtggttcacctttattataagaatctgcttcgtatggtagaattagggggatttgatattgtaggtcatgcggataagatgcactacaatgcttcctgctatcgtccggggttattggatgaaccgtggtatgatacattggttcgcggatacttcacggccattgccgaacacggctatattgtagaaatcaataccaaggcttatcatgaactgggaacattctatcctaatgaacgatatttcactttcttgaaagaattaggtgttcgggtgcaggtcaatagtgatgctcactatccggaaaggataaataatgctcgtgctgaagctctggctgctttgaagaaggtaggtttcacttcggtagtagagtggcatgatagaaaatgggaggacacgggaatatcagttcctcggtgaccggttatttatttgtaagttggagtgcaaaagattcgtgagacacgatttctttcttttttatatgaatgatataagtgcctggttctgagatagcaatcggattatcattgtctattagtaaattggtaggatgataaacacttgcgtaacatagatcattgatgatggccgcttgtgcttttttgtcattgcggatgatatgaacggagcgactgtcgaaatcgcgcactttttgttgtgtggtggctggaagtgtcagatatacataagatgcaggtgcatctttacggtgttttaagtaaactgagaataatttactttttagaatttcgggtttgtacattcccataaagtctttccattgtccttctttattctcggtcagagtgatgcaagtgtccgcctgcaagatgatatatccagtattatcatggaaaatccgtttattgtcatcagaccatactttgcctttgctgaaccgttggtcaatagatgtcataatagtggctgtgctgtcagcatggatgttgcttcccatacataatacatagttatccgtaaatatccaggttttattcgcctccagtttgttacgtttcagctgcatggcagtaattccggtattttggtaagtcgttcctcctacataggaactgtgatttcgcgcatctgttttattgggattaggaataggcgcattgctttcataagtagtaatccccgggattcttctccaattccaaaaaggaaaaatgttatggtattcatctccatgcacatacgtatacaatgcaccgtcggccatgtaatatcctttcaggttatcctcgttcaccagttccgtgccgattactcgttcggaagccatacgtacggaagccagccaggtaggagtacggtgaacggtatagtccgactcccggaaatgtttgtttccggtgaatgagttggggacttgtgaaaaagaagaatttcgaagaatcattttctttatttgatcggcaacttccggttcgctgcttttcattaatgaatgtgcggcaaatagtaaactaaatcctttgtcaatatctgcgttgcggaatagttggcggttaagcgcatttacatcccaatatcccctccagataatccattggtaaccttctagtagcagggaggtgagaattctttgttgttcctgtgaaaaagcaagggtagtgccggtaaatagttccgaatagaaactcatattgcatataaaagacaggccgtaattgccaaactgttgttggggcccgtgctggtgaaaactccagtcagctttgattccttctttttgtccgagagttatttcagaggtaataactttccgtgcttcttttgccagttgccagtcattctgcaataaagctctgattagtacattacctgccagccaaactttgttctgtcctgtcatgccgaaggatgaattcatcattactttgattgcgccttgtttttccggttcgctcatttcttgttcgaacaataggaatgcgggcccgagtgtacgtggaatgccgatttgattataccaccaatttttgcataccagttttctactgaaccagaaattcattgcttgatgaatggcgttagtcagtcgggctctttcagacggtttaagtatctgctttttctggtaatggtatttagtgagtttcaatatccgttcggtatgttttttcggttcccacccggaacgtttcgtatctgcgtagttgatatcttcccatgaaccgtccgtatggagagtatttattaaatgtttgatttctttaggggagataggatatagttgttgtaactcaattacattctgatccgaagcttccttctctggagggattgttgataattgcctaagaagcacctccttacctttatctttgccgacagtggcatttatatagtttcttttgattaaggcgactgagtcattgaacgcttcttgtgcatcgagcggtgcatagcttaatagacaaagaagtaacgagagataaaggtaagagggtgtgattttcatattttctattctagactgttttcggattgcttttctgtattttatttattctgtccgtttgcaggcattcgccaggaaaaactcattcaatgcatcttcgtaatttccgtgaatcagaatatgatgattgcccaatggattcttcaggaaatactcggcgggagtattcatacggatacgtacctgtgtacggcacatattgatataattcgtgttttcggataatgttcccgtggacaagtaatattcatccagacattcgccgccacatttaataatagtcacgtctcctgttggaagtaagccttggatagcaatacctttttctgtttcgaagtggttgcggataatgtatctttccgtttgtttaaggcctatggtacagtgagccaatataagctcgttggtgcgggaattaatcatggaaggattcgccatgaatccgtcttttccggttaatgacttcacggccagcaaagtaaatatcgactgaagatccccttcacaacctgccattatgccatcgtcattcagcaaagataatgccagacaaccggtagtgtcgatttgctcaatcagtttgaaacaactgagtgtcaacgcctccaacttttcttcttcgcatactttcttaatagcccgatataatcgcatcgctttgattaaatcttcgggagttccttcacggcaggcaagagcttgtgaagcaacggcggcacaggaagcacctacctgttcatctgtgatttgttgaaaatgttcataaattcgttccaatggaatgtctatgtattcgataccccaacggcgttttgccagaagatagtcaacattgctggcgaccaaccaggatgaaggtgttccgataactccgatgcgtttgccgaataaagaacgttgtgcccggaaattattatagagtatatgtacacgttgtatgattgccggtaattcaccgtgaagaatttcgcttttcattcctcttccgcgtaaccatgtagatatctccagagcggctgcaagtgagttttgcataccgtcggccagtaaaatggcagggcggggaagtcgttcgaaatgttggatgaccagtctttctactccgccggtagcgataaaaataatcttgaaatcatcactcgtcaacttgtccatatcctgataatcgacaagcttgacagtataatatttttcgagttcgcttaaaatcgcttcatgcgaactgcgcagcgtggcttgtttatgaagtagtgacgcaaatgagataaggtgtatggtcattatgatattgttttaagttttccgtatgacaaatgtatagctttattttcaaaatcccataacgtttttaaccttgctaaggtttttaaagtttttatgtctctgtattcaaattattgcgtacatttgcagctccaagtagataaagtaaatagtaattaagtaatttgtagttaaaattatgccaaccatatccattcgcggaaacgagatgcctgcatctcctatcagaaaactggctcctttggcagacgctgccaagcaacgcggagttcatgtatttcacctgaacatcggacagcctgacctgcccacgcctcaggtcgcgattgacgcgatacgcaacattgatcgcaaagtgctggagtacagtcccagcgcaggttatcgtagctatcgcgagaaattagtaggatattatgcaaagttcaatatcaatcttacagcagatgatataatcattacgtcgggtggttcggaggcggtgcttttctctttcctttcctgtctgaatcccggggatgaaattattgttccggaaccggcttatgccaactatatggcatttgctatctctgccggagcgaagatccgcactatcgccacgactatcgaagagggtttctcacttccgaaagtggagaaatttgaagaactgataaatgaacgtaccaaagctatcctgatttgtaatccgaacaatccgaccggttatctgtatacccgtcgtgagatgaatcagattcgtgacttggtgaagaaatacgatttattccttttctccgatgaagtatatcgcgaatttatctataccggttcgccctatatttctgcctgccatttggaaggcatcgagaataatgtggttctgattgactccgtttcgaaacgttattcggaatgtggaatccgtatcggtgcgctgattaccaagaacaaagagatacgtgacgctgttatgaagttctgtcaggctcgtttgagtccccctttgatcggacagattgctgccgaggcttcattggatgctccggaagaatattcacgtgagacctatgatgaatatgtggaacgtcgtaaatgcctcattgacggattgaaccgcattccgggtgtttattctccgattcctatgggagctttctacacggtggcgaaacttccggtagatgattcggataagttctgtgcctggtgtctttcggactttgagtacgaagggcagacagtctttatggctccggcttccggtttctataccactccgggctccggtatcaacgaggttcgtattgcttatgtattgaaaaaagaagacttgacccgtgcgctttttgtcttgcaaaaggctttggaggcgtatccgggaagaacggaataaaagatgtctttatcacttttcatagcccggcgtatctatcgtgaaagcgatggcggaaagcaggtatcacgtcctgcggtcctcattgctatggcgggtattgctatcggactggctgtaatgattatagcggtagcggtagtgatcgggtttaaaagtgaagtgagaaataaggtcattggatttggctcgcatatccagataacgaatctggatgcggtcaattcttatgagacacatccgattgttgctggcgacagtttgattgccgccctttccgattatcctgaagtgagtcatgtacaacgttattccaccaaaccgggaatgataaaaacagacgacgcctttcagggaatggtgctgaagggtgttggaccggaatttgattcccgctttatgaaggaatatctggtcgaaggagaaattcccgttttcagtgattctgtatcttccaatcaggtgcttatttccaaggctttggctactaagatgaagttgaagctaggagataaaatttatacctattatatacaagatgaggttcgtgcccgtcgtttgacgattgccggaatctatcagactaacttctccgagtatgataatctttttttattgactgatctcaatctggtgaaccgcttgaacggttggcagcgggagcaggtgagtggagtggaattgcaggttcgtgattatgataagttggaagacgtaacttatgaaatcgctattgataccgatagtcagcgggataagtttggaggcatatattatgtacggaatattgaacaactgaatccccagatatttgaatggcttggcttattggatatgaatgtatgggtgattttgttcttaatgataggggttgccggatttaccatgatttccggtctattgattattatcattgaacgtactaatatgataggaatcctgaaagcgttgggagctgacaatttcactattcgtaagacgtttctttggttctctgtttttcttatcggaaaaggaatgctttggggaaacgtgatcggtctggcattctactttattcaatctcaattcggaattctcaaactcgacccggaaagttattatgtcgatacagtatcggtctctttcaatatctggctttttcttttgattaatatcggtacattgttgtcgtcggtgctgatgttgatcggtccttctttcctgataacgaaaatcaatccggcaaactctatgcgatatgagtaagtcttccttccggatataagtaaacaggtttattatcttctcataaaatcacctttccctcggaaaaggcggcatagcttgaaattaagagattgtatcggttggagaatatcgaatatgggcaatgagaaataatattttctgcctccccccatttctttggctgtccggttaatcacaatagcttgcgttatgtaacgaagcagccatatcaataatgcaatacctgctaccagccaatgaaagttgagtatgccgaatacgatacctgccatacaagcgacatagaataacaggcgggaaaatgtttcgaatcccgacaggtaacgttgtgctccacggtagaagcgtgcggtagccatataactaactttttcttccttccagtctttgtagcggtagacgggctgtatacgcatcgtagcgttgaagtcagtttctacgcgcgtattcgttttggttactatttgattaatgaacaagtcatcttctccgcgttgcaggttcagatatttggaatatcctttttgtttgaagaataattctttacggtaagccatgttacgaccgatacccatataggggtttccggccaaggcgaaccccagataacgtaaagactgaaataatgtatcgaatgcgatacgtttgtgtaaccagcctttgatacggtcgtatccgctgtaccccaatacgatttgcgtttgcgaagtgaagttacgcgccataagtttcagccattggttacttgcaggcatacagttggtttccgtaaatacaagccagtcgtgcttgctggctttgatacctaatgtcagagctagtttcttgtggctgatatagcgggcgctgtccggtgtaaaactatggtagagatgaggatatttttcttccatgtatcccagcacatcttctgtttcatcagtggaagcgtcattgataacaatgacttcgaactgcgggtaatcttgttccagaatagcaggcagaattttacgcaggttatcagcttcattgcgtgcacaaagaatgacggaaagtggaggcaattcccgtgagaagtgggtttcctctttgcgtacagtcttattacgaacgtgtatccgattgtacaaaccgaaatagtaaataagctgaatgataaaaagaatacctgccgccgataaaagaatcagttcggcagtattgaatgtaaatgcttccattgaatttaagtgtcgtttttacgcccgcaaaagtacgcattttttcgatagttccctcatcttgaaggaaggttatttcgcaaatccagatattctttcttgaacatattcacgaaaaggaagaatagcgagagtaataacggaccgaagatgactcccataaatccgaataacggcaaaccgatgacaactccgaaaatagtgatgagcggatgtgtgtccgccattttcttttgaagtataaatcggatcaggttgtcggattgtgacacgacgatggctccgtatgcagcgagcccgattgcatggaaccagtctccgctaatagccagataagcggctacgggaaaccataccaatgctgtacctaccattggaataatagttgcgaagcaggtgaggaaacctaataatagtatattgggcgctccgaaaataagatagcctatcatggcgacgcctccctgaatgatagccagcagaggaatgccgatagcattggaacgtacaatcatgttaatctcacgaatgacttcctgcgtatttgcctcattaaaaggaagaatgtcgttgacgtatgcttccattttttttcctcctatcagcataaagtaaagcacgaatatcatgacgaatagattgactgcaaggctgctggcgccttccataattatctgtccgacacgggggaggatagatacgatgaatgatagcgtatcttttcccaatacatcataaccggtcttttctttaataaattctgctacttgctgaatgggttcgataaaggtttgcggagccagatttatatcctgaagtttgtttaccaccagccagattgttaatcccagcggaacaagaaacaccataatggtttctgccgtaatcagtaatgcactgatgttgcgtttcattttccgcttttctgtcagatgattcatgtgtgtgcgtacaagtatatacatagttaatgctcccagtaatcctcccaaaaaaggagtgatttgccggaagatgataactcccataaatagaataatgacaatgagggaatatttccagtattgttctttgatgctcatatcgtgcgattcgttcgtttatataataataaacacgaaaagcaccggaaaggtttgttttataatggcatatcaatatgaaaaattgttttgccgggattgctttcctgaatggtgagatgcccgtcgtgaaggcggataatttgtttgcataggcttaatccgataccgctgccttctgatttggtggtaaaaaaaggaataaatatcttttcctgtaattcaggcggaatacccgggccgttgtccgcaatgtcaatagatatgtgttcgtcttgttgtgcatggatgctgattctgcctttttcttttccttccagtgcttgcatggagtttttcagaaggttgagcaggacttgggagagttggttctcgtcacctttcatataaatcgttttaggttcgcaggtcagtgtgaagatgatattgctttctttgaagtcgccggataagagttcccggagattttgcagggtcgccgtaagtgagaaaagtttcttttcgggttttggcaggtaggagaggtgacggaaggattcggtaaattgcaataaacgttcgctttgtgcttgaatgatgcgaagtccgcgaactgctttttcgttgatgtccggataggtggacagtgtttgtgacagggagataatgggagcaatggtgttcattatttcatgagtgagcacgtggcttagtttgttccacgattcactttctttgtcgctaagttcgtcaccgatatccttgatagacaagagcgttattgtttcatcttgtagtttcatccggctttgtgaaagactgaggtgctcctttttgcctttttcttgcagtaaggattccagttgtcggtatcgggttaattgctggcagtctaataaggaaagggcagtgctgtttgctatgattatttttccggtagaatcccatgctaatacaccgctgggcacttcttccaagagtgagcggtagaagtgttcctgtttggaatattctgattgagttttggcgagcaggaaattgatgcggttgagagagcggttcagtttttcctgttctttactaacgttttgttcgggaaagtaaagcatattatccttgtcttctatggcatcgaaaaagacacgcaacttttggttgaatgaatttagtttatttaccagcctgctgatttggaagagggaacaggtaattagtaatgtgcctattacaaatccgcgttgtgagatgataagccaggcgcctgttcccgaggtgacgaggataagcatgacgtgtagtagtataacccaatagatgtgtcggctgaatatcatgctgttcagagtttgaaacgttttagtttgttatagagtgtctgacggctgattcccaattgttcggcggcggcagtcaggttgccattattttgcagaatggctgtttcaatggcttgcctttccacttcttccaaattagggacagtgctggtggtttgcggcttccaggtttgttttaccaaaatgtctttggggcgtatcacgttgccttcacacaagataacggctttctcgatagcgtgctgcagttcccggatattgcccggccagtggtaagagcgtagtttctctattgtttgctcatgcattcgcatttccgggcgttggtatttcgaagcgaaacggtggagaaaggtttcgacgaacaggagtatgtcgtctcctcgttctcgtaatggaggaatttcaaggtggatagtgttgatacggtagaataaatcttcgcggaataatccttgtttcaccatttccgggatgtctttattggtggcggaaatgagtcgtatatcaacggggacgactttattacttccgattcgggtgatattcctgttttgtagtacagtcagtaatttggcttgtagtgcaaggggaagatttccaatctcatccataaaaagcgaactgccgctggcagcttcgaattttcccggacggctttcgtaagcgtccgtaaaagctccgcgctcgtgaccgaaaagctcgctctcaaaaagggattcactgatagctcccatgtcgatacttgacatgggacgagtattgcgtggagacaggcggtgtatttctttggccagcatttcctttccggtcccgttttctccggttatcagaatattggcgtcggtcctggctactttattgactacctttattaattgtagcatggcgggagaatgccctatcagcatttcaggtttgttcggattgccggatcctacgattgagttttttgattttgaggaacttttcctgttcgatttattattgtatgcttcctttattttctgaaccagtgtccggttatcccaaggtttgagaagaaagtcggtagctccgttcttcaaagcttttacggctagttccacatctccgtaagcagttaacattaccacagggagtgcggggcggatttcgtgaatatgtttcagccagtatagtccttcgttgccgttattgataccggccgaaaaattcatatcgagaattacgatatcaatggaagtggtagtgagcagtgttgttatttgattaggattggcagctgtgcggactgtactgaattcattttcgagtaaaagttccagcgaagccaacacacttttattatcatctactattaaaatagttccggtttccatatatgtaagattgggggggatctgtctgggttgaacgattctttaagtttttgggtaaagatattcgtttttacttttccctgcaagagagtgtccaataattagacgttttatgatacatttcctgaaacatgactttatcctatgtttcgtttaagtaatatttatagcctgaacgttgaataatggctgtttgcacgcaggtcatggtggctttttattgataacgtccaatttttagacgttatagtgtgtaataattggacgggaacgataaaataatgtatgtcatctatcttgtaatcagtggtttaagtattgtggcattatgtttgcttttttaattcatatagaacacaattgcatatatactgaagaatgaggaacattttctttttattgtttttattgcccgtgattacgtatgctcaatctgcaatgagtttggatgaatgtatccgtttggcatggaaacagaatccttctatacggaatagtgccattaacataaaggaagcacgaacggattatgctgccgctatcggtacatttcttccccgcatagtagccaacgcagaaacaggaaagcgtttcgggcgttcgatagacccggataccaatggttatacagaaaagacttttgaagaaggaacgataggtcttgatatgactttgtctttgtttgaaggtttttcacgtatcaatcaggttcgttttcggaaaataaatcgggaacgcagcaaatgggaactgaaagacaggcagaatgaactcgcctatcaagtgacggatgcttactacaaactggttttggaaagaaaactcttgaatttggctttggagcaaagccggttgagcgaacgatatctgaaacaaaccgagacatttgtggaactgggcttgaaatccgtttccgacttgcaagaggtaaaagcccgcagggaaggggatatatatcgttaccaatcccgtgctaatagctgtcggttgtcattactgcatctggaacagttgatgaactttcagtcgggtgatacacttgtcattcaggatacgattgtcgaattgaataaactcccgttgctttcactcccctctacggaaacattgtatagacaatcgttggaagtactccctgccatgcgtatgattagcttaaagcagaaagctgcccgcaaagaatatgcaatggcgggcggagctttttctccttctgtttatgcccgctttacggtaggttctaatttctacaacactgcattttccgccaggcaattgcgggataatataggaaaatatatcggtatcggtatctctttccctttgttgagcggttttgaacgttttacgaatcaaaggaagttgaaattgaacttgtatcgcctgaagaatgaagaggaattggagaagcaacagctatatactgaaattgagcaaactcttctttccctacgtgccggctatacggaacatcaacaggtattgcagcaattgagcgcggaaactctggtcttgaaagaatccgaacgaaagtgggaagaagggcttatctctgtctttcagttaatggaagcccgcaatcgttttatttccgccaaagcagaactggttcgtgtgcgcttgcaggtagaaatgatgatgaaactggagaaatattaccgggagggaactttcttataaaggcagagtttatatattttgaataacaaagttgatacttctttaataactaatttataataaccctatttttgattgattccttatggatacacctattgaacgtaaacccggcattacccgtaaacatctatatgtaataggtggtatagcctttgttattgccgttgttttatatttcatattcagagacactacctcttccatgactgtggagaaagaacgtctgacgattgctaccgttaaccgtggtgagtttaatgactatattcgtgtcattggtcaggtaatgcctaatcgtattatttatatggatgccgtggaaggtggacgtgtggaagaacgtctaaaagaagaaggtgctatggtgaaggcaggcgacgtgattttgcgtctcagtaatccgttactaaatattggtattatgcagagcgaagcggatctggcttatcaggagaatgaacttcgtaatacccgtattagcatggagcaggaacgcttgcgtttaaaacaagagcgtattgggctaaataaagatcggctggtgaaacagcgccgttatgagcaatacagtcgcctgataaaagagcaacttattgcagaagaagattatcgacttgccaaagaggagtatgatgcggctaaagaacagttggatgtcattgacgagcgtattcgtcaggataatattttccgtgaaagtcaggtaaacagcttggacgagaacatacgtaatatgaaacagagtctcgcgctggtacgcgaacgaattgagaacctgaaggtgaaagctcctattgacgggcaggtaggtaatcttgatgcacagataggacaatcaatagctgcgggcgagcacattggtcagatcatcacttctgacctgaaagtacaagcgcagattgacgaacattacgtggagcgtgttgtacccggattgccggctgactttacccgtgacggtgtcagttataaactggaggtgacgaagccgtatccggaagtaaaagaagggcagtttcgtaccgatttgcagtttacagccggacgaccggagaatatacgtgcagggcagacctatcatatcaatctacaattgggcgaccctgcacaggctattttggtgccgcgtggcggatttttccaaataagcggtggacgatggatgtatgttgtggatgaaagtggtaaatttgctattcgtcagcctatccgcatcggacgacaaaatccgcagtactatgaggttaccgaaggattaaaacctggtgatcgggtgattgtatccggatatgaactgtttggcgataacgagaaactgatactgaaataagtctatgatatgataaattacttttcacaagtgatacgtagtcagcgggttaaaaaatctctgacactgataaatataacgggattgtctgtttgtattgcaacagcattgcttatcatactttacgtatggtcggagttaagctacgattcattccacaataccgagcgtgtatatcgtgttgaaagccggttgtatgaaggcaagacgctgacagataactgggcgactacagcttacggccatgcacctgcaatggctcgtgaaattgcaggcattgagaagtatgtccgtgtaacagcacaagaccgcgaacaagtggtgaattacttcgacaggagatttgccgaagcacattattgctacaccgaacctgctttttttgagatatttaatttcccgataattagaggagataagaccgggcaactggtacgtcctaatacggtggtactgaccgaaagtgcggcaaatcgttattttgatgaagaagacccgatagggaaggtgctgactttcagtacgccttcatcgcagcaaaactttgaagttaccggcgtgatagcagatatgcctgttcgttcccatctgcaatatgattttctactttcatatagtacgattcccaaagagcgacaggacatttggtacattcacggagtttatacctatgtccgcctgatgtccggaaaatgtccggaagagattgaagaggcttttctcaatatatccgataagtacaaaactgatgccttgagacataagacttgggcggtagaactgataccgctgaaagacattcatctcactccacaaaaagcttatgagaaagaagtgaaagggagtcggactgcggttcttatactattggtgatgtccgttgccctgctactgataggttgggctaatgccttgaatctgaccgtggcgcgtttcttggaacacggacgtgagttcgggttgcgtaaggcttttggtgcttcgcgccgtcagattattatccagggacttcttgaatcaggtttcatgaatctgttggctacgctgatagctcttggttggctggaacttcttttaccccttgtttatcgctgggcagggcaaagctttgggacggatatacttatgttgcctgctttctggggaattgtagccggagtggttgttattggtacgtttgttgtaggcttctatccttcttggctgatggttactatacgtccgtcggaaattatgagggggaaactgttacacggtaaacgtggtaaccggataaggaaagtgctgattgtggttcagtttctcgcttcttttgttctgattactggcacgttcacagtgattcggcaagtgtgttatatgcaaagtgaggcttccgtcgattctcattcacgtatgttagtcattaagtacccctctttcaccgagggattggcactacgtctggaaagtttcaccaagcgtctgaagcaacgggcagatgtaagccacgtaaccgtttcaggagctgttcccggggtggaggtagccaattattttaccaatcgtccttatggaagtgacccttcgcaagtgaaactgatacagatgtttgccgtagattatgattatctatctgcctatatgcccactatgatttgtgggcggtacttctctgaggactttggcggtgacctcaaccggatagtgctcaacgaggaagcagtcaggttattaggttatgagtcgcccgaagccgcattgggacagcaggttaaaatggaggtggtaggcgaaccgctcgaaattatcggagtggtgaaaaactatcaccagcaatcgctttccgtggcttacaaacctattatcttctttatgaaagagcgagtaccatttattgcaacaccttatatttcagtccgcttgacaggcgaaggagaagatagtgctttgacggagatcgagcagatgtatcatgaatattttccgacttctttattttcttatttctttttgagtgatttgaatactttcctttataaatcagaccgtaatttcggttggatatttgccagtgcttctttaattgccatatttgtggcatgtctcggtttgtggattgtaacattgttttcaaccttatcgcgcttgaaagaagtgggtatccgcaaggtgctcggtgcaaataaaagcagcctgttttttatcttgaccaaggagctgatgttgctcactatattggcatctgcaatcggtatacccgtatcagcagtgttaatgaatggctggttggagacgtatgctttccatatttcgctaccttggtggatatatgcagtcgtttttgcgctgttgatgctgattgcgttccttactgtttttcaacaagtgtggcgcattatctgcttgaaaccgatgagtattttaaaatatgaataactaataaatattaaactgattatgattaagactgaaaaactgacaaaactcttcgcaaccgaagaagtgcagacaaaggcattgaacgaagtcactttacaagtggaacaaggggagtttgttgctataatgggcccttcgggatgcggtaagtcaacactgctgaatattttgggtacactcgattctccaacttccggctcttatttctttgaaggaaaacaggtggataaaatgaatgagaaccaattgactgccctcaggaaaggtaatctcggctttatctttcagagtttcaacttgattgacgagctgaccgtatgtgagaatgtagaattaccccttatctatataggcgtcaaagccaatgaacgtaaagaaagagtaaagaaagtactcgagaaagtaaacctgctgcatcgtgccaaccattatccacagcaattgtccggtggacagcaacagcgcgtagctattgctcgtgccgtagtgacggactgtaaattgcttctcgctgacgaacctaccggaaatttggattcggtgaacggtatagaagtaatggaactattgagtgaactgaatgctcagggaactactatcatcatcgttacccactctcaacgggatgcaatgtacgcacaccgcgtcattcaattattagacggacaaatcgtagccgaaaacgtcaaccgcccgctgggaaaaaatatgtcagctaaaaatgaaactgtatgataggaaattactggaatagtgcttggcggaatctgatgaaacggaaaaggttcagtttcattaatatattcggactggcgattggtatggcatcggcactgctgattcttacctacgtgacttttgaattcagctttgataaaatgcacacaaagtatgaccatatctaccgtgtgcaaagtacgtttcacgaaggggaagtgctgaccgactactgggcaagcagctccttcggatatggttcggcaatgaaagagaaccttgccggaatagaggattatacccgaatcggctccctactccagccggaacaaatagtgaaatacggtgaactgaccttgcgggagaatcagatagcgtatgccgaacccagcttttttcgcctttttgatttcgaacttttgaaaggcgataagaaaacctgtctctccatgccggggcaagtggtaatcaccgaacgcattgccagtaaatatttcaaggacgaagaccctatcgggaagatattcatctttaccggcgcatacgacaagatatcgtgtgaagtgaccggagtgatgaaagaaatgccttccaactcgcatatacattatagttttctgatttcgtataaatctctgcctaaatatatgcaggaatattggtacaaacacgaggcttatacctacgtcctgcttgactctcccgaaaggaaagcggaaatagagagagaatttcctgtaatggcggaaaagtacaagacggatgaagccttgaaaaacaagacatggggagtctctttaatccctctggcagatatacacctcactccgcaggtaggatacgaagcggagacgaaaggaaaccgttcttctatgattgccttgatttttgctgctattgctattttggctattgcctggataaactatataaacctcaccgtagcccgttcaatggagcgtgccaaagaagtgggagttaggcgggtagtgggagctttccgcaagcagttgattcatcaatttttgtttgaagcattagtgatgaacctgatagcttttgtactcgccgttggcttgatagaattggttcttccgtactttaatcaattggtaggccgtaccgttaccttctccgtttggctgatagattattggtggattttattgattcttgttttcatcgtcgggatattcctttctggatattatccggcattggctttgctgaatcggaaaccaattatgttgttgaaggggaaattcttgcatagtaaatccggagaacggacacggaaagttttggttatcattcaatatatggcttcaatgatattgttgtgcggcacattgattgtctttgcacagttgagctttatgcgcagccagtctttgggagttaagaccaatcagatattggtggtcaagtttcctgggcataccgagggactgaatacgaaactggaagctatgaaaaaaacgatagcacgtcttccgttggtatatcaagtcactttctccggcgctgtgccgggcgaggaagtagcgactttcctttccaatcgccgtaccaatgatgctctgaagcagaatcgcctgtatgagatgcttgcctgcgaccccgattatgtggatgcctatggattgcaagttgtggccggaagaaatttctcggaagactatggagatgatgtagacaaactggtgattaacgaaacggctgtacgtaacctgggctttacatctaatgatgaggctataggggagttggtgaacgttgaatgtactgatgccccgatgcagattatcggagtagtgaaagattatcaccaacaggcattgagcaagaattatacacctatcatgttgattcataaagataagattgcctggttaccacaacgttatatctctatcgtaatgacttccggtgatcctcgtgaattggtatcacaggtacatgagatttggaatcaatattttgcggattccagtttcgattactttttcctcgaccaattcttcgaccaccagtatcgtcaggatgaggtgtttggtgtaatgattggcgcttttaccggtttggctattttcatttcctgtttgggactttgggtactggtcatgttttcatgttccacacgtaccaaagaaatggggatacgtaaagttctcggggcttcccgttggacactcttctatcagttggttaagggattctttctgttaattttgatagcagttgttattgctttgccactagcttggtttagtatgaatgcctggttgagccattatgctttccgcacagatttgaaagcatggttctttattatgcctgtattgctaatgttgtttatctcatttataacagtagctttccagaccataaagataataatgagcaaacctgcccgctctttacgatatgaataatctctgaatcactcaataggatattcgttaatatccaatttgatttatgttaaatgttaacgagactattacttttattaaaccatgttataagatgcgttgctttactccgaaaatttggagatatgctgaaagtccgtatctttgcaatgtgtttttcatagtattagatttaaggttaacaaaaagattggctgtctgggatagatagcctttttttatgctttttagtttccttctatttttcacaagtatatctaatttcctaattctttttcgtttgtgttctaaagtatgtttttcaacacatatgcttatttttctattgttttcttcttgcattctaaaaaaaatctcttaatattgcatttgtattatttgtcggacaaataatacaaataataaaaatctaatgatatgaagatagaaatcaatcaaacaacgttaattgatcaggtagaagacagcctgcttacctatttcaaaaagaatgatttaggacgcggggattctattcctaatgagaatagtctggctgcagaactgggagttgcaaggagtgttgtcagagaggcactgagccgtctgaagatgatggggttgattcacgcacgtccccgtaaggggatggttctgacagagccttccattttgggaggaatgaaaagagtgatagatccccgtgttttaagtgaagaaacaattttggatttgttggatttcagaattgcacttgaaataggaatatcaactgatattttccgtaagataactcctaaagatattgaggaactgagcgaaatcgtaaaaatgggaatcgtttttgaaaataacgaatacgcgttaattagtgaatcggcttttcatacgaaactatataaaatcaccgggaataaaatcatatctgaatttcaggaaatcattcatcctatacttgtctatgtgaaagagaaattcaaggattatttgaaacctataaatatagaaatgagcaaaagcggtcggatagctactcatgctgatttgctggactttatcaagaaaggggacgagaagggttaccgggatgctatcgaaaggcattttgaggtctataaaattttcaaggtaaaccgaagtcaggaattgatggctgagaaggcagaaagtgaaaaggtagaaggtatatgaaaaggtggcatctgataattttatgtttatccttaattttattgctaatgaatacatcttgttttagaaaagaagaaaagaggatagaggcacaatgggaaaatacattgttgcttccgggatgtgccggcatgccggagaacgtcggattagcaggtgcatattccgggatagtggaaggcaagttgcttgtgttgggtggagctaactttcctgataagtatccttgggagggaggtattaagacttggtgggctactttatatagctacgacttggatacagaggaatggactgtatatgatgatttccttgaccgtccgcttgcttatggggtttcaataagtttgccggaaggtttattgtgtatcggtggatgtgaccatgcgcggtgtagcgataaagtatttctgataaaaaaagaaatagattcatttgtgatagattctgtcagttatccttctttaccggttccattggctaatgcagcgggggctatttgtgataattgcatttatattgctggggggcaggagtctatggtaaatgaacggtcaactcatcatttctatatgcttgatttgcatcataaggagcaaggatggcaggtaatgccgggttgggatggtccttctctttcttatgcggtaggcgtcgctcaaagaggacggttttacctctttagtggaagaagctatgcaccggatgagttgatgacggaatatacggagggatatgtatttgaaccgggtactgggaaatggaataaaatgaccggttctttcccggtgatggcgggtacggccataccttatggagaagacaagattttgatactgggaggagtggaggaaattttgccgacatctcccaagcacccgggatttggccgtaaacttcgggtggtcagtacggacatgaatgctttggtagatttgttcgattgttcataccctattcccgttacaacgaatgctgtttctattggaaatcaggtatttgtagtaagtggcgagatacaacccggcatacggacaccgttaattttgaaaggaactttccgaaagtgaaatataataatctaattaaatgcattatgaacaattatgaaagactggaaggtatggttgcggccaccttcaccccaatggatgaaaatggggacgtgaatttatctgttattgataaatatgctgattggatagcatcaactcctgtaaaaggggtatttgtgtgtggtacgactggtgaattttcttcgttgactattggcgagcgtaaggcggttcttgaaaaatgggtagcctctgctgctaaacgttttaaagtgattgcacatgtcggttcaaactgtcaacgagacgcaatggaactggcaagccacgcggcacaaactggagctgatgctatcgcttcaatagcaccttcttttttcaagccgggaacggtagatgaactggtcgatttttttgcaccgatttgccgggccgccagtgagttgcctttctattattataatatgccgtcaatcacaggggttaacttgccggtagataaatttttgatagaaggcaagaagaaaataccaaatttggtaggaacgaagtttactcataataacctgatggagatgggggcttgtatcgatttggagcagcataagtttgaagtattacatggctttgacgagattctgattgccggtttatctatgggagcagtggcaggtgtgggaagtacatataattatatccctaatgtctatcatgccattttcgaatcaatgaagaaaaatgaggtggaaacagcacgtgcctggcagatgaaatcgatacgtacagtggaagtgattattaaatatggtggcggcgtacgtggtggtaaagctatcatgaaacttataggtcttgattgcggcagttgccggttaccgataaaagctttttcaacggaagagtatgaaaaactaaaaggtgatttggatgcgataaaattctttgaattttaatgataagaaagaggagatgacagtaaaagtgtattgctggggtttagctactttacttcctgtctatctccccctaatctagttaaatgcgttcaaatttacctaaaataaagatactatgaaagtaagtaagaaaatatttatcatattttcgatgattttgttattgataccggatatatctttaggtaaagatataaggttggaactggaaagacctgttatccctgttttagtcaagaagcagattaatccgactattaaggcaactttgattcaaacagacaacagtccttataccattcggcaaattgatgttgatttgcagggaagtacggatttgtctgatattgtttctgttgcagtgtacggaactcataaaaacgggctgatagatgaatcccgtctgatatgtagaccggtacctgctgaacggaaaatttcttttacagataatatacaagtgaaagatgattccttgtctttctgggtagcagtgacattgagagatacggtttcactggcacatcgtattagtgtgaattgtagccggataaaaacgagccggggagagctgaaagtttcgaataaggatgttgtccccttgagagtgggaatggcattaagacagaagggacaggatggtatcgtttcatcacgtattcctggactggctaccagtaacaacggaacgttgctggctatatttgatgcccgttatgatttgactcgtgatttgcaggggaacatagatatcgctcttcatcgtagctttgataaaggactgacgtggcaacccattcaaacggtattggatatgggagaatggggaggtttgccgcaaaagtttaatggagtgagtgatgcttgtatccttgtggataaaaatacaaatgacatttatatagccggattgtggatgcatggtgcattggatgacaatggcaagtggatagagggcttgaatgaaaatagtacttactggatacaccagtggaggaagaaaggatcgcaacctggaatcggtttgaaagaaacctgtcaatttctgataactaaaagtacggacgacggactgacatggagttttcctgataatataacaggtaagactaaacgccctgaatggtggttgtttgctccggctcccggacaagggattacattggcagacggtactttggtttttcctacgcagggacgtgatgagaaaggaaccgcattttccaatattacatatagtaaagaccatggaaaaacttggatgaccagtaatccggcatattcgaatgtgacggaatgtaatgcagcacaattaagtgacggtacggtgatgctgaatatgcgtgataatagaaaccggggtaataaagaagtaaatggccggagaatttgtacgacaacagacttgggtgagacatggaaagagcactctacatcacggaaagcattggtggaaccgacgtgtatggcaagtttgcaccgccatgattatactgtgggtggagaaaagagaagcatattattatttgccaatcccagcgattatgagacacgggataagttgactttgaaagttagttttgacgatggaatgacatggcctgagaaatactggattttgtttgaccagtatcgtagtgccggttattccagtatcacgtcaatagatgaaaattcaatagggatattatatgaaagcagtcaggcaaatatggcttttattaaaattgatttgactgaaattctaaacaggtaagccatgaacagtaaaacttcaaatatatatccatgggtgatagtcggattactatggggagttgctttactcaactatatggatagacaaatgctttctactatgcggattccgatgatggcagatgtccgtgaactggagtcggctgcaaattttggcagattgatggcggtctttttgtgggtatatgggttgatgagtcccatttccgggattatcggtgatcgtatgagtcgtaaatggttgattgtaggcagcctgtgtgtatggtctggagtgacatatttgatggggtatgccaccacttttgaccagctttattggcttcgtggaattatgggaataagtgaggcattgtatttgcccgccgctctgtctttgatagctgattttcatcaagataagacacgttcgttggcagtgggaatacatatgacagggctctatgtaggtcaggcgataggtggtttcggagctacttttgcagccatgtattcttggcatagtaccttccactggttcggtattattggggtaggatatggggtcattctggcctttttcttacgggataaggaaagaggaacgatctctgttatgcaggaaaaagtgacgaagataccggttctgaagagcttggctatgttgttttctaatgtctttttctggattatcctgttttacttttgtgtgccgggcactccgggatgggcggcaaaaaactggttgccgactcttttttcagagagcttgtctattgatatttccgtggcaggaccgatgtctactatttccatcgctttgtcgtcactgttcggagtgttagtcggtggatatatatcagaccgttgggtgctcagaaatgtacgaggaagggtatatacgggagctttggggttgggttttatcattccctctttattgtttatcggattcggacattccattttcgcattagtgttgggaacaattttgttcggagtgggattcggaatgttcgacgcaaataatatgccgattctttgccagtttgtttcagcccgttatagggcaacggcatacggtataatgaatatgtgcggagtatttgcgggggcggcaataaccagtattctgggagaatctacggatgccggacatttgggacgtgattttgcgcttctggcagtatttgtattaattatgctggtcattctggtcacatgtttgcgacctaagaccattgatatgaaggattaatatttaaaactatagatcatgaaaaaaatactatgcataattgtcggtatgctttgtcttttacctttgggagcaaaggtaaagctaccggcaattattggaaatgatatggtattgcaacagaataccaatgtcaatctgtggggatgggctacacgttctcgaaaaattacagttagaacatcttgggataataaaaactatacaaccacttccgcatcggatggtacgtggaaaatacaggtacagacaccttctgccggtggtccttataccattactatatccgacggagaaccggtaacacttactaatgttctgataggggaagtatggttatgttcgggacagtcgaatatggaaatgcctgtaaaagggtttaggggacaaccggtggagggctcatgtgatgctattgcaacagctctcccatccgataatattcgtatgattacgcttaaaataaatagtagtcagactgttttagatgattgcgtggcaactccttgggtggaagtctacaccggctaatgtcgcggatttcagtgccactgcctatttttttgcaagttatctgcgtaaagttttgaatgtgccggtaggtgtcatttgttccagttggggtgggtccaagattgagtcatggattaataaagaggtatatacggaaaaattcccggaaatatctttgtcggtactgaccaaagatcctaaagacattgccagaccaaaagatgaacccacgttactatacaatgcgatgattcatccgataaagcaattcaccattaaaggtaccatttggtatcagggagagagtaacttaaataatccgcaggtatataagcgattgtttccggcgatggtaaggtcttggcggaaggaatggaaccaaggtgaatttcctttttattatgtgcagatagcaccctatgattacggacggaaaaatgcagataagacggaagcggctgaaattcgccaagtgcaactggaatgtttgaaggagatccctaatgcgggtatggttgtcacggcggatattggaaatcgcacctgcgtacacccctctgataaggagagtgtagggaagcgacttgctctgtgggcattagccaaaacttatcagcgtagtggaacaccttatagtggtcctctctacaagtcttttacaatagataaggaaaagataattgtggagttcgattacgcagaaatggggatgacatcttatgacagggaaattgtcggatttgagattgcaggaaaagatggtatttattatccggcgaaggctgttctttttgataataaaaccaaagtgatgctgactagcgatcaagttcccgaaccggtaggggttaagtacgggttcagaaattatcagccgttgaatttattttcaaatttcggattaccggcttctccttttgttgcaaaataattttataatatatgaaacaagaaaatagaaaaacctgaaattagagttattaacttgtaatctacaatttatgttaaatgcattttttttaaagagtaagctactccgcatgtcgggtatcttattggttatcctctctttttgtatacctgcattctcggcttcgctcgaggctttgggtatagaacaaaagaaggtaacagtaaacggagttgttttggacgatacacgagaaccgttaataggggtttcggttttagtgaaaggttctcaacaaggaacagtaacagatttggatggaaaatattccatcactgctccggcagacggtattttggtattctcatttgtaggaatggaaaaacaggaaataccggtaaaggggcggaacaatatcctggtgacgatgagaagcagttcggtagctttatcagatgttgttgttatcgggtatggtaaacagtccaaggcagcattgaccagtgccattactaaagtggattcaaaagatatggcaatttcgccgacaggaaatccgatgtcaatgttacagggaaaagtgccgggtatggaaatccgtgtaaattccggccaaccgggggctgaccctcagattatagtacgtggcggaacgactactgcgcccgaaagtgattctcctatggtaatcattgacggcgtgattcgtactatgaaggatattaattatgcggatatagaaaccatacaagtattgaaagatgcagcttcaacagccatttatggttcaaaggcttctcgtggtattgttatgattacaaccaaacaaggaaaagccggtaaaggaagtatctctttcagttatggattgtctgtagaccaccagccgaaaagaatgccgttgtccggtgcccgtgaatatctgaccgcaactcgtacggctgcactgcatgcaaccgatccggataaatatctgtcaggtacgtttgcaatgagtaccgctaataaacgaaatgctttgaatacgaccgcttttctggatgattacattgccaattatggtcaaggatatgtagaagacctgttgtataatcaggggtgggagatgatggaagacccggcaaatcccggtaagatgttgatttttaaggaaacggactttcaggataatctctttcaaacgccagtcaaccatgattttaatataaacttcagtggcggcaacgagaaagcgacttactatatgagtttgggatatctcactcaagatggtattgttgtgggtactcattataatcgttggagttttcttacaaatgcttcttacaagattcgtaagaaccttactgtaaaaggtatggtaaactactctatgagaacgactgcgggcattaatgaaaataatgtaatgtcaagggctgccaaaatgccgcctacagtgcgccagtattatgaagacggaactccggcaccgggtgaattgacaagttcgttccgtactcgtctgcacgaagtttattatcaggagaaagaaaacagagtgagccgaatcaatctttctgccgaactggattgggagattattcccgggctacatctcaaacctatgttctcgtataccaataatgagggtaaagaccataacttcgagaggtataatgaagtggtgaagaatagaccggtgtccgaagcgcataatatggatctacattatcaatatgatcttattttgaattatgcgaagacaataaaggataagcataacttggatttgatggtcggtggcaactatatttatgataactggtatcgtttcagtggttccggttatggcggaacatcagattatatcgaaacgctgaacggtattgcgacggaatctgccaagactacttccacttttgaagagaagaagatgaatagttacttcgggcgtgtcaattacaattatgatatgaaatacttgttttctgcaagtattcgttatgacggttcttctcactttgccgccaatcataagtttgctgcttttccgggtgtatctgccggatggaatatgcatcgtgaggctttctttgaacccttatcgaaagtagtcagcaatttgaaacttagagccagctggggaaaaacgggatatgacaaccttgctctggaaaatacggaaggctcttatgaagccggtaaaaactatgcaggggaagccggtattttgaatacagtgcttatgaaccgcaatttgttatgggaagaaacaacctctaccgatttgggacttgaagccggtttcctgaataaccgtattaatctgtctttcgacgcttattataaaaagacaacgaaccgtttactgaacgagaatttgtggtcggaaacgggatttgcttcaatcaagtccaatttcggctccttgaacacgaaaggggtggaaatagccattaatgcgattcccatacaaacccatgatttccgttggaatatagatgccaatttttcgatttggagaacaactatcggcaagttacccaataatggcgcagataagaatcgtaccggcggcggaatcatttttgacccgaaactgggaaaatatgttgaagtaggtggatttgcggaaggagagcgtttcggttcccgttttgcttatcagttggacggggtttatgcaacagatgaagatgcagccaacgctccttatgatgaaggagtatcttccggttggttgggtaaagggaaatgtgcaggtgatgccatttggcgtgatgtggatggaaacggtatcatcaattccaaagacatggtgtttgtaggatatattcaccctgataagatggggtctttcaacaatactttcacttacaagaattttactttacggattgccacggacttctcattgggaaatgtgattgataaccatttcagggcacaggcgaacgcaaattcacggaataactttgcaacgattcatgatgtagccagtagcaagatgtggcacaaaccgggtgatatagcttctattcctcgttatgatgtagagtctgactgggataacggaaagcgtaatcatggtcgtccgagcagttctaccattggttttagtggtggcagtgccaacaccttgtatataaagaaaggtgattatctggcatttcgtgaagtctccctatcatatcccttgcgtaccaagtggctgcgtgctgctaagattgaaacgctggacttgacggcagctgtttataatttaggatattggactgcttatgatggacttactcctgaagtaattggtgctgatgccggtaaatattcccgtccgcgtcagtttatattctctgtaaaatttacaatgtaacattaaagtaaacgatgatgagagctaaattaataatgtttagtataatgactgcctgtaccttaggtagttgtgaatctatattggagatagatcctatttctgaaataactatggcaaattactggaaatcggaatctgacgtgaaaggctacctgaatggtctttattcggattatagaggaatgaccagtactaccctgtatggagaagatcgtggagatgctatggtatcgggagtgattggcggtgtttcacgttcgcatcagcatgaactgaatgaagaatatggattggactggcgtactttctatgagaacattcatcattgcaatatgataatcaaatatgctccgggaattgactttacactggaaaatgaaaagaaacgtatcttggcacaggcatatacttttagggcaaaagcctatcttactttaactcagatgtggggagacgtacctgttgttttaaatccgacagaatcttatgataaggagtcacgcccgacgcgtagtacggcttcagaagtgatgaaacagattctttcagatgttcagactgccatcgatcttttcccggaaacgaatattttggataagaatcggatttcaagacctgctgcgttatgtctgaaagcggaagcgctggcatggaaatatacggttcagcggagtaatgacaagaatgacttgacagatgcgatttctgcattggaagaagtggaaaagtgcggtgtgagtatgatggataaatatgcggatattttcgatgtggcaaacaagaagaacagcgaaatcattttctctatttatctgaagaaagatgaatataacaatatgtatatgtctacgttgtccatgtctgccgcagccggactgctgactaacgatattgtgaacaaagaagacattccatacactaactccacaatcgcacgtcacgtgtatgctccgtctccccgtctgatatcgcttttcagtgacaaggacaaccgggcttcgtcagcttatatcaatgctataaattcaaaaggggcggtagttttcacttcacagaacaaatttcgggggacagcttataccgatgaccgttattatgataatgatatcgtggtttatcgtttgggcgaagtcaaattgttgaaagcggaattgttgtgttatctgggtggtgacaatgtacaaaaagccattgatgctatgttcgctacccgtaatcgtgccggaatcggagcgtataccgggagtacggttcagaaagtggtccagaaagagatattggacgaacgcggcagggaattgtgtttcgagttgaagcgttggcctgatctgatgcgggcacatcacgcgggtaccattgatatttatagttatattcctaatttggttggtaaatctactccattgtatttcccgattttgaggaagatgattgatttgaatcctaatttggaacaaactgagggttattaaaaaatagaaacaatgaaaaatttaaacttaatatttgcatgggtatgcctgttgtttatatcgacggcatgtaatgatgtggagccgagcatatcttctttaccggttcccacgagcaagccttattccatcaatagggaaggatatgcctattttagaatccccacgatggtaattactaacagcggtacaatattggcatttgccgagggacgtcgcaatggtcctgaagatgaaggggacatcgacatcgtgttaaagcgttccactgataaaggaaaaacttgggggccgttaataacagtcaaggatgatggagaaaatcgttgtcgtaatcaagtacctgtttatcttccggatatcaatcgtatcattttactatcttgctggaatccgggtgcaacaggaactaattcaatttttgtaacttattcggatgacgaaggattgacatgggcgaaagaaaaggacataactgcttccgtaactcctgacaaatatagatggtacgctacagggccttgccatggaatagtgaaacagtttgagccgcataaagggagaattgtagtgccgtgtaatcataataccactacatccggtgcgggacgttctcatgtgatatattcggatgataagggagaaacttggcatttgggtggtattatggacgtggattatacgaatgaaagcactgtgactgaattaagtaacggtgatttaatgttgaacatgcgcaaacagtctgacacggaaaaatataggatggtctccaccagtacggacggcggactgacatggacttcgtgtaagtatactacattgaaagaacctatatgccaaggttccatactcttttacggtttgggggatgatggtaaaggcattattctgttctcgaatcctgacagtcagaccaatcgtaataataacacgttaaagatgagcgaggatgacggagtaacttggaagaagcaatattcctatacaggaagtgattatggaggatactcggacattgcccgttatcctgacggtacaattggagtattatatgaatatggtttcaagaatatcggaggcattgcttttcagaatgttgagttgtcacagctacaataaaacatgcgtagaattaaaaaatagattgatatgaaaaagataatatatttcttgttcgtgtgtgtcggggccttttatgcctgcaaagacgaggaacaagtactgttgaatgcagattttatttcagacaagcaaaccatatccgcaggggagaaggtatattttatggataagtctgctggagaacctgtacgttgggattgggcttttgaaggtggagaacctagtgtgtctaatctgttcagcccggaaatcgtgtataattatccgggaacttataccgtaaaattaagagtagggcgggggacggaaaatgcggagactgagatgttgaaatatatcacagttgtatatccggatgaaatcaccgtagcttttaaagccaataaaactcaggcattgagtgatgaatctattagtttcacagatatgtccgtaggattcccgtctacttggttgtgggaatttattcctgcagaaggccgtaccgtcacctcaacggaacagaatccgagtttagtatttgagccgggagtttactctgttaaattaacagttactaatcctaagacaacggctacgcttacgcaagagaattatttgaatattattgataagaattcagttgctgcagatattacggcagaccggcgtatggttatagaagggggagtcatatcattcaaggatactagcttgggacgtcctacccgttggaactggacgtttgaaggaggaacaccttctacttccaatgagcagaacccgactgttacttattcaactgccggtaagtataaagttactttagtcgcttctaatgatatgaatacttccacagctgaacaggaaggatatatcacagtattgccgggtaaagatattgttcttttctatccgttcgagggtgacagtaaagatatgggtcccaatgctattcatccggaaattcttaaattgggagataatatggatgtcaactttaatgcacctgcccgtaaggaaggatttacttgtgctgagttcagaagtaaggataatcaaaattatgcattcttgtcgttgccggataatgatgcattagatttccaggcaactccggtgactacttctttctgggtgaaaacttcgaataaaacagctgctaatctgggggtattccagcatggagccggtcctaatgcaagtacagacggaaagaataagcagacttggtttagattccaaaaatccagtccgtttataagatatgtcattgagtactctgggctttccggaaactggactgattataagacaaaagccatgacagacggagagtggcatcattatgtatgtgttcataccaatggaagcacctatttatatattgacggagtaaaagcagcggaagcactcaataaaggtttgaaaccaattgatcggaagccttatttcatcggtgccatgtacagaggggcagaaggctcccgttcttatgagaactttatggatggttatatagatgattatctggtgtataatcgtgcattcacggcagcagaagcgaaagcgctttatgatagcatgaaataagtgatatcatattcactgatataagtctaaaggcaacttgctcatcggtatcgggagttagttgccttttcttgtactgtatttgtcattaacctgaattttttctttgtatatttgcaaacagatacattttagtattattatgaaaaatatttttattcaaattcttcgtgtcctgatgctttttctgcttcttatttcaggagttattggctatataatttacgaagatacattgtcggagtggtggatacctgtcggagtggcattgatgatagctgttgctacatttcctttctacatgaggtgggcatggctgacagccggagataataaaatagttaattttttgtgtcatttggtatgtgtgggagttatgagttatgcactgtttcttgtaggtaactattggttggcagaccctgcttccatgcaggaagaagaagttgtagtgcagaggaagtatcaggagacgcataagaaaacccgccgggtaggtaagaggcgttatgtaccggacggtgtacgtaaggagtactatttggaagtagcttttacaaatggtactatgaaaacattgcatgtaccactctctacttataacaagacacgacagggtgcaacaaagacattgactttgcagaaaggattcttcgggtttccggtgataacaaaaaatgacattcatatagatagagagtcggacaacattatgcacatatcatcaggtgttttaaaataataaggtactaatatacatatctacatcgtaaattattccgttctcggaaggggttctttttaattatacgtatctgtaaatttgtctgcgggcaccgtattgacacttcctatctatgtatataatatcagtattaactaataacatatattgatatgacaactaatgatgtatttttagatgtctgtaaagggctagtgatgtaaattgtaacatttttattcttaatgtgctaggcgattttagagcatatatagctccggaagtcagattaaaaactagggagtgccgttacaatgaagttcaggatgcgcaagacattacaaaacaaatcttgaacctcgggcacaatttcgctctagaaatgaataaatattccgagaaaagacatagtacattcacaaggaaaatttcaagtttggtacggattatatatggtttacaaaagttaatttaaaccgctaatttgttgtttgcatataggaaagtagttatatttgtatagttctttgaggacaagacattgttggaaaataaaagaagtgccttgatatttggaatcgtcaattcaataaaaggacaaacgaggtacagaaggtaactcatatcaggtaggttattcatctgtgtgtttgtacaagcgtttgacgatgctttcgagtttatacaggtgatagtccactttctttattatataatgttttcatagactgtcgggaagtcaaaaaattgcgccattgtgaaaaaagtatttcattttatctgtattaattatgctggctagagcatttataaatgtctaatattaaaaaatgataacgcctaaaaaggaatcttagtttccggaaatgtatgtttttgatgcggttaatctggttcaaaacaagtaatagtacttttctcctaatttttttctgatgctttttagggcagcagtgatatgtgcttctactgttttgattgagatattcatttcatctgctatttcttgattacttttatgctcctccctgctttttttaaaaatcgtctggcatttggtgggaagttgacaaactgcttcttttattaaattttgtaattctttaaattccaattcttcttcgctgttataatgttcgtctgaattttctttcaatatatctattgatactttttgttttttgtcacgtagataatttagtgccctattctttgccgattgaaatagataagattttaaagataaagagaaatcaatattttctctatgttcccagacatatataaacaattcagctgttatttcttcagcttcagttttgttttcgatataaagcgatatgaaacggcataatggtgtaaaataacttctgtataaatgttcaaatactacttggttacctgattggattagtctaatccatagaatatcatctatcataaattatactttttgcaaatatataccaaaaaagtaattcgcaaataaaaaaagaaaaaaaaatcaaaaagtggggattgtatattaaggattgatggactttatgtgtgaaatagaactataaacagtttatctctaaaaacatatttctcttgattgtttttgggagtattagaaaggaaatgatttattttttataatttgaaaaaaataggtttttgatatagggttgctcttgggttgtgtgtgttattaataaagagacgaaaatttaatgaaaaaataggtgtagtatggataaaataccttggacattaattattgcaaagttaagtaatactctgacagaagctgataaccgtttgttagaagaatggttacagaatgatttgcataaagaaatctatttatctgtggcacatgtctggcattctgttcagtctaaagttcgggattatgaacctgatgaagactattattggacttttatatctaatcggattaataaagtagaaaagaaaaagaaagtgcgtcatttcttaatgaatcgtatggtgcgggtaggcattgctgtaagtttgcttttaataataggattttccttgcttgtatatctagtaccgatgaaaaacaatgatattcaattgcctgtatattcttctttggaaggtaaagctaaaattgttctcactgatagtacagtggtgtggttgagaaagaatagcacattggcttgtttgtctgatttctctgggaaagaacgtagggtaaaattgaatggtgcagctttttttgaggttaaatcagataaaaatcatccttttattgtggaggtacgagatttgaatgtgaaagtgcacggtacaaaatttgtggtatctgcttcccggtttcaagaagatgttgtggttggattggaggaaggttcggtggaactgatatcacctacagtaaagagtcagttcataattcccggtgaagttgctgaatataataaaaaaaacggtcagctgagcgtgaaaaaagaagatatagctatttataattcgtggatggcaaatgatatatcttttaatagtagtacattagaatatatctgtaaaatactttcttttaggtttggtaaaaatattaaggtagatccttctattggtactcgttatcgttatatgtttcatttgcatgatgagactttagatgaattacttgatatgctaacttctatcaatccaatacagtatgaatatatggattcgaatactatatttatttctaatcaatgatttaatcttttaattttttatttatggatactagctgatagccattgttatgctcttttttctagaggattatgttcgaataaatgaatgtttatgtgctttgtttaatatttagtaacttttgaaaaacatgaatttgaaacaatttttttgtgcctttttctgtaccttttgtctttttattggtacggtagcagctcagtcaggaggtggaattactctttctttaaaagacgtttctttacaggaagctatgcaaagagtacaaaaagtaagtgattatacttttttttatgatgtcaatcagattgatatcagtcaaaaagtgagtttctcagttaaaaaagctaatattcagactgctgtaagtaagatgctggataaaactgctatttcatttgaaataaaagggaaacaaatcattctgaaaagaggaatcggaaaaactcccaaaggtacggggctttcacgcaaaataacaggtatagttgttgatgatttgggagcccctgttatcggggctactgtcattgtgcagggaaccgttaatggagttttaacggacattgatgggaaatatgctattgaagcaaagaaaaatcaggtgttggaataccgttttgttggttacaaaggagtggaaaaaactgtcggagatgatgatcgtattaatgtgacattggccgaaagcaatgttaatttggatgacgtggtcgttattggttatggttcacagaagaaagaaagcgttgttgcttctattaattctataaaaccggccgatattgctgttcctactcgtagtttatccaattcgattgccggacgggtcgcaggtgtggttgctattcaacgctcgggagaacctggtaatgatgatgcgtctttttggattcgcggtcaaagctcctatatgggcggaacaaatcctcttattttagttgacggcgtgccccgtgatatgaatgatattgatgtggatgagatagagacatttaccgtgttgaaagatgctgctgctacggcagtatacggtgcggaaggtgctaatggggtagtgcttatcacttctaaacgtggtatagcacaaaaaacccgagtggatattaacgctcagttttccattataactcccactagattacctgaattgatggactcatataactttttgaatatgtttacagaggcggaatggaacgatgccggaaatccgggaaggtttttggattttgtaggaacgtatgatcgggatatattggagaaatatcgtaccggggcggatttggacttataccctaactccgattggatggaattgttgtcagaacataccacgaatcaacgttatacaataaatttcagaggaggttcggaaaaaaccaaattctttgcttcaggagcttactataaagaagatgggatttttgattctaatacttccgaagggtataatgccaatacagggttacaacgttttaatttgcgttccaatgtagatatggatatcacaagcacaactaaattgtccattgatttaagtggacaatataaaacccgaagccagtctgctagcagttctgatgccgtttttggcgctataaccgtttgtccggtgtttatcattcctttctattattcagatggctctttgtctcagttgacaagggaagcggaccagagaaccaatccttataatttattgaatcaaagcgggtatacgaaaacttggtccgcttctgttcagtctaaagtacagttggaacaaaagttggattttataaccaaaggattatcagtaaggggggctgtcagttttgatgctgattttacttcgtccatgaagcgtacgaagaaaccggctacttttttctcaaataaacgtgatgactttggcaatttgattatgcaatcagtaagtgtagaagaagctttatctgatcctgtgaaatcttctacttctggtgaaaagagaatttacattgaaggagcgctgaattacaaacgtctgtttggagaaaaacatgacgtaaatggtattttagtttatagccagaaagagacgcaatatcaaaatgtggatggcttgaagcttttgccttatcgtaaacagaatcttgtgggacgtatctcttacggttatgacagtcgttatatgctggaaggaagttttggtatgacggggagtgaaaattttgcagaagggcatcggtggggaatatttcctgcagtaggtgctgcttggtatatcagtaatgagagttttattcgtaaccacagcgcagccaagtggctttcaaagttgaaactgcgtacttcttatggtatgactggtaatgataatataggtcctagttcacgattcccttatcgtgaacaattgaaaacgaatgattccggttatgcatttaatattcctgtaggaagttcgggtgggaatcctagtggaggcaatggtattgtagaaagtacgtttgccgctccggttttgagttgggaaatagaaaaaaaatttaatgtaggtgtagacttgggattttttgataatcgaattgatattacagccgattatttcttcaacagacgtgaagatattctgattcagcgaaagattgtaccgaaaacattgggattccgggttaatccatggcagaattttggtattgtggataataagggcttggacggaagtcttaccttgaatcaccagtttggtgacttgaaagtttcagctcgtggaaatattacatatgtgcgtaatgaaatcgtagagtacgatgaagtcccttctaaatataattatcagaattataccggacaatctataggacaaccttattgttatatagcggaagggctctatacgccggatgattttactacaaccactacttctaccgaaggatatctgtatgagctgaaggctgatgtgcctaaacctgccgctaacgtggctcccggggatatcaaatataaagatttgaatggagatggattgattaatgagtatgatatgacttacgaaaatggactgaattcgaccaatccggaattggtctatggctttggattgaatctggaatataaaggcttttttgcgggcattttctttcagggggtaggcaagactactgtcaatctgatgagcaattctaactactttatgccttttatcagaggtgtagaaggtgggtcggctcgtatggaggctttaagccattggagtgcagacaatccatataatcaggatgtgttatatcctcgtatacatgcggccaagtttgatcataacatagaaaaaagtacttggtggtatcgtgacggtagttttttacgtctgaaaaatgtggagtttggatatgaattcagtaaagatatgattaaaaaaatgcgtatgactaatttacgcctgtatgttcaaggaactaatttggctgtatgggataatataaaattgtgggatcctgagttgggcaacagtaattcaggggcaaaataccctcttggagctacttggactgttggattggaagtatcattttaaaaacttaaagatatgaaaatattattcaaaaaaatactatatacattggtgttaagcgtaggattgataagtgtgtcctcttgtgccgattatctggatgtatcagatgagatagccgacaatttgtcacttgaagatgtgtttgaaaataaagggtatgtacagaaatggcatgctaatatttttaatagtatttgtgcatatgaatttatgggcggcgctggagaagagaatggtttttcaggagtttggaatttgctgtcgggtgaagttactgctaatggtggttctgcctatacaacaatgataaatggctttacggcagatacggctccattccatcgttggagtagtatttatgcatatatacgtcagtctatgattctgttagaacatataaaacctgttggagatccaaactctctttcggacacttatttaagctcggtacaagtggagcgtatgaaaatggaagcaaagttttttattgcttataattatttatcattgtttgaattatatggccctgtacctattataaaagagatagctgatccgaatgatcctaattttacagattatccgcgtgcttcagtggatgagatggtggcatatattgatggtttgtttggggaggtcatcaattcggatgctataccggaaacgacgtttgcttccggtggggcttccgaaaacagggatcattctgaccataataatgccaaatatgctttgagtgaagctgtacgtcctactaaagcggctgctttggcgttgcgtgctcgtctgtgggtatatgctgcttctccactgtttaatggcggatatacagaggctgtccagactgtaaactacgatggaactcctatttttccggcttctaatcctgaaaaatggaaaacagccaaacaacatttggaaacgtttctgaattttgcagaggatatgggatatggtttgtttgaagttgaggaggaagggattgtcaatgcagacaaatcggtttatgaactttttcaatattacaatgatgaaattatttgggctacaaatcagaatggttattatgctgtaagttctgcaatggaaaaaagaagcaatcctcgaggcgtatataacggttgggcgaacttaggagtttttcaagagacggttgatgcttttttcatgagtaatggattagaaataaacgattctggcagtggatattcagaggaaggctttgcggatttgcctaatcggattaatgaagacaaacgtgttgataaaaatgtttataatatgtatcacggtcgggaacctcgtttttatgctgctattacttatgaaggacgaagctggcatgtacagccccccggtaatgccaattatgtgacaagttttgcaaaaggaggagatacggatttgtcaagacttgagaatccgaaaacgggatatatgctttataagttcaaaaaccgacaagtgtatggtacaactcgtccggcttccggtggaaaattggaattgttcaaacaatgggctcgtccaaatatcctgcttcgtttagcagatttttatttgtactatgcggaagcttgtaacgaagtggatcctggtgatcctaatgttatcgaatatctggatcgggtacgtcgtcgtgctggtataccaggttataaagagttgaaagaacaaggtaaaaaagatatcataggtaatcaggagaaacaacgttgggcaattcaacgcgagcgtcaggttgaattcctttgtgaaggacagcgctattttgatgtacgtcgctggatgactgccaatgatgccaacaatccttatgaccaacagataacgcgcagtggtatggatatgacgcagcctaatcaaggagtaggtgtaggttctttctttaatcgggttgttttggaaagacgcgcatggacgcgtgccatgttgctttatccgataccttatactgaaatacagcgttctcctggaaagatattgatacagaatcctttatggtaaagtaatgtagcttgttaatgtaagatatattgagataagatattccttatattttacgttaatagttctatcatttttataaataatatctaattagacaactatgataaaacaacagatatatatatttttctatttcttgctaacttttgtcacaatagcttgtcaggagtcaaataatgtttcagatacaggctggattaatggtttgaaagcttatttggagtttccaatggagggaggaagtgaatattgttcattttccttacaaaacggattggacgcttctttattggaatgctatgttccggcaaaagatgcaggttggtgtgaggcatctgtggaaggaggtaagttgataattcgtgcatttcgttcatatacggatagtgaacgtcatactagtgtaactgttgaatatgaacgaagatattcttttgtaattcaagtgaagcaaatggcaggatttagtgagaatgatattcctattaaagttgtgtctgctaccgccgatacagagaataataataacgaaatggataagagctatgatgatgatcttaatacttatttttgttcaaaaggaggaacagatgttaccaaaacttttcgaatgacttatacattggaaagtgggcatacgctttatcgaataatatatactcctcgcacaaaaggcaataaatggggctcgtttaataaatttgaagtagaagtagctacaggagatgcgccgacacaatttgtaaaagtagcttcttttgaaaggggggatggagtgcatacaccactagactttacactggacactcctgttcctgatgccaaatatgttcgttttgtagtccactctgcttatatgaaacgtgtcagttgtgcagaaatggatttttttgaacccagtaagaatcgatttgattatcgtagtatatttgcggatgacctttatacacaattaaaggaaggtgttacggataatctaataaaaaatatgcctgataatgagatgcgtaaattggctttggctttgtctgaaggtaattatgaaagtaaatatcgtgtagcagaatatcgtccttatcagcatccttctgttatggcagctgtcaatcggacttcccgatatagcttaagtgataatcctacgggaatttatgctgtagctggagaaaaattgtatattgctttggataaattgtatcgtggagctgatatatccttgatggtcagggacctgaatggtggatatggcaattccaagacttaccagttgaaaaaagggctgaatattattgaaccgacaattggcggcttgatctatatattgaatcatgtagaggataatattcctttactgctagaaaatgattcagataagcaaagggctatggacaagactgtaaaggtacatattataatgggtaaagtaaacggttattatgactgtcataaaaacgtcccggaagaatggcctgaaatattagaaaatgctcaatatcaagatatggatgtattagggcaatatgcgcatgtaacgtggcgtgtgtcagattttcagacatatacttcagatgttactatgttgctgaataattatgataaattggtgtggttagaagaagaattcataggattggtgaaatatggtaagttatttaataatcgtatgcatttttccattgattatgatgctacaagtcccaatgcctccaattatcgtacagtttatcctcctcgtaatgcagctaaaatatgtgatccgcttcgttttgatgttaatttgtggggaccatctcatgaagttggacatatgaatcagacacgtccaggtttaaaatggattggtactacggaaattaccaataatatattatctctttatgtacagacctcttttgggcagcctggtcgattattggatgaaaaagatggtaaaacggtgtatgattacggactggaaaaagttgtggcgaagaaaataccgcataatagttctcaggcggatgtttttgaacgtttagttcctttctggcaattgaagttatatatgatagatgttttaaaaaaagaaaatttttatcatgatttgtatgagtactttcggacttatgattatgaagctttaaatgctgataaatatactcaaggggtctatcagttggattttgtacgccaggtttgtaggatatcaggattgaatatgcttgatttttttgagaagtggggatttctgactccgattgatgcggatataaatgattatagtaaagcccgatttacaattacagaaggacagataactgctttgaaagatgaggttaataaacaaaattataaaatgccgcatccggaagtacatcttataaatgaaaataatatgtataactataatgattaaacaaattgcaatatgaaaaatttgagatatttatttttagtatgccttacatggatgatattaggaagctgtggggaagaatatgtgtataatacacgagttgttactggagttgatttattggatgtgggagaagaaggtaatttattgttttcgcgaggagaaaatggggaaattaaagttagaataactccggtagatgcgattgataaaaaggattatactttttcgtataagagtagcgacgagagcatatttacggtcgatgatacgggaggaatacgcgcacttgctgtgggagaagccactttgacagtacaggcaattaataatccggccgtgtctcagtgttgtaaagtagtggtacaacccaattggatacgcactattgaattaccacaagaatataaagattgtagtctgttagtggattcaaaaatagatttagggagtgttatcactataaagccggagcaggttgataatccggatgtgatttatacttcttcaaatccgaatattgccacagtcagtgaagatggaatagtaactggtgtgtctagtgggagtgtagagattgtgattcaagctgcggatcagggaggagcagtggtgagtgcttttataactgtaatagatgaattgctgggagattttccacgtcatacgtggaaggctacagtttcacatacatttgtgccggatcctgcaggaggcggttccccggaaatgttactggatggtagttacaatacttttttatcaattaggaaacccggtaaaggggttgagacaccggctggagccaaaattttctttacgatagatatggggcagcagtatcctttcaattattttagttggcatcatagaggagataatgttagtgtaggtttgagaggttcaaaagtagacatatatggtagcctggatggggaaacttttgatttgatacaaaatgaaatactgttagataccggagcagatgccagtacaggggagaagataatattggatgatacatcttcttgtcggtatgttcgttttgtaattacaggttatagtacaagtgcaggttcagccgttcagatttcagaaattcagattggtagagataaataatatggatatttggtaaagaaatgtatgagtgttaaatgatgtagttttttaggaaacattgtaaagtataaaaatgaaatattcataaatatgaaaataataattgggctataacatcatttgtcaaaatcatctgtcaattctccaagtttcatgccactgtgagtagtggggatatcggttgcaatgttgaggtggaatctggggatttgtctctccatcctttcttggatgatacctgttgcattaaagatgtgtgtggatatcttcacacattcgatttacctacttttattttccagccagcctgtgggaatagcagtcttttatgggaactggaggacaaaaggctagggatttgactggtaataatcgtggacatttcggttgctttggtttgaaaatcaaatatctgaacggcggtatacacaagatggatgtatttctaaaatcaaaggtaaaaagatgtagttacgatactgtaataagtatttgtctaatcgctttttgctttgaaaatgatagtaattttaattttgaatcagtgtagctttcaattattgattcgtatttttttattaacaattaaataaatttatgaaacaatttttttttgataagaatgttcgtatggcctttgcaggtttgtcctgtatggctttactcggtttaccccaatcggcggtagctcaagatatgacagtttatccttatgcggaagattatcaagtgattacccgtgatggagcgtggtgttggttttccgatcctcgtgctatttatgtggatgataagatgtttggcggttttgtagataaggaaggcagtatttgggctttctgctatgatccttccacctgccaaagtaagcagtataaattgtttaataagttggattatgacgaccatgctaatccttcaatcatggctctttcagaccagcgtttagttctattcttttcagcacatggaggaactaaaaattctcctatttattatgctgtcagtaaatatccgtccgatatttcatcttgggaggaagtacaagagattaatcctgaaatggagggaagtttaggtgtttgctatactaatcccgtaatgttgtctgatgaaaataatcgggtatatttatttttcagaggtagagattttaaaccgacttgtatttatactgatgatttgaaaacatggagtcaaccgattaatttagtacgtaatgatccgggatatggtcaaggaggccgtccttatactaaaattacaactaatcataaagataaaatattttttgcttttaccgatgcacatcctcgggatcgtgcaacaaattccatttattttatgatgtataaaaatggaaaaatttgtaaagcggatggtactgttgtttcagaaactcttggttccataataccaagtcaagtagacaaagtttatgatgcaactaggactttcgataaagcgtggatatgggatattgcttttgatgaatcagaaaagccgatattagtttatgcacgtttcagcgatcgtgataataagcattcttattggtatgcacgttggaatggaataaaatgggaaaaccataaaataactgatgcaggtcagtggtttcagcgtacggaatatgtaaaggaaaaaccggaatatgaatgtaactattctggtggcgtttatttagatcatgaaaatcctaatatcctttacacttcacgtcccatcaatgaccgttttgaaatagaaaaatggacttttacaggtggtaaacaaaaatggataacagaagctataacttaccagtcagaaaaagataatgtacgcccttttgtggtacgtaatcatcggggtagtcagccatctgtactctggatgtataattataaatatcctggttttaaagcctatgattgtgctatccgtactgatcaagaagctaaaggatttagctccaagtggaacaagaaagatattactattgtagctgatacggtcttccgttgggtgatgaaaacatatcaaaaggataaaaattattgtaatcaaggatgggtaagcggtgtactttataacggtttatttgattgggctgaaattacagataaaaaagaatatttcgatttcatgaaacgtattttttcacgttattactggcagttaggcaaccgtatgtatcatggtgatgatctttgtgtaggtcaagtctatcttgatatgtatgctaaatacaaacaagaaaagatgtggataccaaccaaagctagaatagattggattatagagaatcctccaattggaaatatagatataactaaaggggtaagtgatcgttggtggtggtgtgatgccctctatatggctccggctatttttacacgtctgtatacactgactggtgataaaaaatatttaaaatttgctcataaagaatatttggattgttatgaacatttatatgataaagatgaacatttattctttcgtgatggcaaatatcttaacgcaaaggatgaaaaaggaggcaaagtattttggagccggggaaatggttgggtgcttggtggattggccgaagtattgaaatatttgcctgaagaagacaaaaaatatcgtcctttttatgaacagctgttgcaggaaatgagtgagaagatagcttctttacaaagagaagacggttattggagaactaacttattaaatgctgatatttatcctatgccggagactagtggaacgggactatttacttacgctatcatgtatggtattaatcagggtattttacctgcagataaatatttaccgatagtaaggaaaggctgggatgcaatggtaaaagctgttaatacggaaggaaaagtgggctggacacagatggtggcacaaaaacccggaaaagtggtaaaaaaagatacaagggcttattcggtaggcagtttgttaatgattgcttcagaattatatagatatttggacaataacaagtaaacctaccataagcgtattttaatttggtactaatatacatacttacacaggaaatccttccgtccgcggagggatttcttttcaattgtacgtatctgtaaatttgtccgcggatttctttgatatttcataaaatctttgtaatttgttatgtcataaaataattggaggacagccttatgaaagacccgcttggtatcaaaataaattcgatcccagttctttacaagctgtttccaaatgaagaagcctgcattaactatcttgtaacttttaattagaacggtactcccatttcactgtttgataaaacttcaaaagtctataaattaaaaaacggaaattatcgctgtaaaaacacagaaaagaattttactgtaaaaataggaaccatatttgagaaaataaagattgacctataaaggtagttcgttgttatatgcttgttaaccataaagcggggctttctttctatcggttggcaaaagatatagatgttactcaaaaacagcgtggtttatgttacacaaaataagaagtcaaatgtatcttgctaacgaaaatcttctaatgggtgaggtggaaactggtgaaacacttatcgggggtagaaacaaaaatagtcattggaacaagaaaatggcatattcacaaggacattcccataaagacaaaactccggtagttggaatgatacaatgggattccttaatagttttacaggctcataatcattgttatccttataacacgcaataaacaaacagatacatgacactaccatacaaaattaattcttcgtctttgaatttgttggcagattcttccatattatgagatgttttgttggagatgtgcttttatgctgatatttattctagtatctctcgtcttcaattctccgacctgatactttataagaaatgcaaggatattattcaagctttagaaacatttcttttagattgattgtcacgcagtcaaactgattcaccatatccataccgataatccctgcatcatctgatgtctggaaatcaccgtttgtagtatccactgcaagatttttcaattcgaccggaactttaccgacctttatgcggaaggacggtaagcgcaatatttcttttgttaccactatgttgaagccgccacccgtaatgtgttcccgtttgccggaagcgtcgagttcggacttatggccttcataatatcggtaatacaagccggcagtagaacatcctgtgtcaaagtgcaacttgagcctttccccattgtttgcctctgcttttattttcagtgcgcggtcggtcaatatcatgttacgtcccgaagcggggagcggtgtagatgatacaggaaagacaatttttttttctttcggatagatacgcagttcatcgaacaaattgataaaatccatgccgagaattgcgtcaaccctcatgacactgtccagcgcgttaggcggagcaacagtaatgagtggataatggaaaatcatgctaccaatctgcatattctccactgttcccatttgtccgttcatagctccgggaagcgttgaattgattgtcagcgaatcattcaatatacgtacacctacctctttggcaaaacgttcggacatgaaactggttccggcaccggtatcaaaaatgaagcggtatgtttttccgttgattataacaggtattaaaattgttgtaccccgccaacccttcggttcaacacttgtcggtagttttactttttctatttcaatagggacggatacatcgcaatccggtcgtgtgatacttggtgccgggatgctactcaatttgctatagaaagaaaagacctgctcaagtccttcataagcctctttctctgcattttgtgctttaagctggtcaatgatgctttgtgcattctgcgctgctgaagcataattgccccttaaaccgtctatttgacaggccagtatagtcatgccaagtacatttgaacctccaatttcattctggtgattggtaagtagtttccggatgccgcttattgctttatccggacggttgaagttataatcaatcatgatttccgacatcagtttaagaaaatcaacctgcatggaatcttttaagatcggatagttttcttccagaccgaaccagtccgactgattgataagtattccgatacgttcgtcggcactttgtgaaaaaacagggatagaaaaaaggaccgctgctaataaaaataatttcttcatttgttttgggtattttatagttctgtatttatgtgtatttttctgactatattttatttgttatatccataagctgttttgtttctttgggtatggtggtaaatatagtgaattaatcagaaacgtagaataaggttcgtttttattttaggaaagtttgttcaaaaacataaaattcgccctctgccaatcttcaaaagactgacagagggcggctaccatgacgagaaaaaagtcgaagtttattgcttggcttcgttattttgtttcaacagaaattcatcaattgctttcttcagttggtctttgggcaaagctccctgtgagattctaggctgttcgttcatcggaatcatcagcaaggtagggatgctgcgaatgccgaaagcggcggccaaatcctgttcttggtccacatcaatttgatagatatctattttaccactatattctttgctaagttcttcaagaatagggtgcagcgctttacagggtccgcaccaggttgcatagaaatcaacaattgccggacgtttgccttcaaatttccaatcgttcggattggcttcataattatatactttcttcaaaaagtccgctttatttaatgctattacttccattttattttctttttttgttggttcattactctttttattttctccgctgtttcctgcgcaagcagtggtagcaagtacgatagcgaaggcactcataatacttttgattagtttcataattcttttctttttattttttctctgatgcaaagatagagggattacagttcccctgaaatggcgatttggccggaacacttggcgaaatttcctttagacagttagttaatgctaaaatatgtcttttattctttggtagggaagagatagacttgtttgtggatatggtgtacgagtggagattgtctatttggaatagccgtatcacatctttgttgacggaagcgcatgaagtggtgtatcatgtgtcatagtcaaggagtattatacttcggcttctcaggctaaccaccaatcaatttgcaggatattaggagaaaaacggagttatttattttttgagtattcgttttaaatagtcggtattcgttaagttcactgtctcgaaaacacctttataaaagacggcaaagttattgaatacgcaaggcaactcctttgctttttgtagcgtatccacttggacgaaagatacaggaacgtcatttgtttcacaaaactgttttattatgtcaatgtattgataaatataagggcattgcatatcatgataaattgtcagttctttgttttcaatctctagtttcttggcgtttggtgcaaacttgggtgttgttccgtcaaaagagagagctaacaactcatatccattatcggtagtatcgacaacctcaaagccgaactttttggcaaatgtctggtcggaaagccagctcttttgtttttttgccccgagcatacaaacaccggatttgcctttctctttcgcatcagccagacaatactccatgagcgattgtccatatccttttcctttggagctacccagcacccatagacaatacagataataatagttgttgccgatgataggaacccaagctgtttcaagaggggcatattcgataaaaaccgtggactttgcatttaattttctaaagatatgaccttcgctcagccgctcggaaagccattggcgtttggcatcaatacccggatgagacttcttactgcggataatgcaacataaatgttcatcggtaaggttttcattcgtcaggtttataaaatcagtattcatgtgtacgtttgttttaggtttggacattatcaatcagtaagatgtattgagcctatctattatcattgtacaaatgtagcgaatttatgtaatattgattacctataaatgactttcatttatgattgaagtaaaatagagcaaagccgtacagatttaaacaaaataatctacataacgaaaaagtatgcatcatgctatcattcattttaataacctcttaattattagaaaaataagtatgatagatagttttttagaatgtatctatcatacttttacagctaaaatagagtatctatcatcaataagatagttgaataaaggatgggcggacgtaatatagcttgtttttgttgctatgaatccgtataaatccgactatcatgggttgataatccaactttagcagctctaagtttgcatcccacgtatgcgggctgtgcatcccacatgtataaaccgtatatcccacgtatgcaggctgtatagcccacatgtgtgggctataaaaatacgactatttctaatagattgttaagctgtcagatataggttatcttactatagatcgtgcattcttatgcctttaaagaaagaattttatttaatgctatactggaattaggtataagctgggtatgatagatatacgttttttacaataaaagtatgatagataaattaaaaaaaaa

SEQ ID NO: 2979 - DNA, 83968 bp, Unknown
  gut microbiota DNA sequence
aattttattctcgtgtaggttgttttcttttgccaactgtctaattggacaaccggcttttaccctgctcactatattgagctttttttcaaaagtgtatttcataaagaatgcaccccaaaagttttgtgtctaacttttggggtgcacttcaaaatgaggcagcctcttttattttgtattatccactatgagaccggacaccgcgttctagtccgcttgtcccagagagtctccgtattccatttctccctgaaccacaaagaggacttcttcgggatcgtattctcccatttcatcctttttggcttcttttacgatgtaagccaccacttcttccaagtcgatgtcaacgtagccgtcttcatcgggttgagcgtcgagaattccactttcagagtaatactcgtcgattaagtcaaggaaataatacaactcatcgtccgagaacttctctttcagttcttgaggcagatagtttttgataaactcgatggtcttttcatcatcggcatctgctaataaaaaatcgtcttccagtcccatatattttaagtcttaagtatgatcgactataaaagcttctttactttttctacgaatacaggtttgccgactgcaccgacctgcttgtccacaatctcaccattcttgaaaaacaggacggtagggatattgcggatgccgtattcggcagccatatcgccattttcatccacatcacacttaccgatgattacttgtccttcaaactctgctgccaattcttcaataataggagccaccattttgcaagggccacaccaaggagcccaaaaatcaacaacaaccggcttgccttctgcaagaacttccttatagttgctgtctgtaatttctaaagccatttcttataagtattaagtttattattaatatatatcttctcgtttttattgcgctacaaatataatcaatttatgcggaatccaagttccggacgctcttttaaatatgttattaaatctcttcccaccgaaagtttgatggggcgggaaatcagatcgaccgacatgtggttggtatcgctgtcatccgtcaccttaaaataaagttccgtattgcccggagactctttcgtgagggttgccagttcagtaaccagagctgtattcaataccgacaaaggaataataatcgtgattttctgtaccagttcttctttcacatccggaagaagttccatagaggtaatcttgatttccagttcatcctgccgccactgtttggcttggcaacgggccttgatatacaggaaagttccttcattgaggtacccttgataagtcacccagtcatttccccaaaacgggatttcggtagagccggaatagtcctcaatcttggcaatgccatacggattaccattcttgctgactccacgacgaacactggtcacaattcctcccatggttatttcgcgtcctgccagggctgctttatcttccagttcgctcatacgagtattgcaaacgtgttccagcacaatggaaaattcatccaacggatgagcggaaagatagataccaaccaagtcacgttcacggttcaagcggtcgagatcgctccaacgttccactccctgcggaatttcgggggtagcgacgtcaattacgttttcgcctccgaacagagaattgacggcagcagctttgtctgcctgataacggttgccataacgcatcaatgtttccaagaataattcacctttcgagttagcggcaaaatactgttcacgtttcagctctgagaaactgtcgaatccgccggccaatgccaggcattccatatttttcttgttacaggcattcaggttgacgcgttgcacaaagtcgaagattccaaggaaaggaccgttcttcttacgctcctccatgatgctttgtacagcagcctcacctactcctttcacggcaccgagtccgaaacggatattaccatcatgatttaccgtaaacttcaggttactctcatttacatccggtcccaatgtctggatacccattgccttacattcgtccatcaacttcgtgatgtccgtgatgttcgacaagcttcggctcattacagccgccatatattcagatgggtagtttgctttcagataagctgtctggtaagcgacccatgagtaacaggtagcgtgtgacttattgaaagcgtaagacgcaaacttttcccagtccgtccaaatcttttcaagtactttcgggtcgtgtccgttcttacgtcctccttcaataaatttaggtttcatgtgatccagcttgtcacgcaacttcttacccattgctttacgaagggcgtcggactcaccacgggtaaagtctgccagcagacgtgacaaaagcatcacctgttcctgatataccgtgattccgtaggtatctttcaagtatttctccataaccggaatatcatactcgataggcttgcgtccatgcttgcggtcgataaaatcaggaatataatccataggtcccggacggtacagagcattcatggctatcaaatcctcaaaagtagaaggctgtaattcgcgcagatacttctgcataccggcagattcaaactggaatgtaccaattgtgcgtccgtcactatatagtttgtaagtggcagggtcgttaatatctatctggtctacatcaatttccaagctgcggctcaggcggatattctcgacggcttccttaataatggaaagagttttcagtccgaggaagtccattttgattaatccggtatcttcaatcaccgaaccttcatattgggtgacaagcattttttcacctgtctccttatcatcggcagtgctgacaggcacccagtcggtaatatcatcacgacaaataatcgtaccgcaggcatgcacaccagtgccacgaacgtttccttcgagcatcttggcatacttgatcgtatcccgtaccaaaggatcggaagaggcttcggcagcctgcaactccgggacatattctatcgcattgcggagattcagtttcttatcgggaatcttatcgggtactagtttagccagacggtcggattccgagagagggagtttctgcacacgggcaacgtccttgatagccagtttcgtagccattgtgccatacgtgatgatatgagccaccttctcttgaccatatttattcgttacccaacgaagtacctcgccacgaccgtcatcatcaaagtccacatcaatatcaggtaatgagatacggtccgggttcaggaaacgctcgaacagtaagtcgtactggatagggtcgatctttgtgatacccagacagtaggccaccgccgaaccggcagccgaaccacgtcccggacctaccgacactccgagctctttgcgagcggcgttgataaagtcctgcacaatcaagaagtatccggggaaacccatcgtcttcatgatgtacaattcgaagttcatacgctccttcacttcctccgtcaacggttcaccatatattctttttgctccgtcgaaagccagtttagccagatagtccccttcaagtttgatacgatacaatttatcatatccgcccagacgcttgattttcgcctttccatcttcttcactcaacaccacattgccatgctcatcttgagtgaactcatcataaaggtctttctccgtaaacttctgccggtattcttcttccgttccgaaatcctcgggaatggcaaaagtaggcatgataggggcatggtcgatagagtaatattctactttatcgagaagttccaatgtattgctcaacgcttccggcacatcggcaaagagctcgttcatctcttctcgtgtcttcatccattcctgcttggtatagagcatacgggtaggatcatccagatccttaccggtactcaaacagatcagacggtcatgtgcttcggcattttcttcatccacgaaatgaacgtcatttgtacaaaccaacttgacattgaacttcttggaatattccataagatatttgttcacttttacctgcaaagggtagcactcgtgattggcccggggaacagttgctttatggcgctgcatttcaaggtaaaaatcatcgccgaacaggttcttataccactgaatagcttcttccgcttcggcaaactggtcattggtaatccgcttcggtatctcgccaccgagacaagcggaacaaaccattaatccttcgtgatatttttccagttcgctgcggtctgtacgcggacgcatataatatccgcgcgtccatgcgtgcgatactaattttataaggttatgatagccagtctcattcttggctaatacaatcaagtgataaccgctctggtcctgtttgccttctttcagatccattgtgcggcgggcaacatacatttcgcacccaataatcggtttgaacagtttgttttccgcctccactatctttgctttacaagctgcaacctccgcctctttatcttcacactctatggagccggcttcaattcccaccaaccgttttttcaggtccttgatttcacctttcggaccactattcttcttattgacgtagttcgtaaattccttaataccgaacatatttccatgatcggtcacggcaatacccttcattccattctgcattgctttatcgaccagacgagcgacgctagcctgaccgtccaaaagggaatattgcgtatggacgtgtaaatgaacgaaatcctgcataatgataagtctttatttgaaggcataaaattactacctcccgcgttataaacaaaaataatcctcaaaaagttatcaacattcacatttctatgctgaattacttgctgattttttaaattaagtatatttttgcagacaatatcattaaacagcattcatgggtcgactaaagaaattaaaaaagatacgtattcaccgcgaaggaacacatatattatggggtagcttcttgctgctgctattgattaatgccgctctttattgggggatcgattgcaaaatacctttttatgtggtagcagtggcgagcatcgttgtctatctgctaatggtgaacttcttccgctgtcccatccgccttttcggacaagatacggaaaaaatagtcgtagcccccgccgacggaaagattgtcgtcattgaagaagtagacgagaatgaatatttccacgaccgccggttaatggtttctatctttatgagcatcgttaatgtgcacgccaactggtatccggtggatggaacaatcaagaaggtcgcccaccacaacggtaattttatgaaagcctggttgccgaaagccagcacggaaaacgaacgttcgacagtcgttatcgaaactccggaaggagtagaaatacttacccgccagatagccggggctgtggcacgccgcatcgtcacctatgctgaagtaggcgaagaatgttatattgacgagcacatgggattcatcaaattcggttcccgtgtggatgtatatttgccccttggtacagaagtttgtgtcagtatgggacagttaacgaccggtaaccagacggttatcgccaaacttaaataattcggtcgcaatgacaaacgttattaaaaataatattcccaatacagtaacctgcctgaaccttttctccggttgtatcgcctgcgttatggcttttgaagccaaatatgagctggcattacttttcatcgttttaagctctatcttcgatttcttcgacggactgctggcacgtgcactcaacgctcactcaatcatcggaaaggatctggactcattggcagatgacgtcagtttcggtgtcgctccttcattgattgtcttctctctgttcaaagagatgtactatccggcaaccatggagtttattgctccttacctaccctatgcggcatttttgatttccgtattctccgcgctgcgcttggccaagttcaataatgacacacggcagacaagctctttcgtagggctgccagttcctgcaaatgcattgttttggggttctttagtggcaggcgcgcatgacttgctggtctccgaaacctgtcatcctgtctacctttttatattagtatgtctgttttcgtggctgttggtatccgagataccgatgttttccctgaaattcaagaatctctcatggaaggacaacaaaataagttttatattcctgattatctgcattcccttccttgtatttctggaaattgccagctttgcagccatcattgtatggtatattttactttcactttttacaagaaaaatgaaataaacaatctcttggcacgtttgttgtactatgagttttatcaaagttacaactaaaaaatcatagcccgatgcatatacttttatttatactcttttttattattgccattatcgtatttggcctctcgattgtaggatttctgttaagaacaattttcgggatcggacgccgttcgtcatcgtcacatcacgggaagaccggacaaagccaacaaagctacaatcaagggtcgtacaattctaatgatgatgaagaggaaattctgtccgagaatacttcggcaagaaagcacaaaaaaatattcacccaagatgatggtgaatatgtagatttcgaggaaataaaagaataaattttattttcgtttcgccgcaaagaattctctcataagagcagcacattcatcagccaatatgccttttacaacaactgtcttaggatgcaaagcgtctgccgcatatctctgatatccgcgtttttcatcttcggcaccaaacactagctttccagtctgcgcccaagcaatggcaccggcacacatcacgcaaggttcaacagtaacatagagtgtgcattcactcagatacttaccaccaagcacattggcagcagcagtgatagcctgcatttcggcatgagccgtcacatcattcaacgtttctgtgagattatgagcacgtgcaataattcgttccttacagacaacgactgcccctaccggaacttctccccgttcggcagctttgcccgcctctatcagggcttgtttcatgaagtaagtatcgtccagcatcttcttatcgtctcatatcatgttctccaaaaagggtcggataatcttcttccatattcttgtgaataaacatgagaatcgtctcgcgaagccaacgtgacttgttcgttatcttatacttctcaagataacgatcaacaatctgttgttcgtcgtcgctcaacaaaatgctcatccgtcgttcccgtttggtgcattcgacgtgcattttcaggcactttttactcctttttctcatatcttctgcaaaattacttttacttctgtaaaaacaaagaataaaagcagtaaatttgcaaaaaaagatggccaaacataatgatttagggaaagccggagaaaacgcagcagcggcttatcttgagaaggaagattatctcatccgccaccggaactggcgtaaaggacatttcgaactggacattgtagcagcaaaagataatgaactggtagtcgtggaagtaaagactcgcagtaacaccgagtttgctcaaccggaagatgctgtggatgtaccgaaaataagacgtacagtacgtgctgcggatacgtacataaagctatttcagattgacattccggttcgcttcgatatcattacggtagtgggtgaaaacggcaatttcgagattgagcatatcaaggaagcatttcttcctcctttattctaagaagttccgaggctcatcacagaaaatacagagtaacacggagtatacagatttattatataattattagttatgaacgtagaaactgtcagagaatactgcctcagcaagaaaggagcaactgaatccttccctttcgatgatgtgtcacttgtcataaaagtgatgaataagatgtttgcccttattgatctggaaggagcaaacagtattgcattaaaatgtgatccggaaaaagcgattgaactgcgcgaacattatgccggcatcgaaggagcttatcatttcaacaagaaatactggaacagtgtccgcttcgacagtgatgcagatgataaacttataaaagaactgatcgatcattcttatgatgaagtaatcaagaagtttactaaaaagctacgtacagaatatgatgtgctcccctaaacgatttccgatcccattggttcatatcaatgaaacgaactctaccaacaattatttgcaagctctttgcgcacgacaacaaacagaagagttcaccactgtggttgcagactttcaaacgtccggacgaggacaacgtggcaattcgtgggaagcagaacctgataagaaccttcttttcagttttgtgatttttccggtctttttggaagccagacaacagttccttatctctcaaattgtatcattagcaatcaaggaagaactggatacttacaccaccgatatttctattaaatggccgaacgatatttattggaaagataagaaaatatgcggaatgttgatagaaaatgacttaatgggaagaaatatcagccaaagcattgcaggagtaggaataaatatcaatcaggaagtgtttcacagctctgctcccaatcccgtatcattatttcagatcacaggaaaacaatatgatatattcaatatattagagcatataatgctacgtattcaaatttattacgacttacttcaaaaaaacaatacggcactcataaccgcccaatatgaaaggtcgctttttagaaaagagggaatgtaccggtataaagacgtcaatggcgaatttatggctaatattgtttgtgttgaacctgaaggaagactcattttagaggacgaaacacaaacaaaaagaggttatatgtttaaagaagtggaatatttattgaaataagtagtccacgaactgatttaaacattatctttggaaccaatgttttatatgaaaaactcccttatttatgaaaacaagattaattttcctgcttccattattatggttgcttattggctgtgaagattccgaaccggagtcaaaaccggattccaccgatcctccactaatagaatatcattatgaacttccagttgtctttcatgttctctatcagaatgaacaacagaatattaaaaaaggacgaattcaggagatcataacagcctgcaataaatattatcaaaatcgtttgggcagtaacagcgtagatatgaaccttgaatttgttctcgccacagaaaatcctcaaggggtaaaacttgatgagcccggtgtacatccaattcaagtaagcaatcctgtgcaagactgtgaggtttttatgacagacaaagctaatcttaaatatttgtgggataccgacaaatacataaatatcatgctttaccctttcaagcaagatgagaattctgaaggtgtaattttaggtatatctcatttaccatatacaatcaagcccgattatctagaaggactaaatcaattaaatggtattcccagccacagttcactcaaatatcctcattgtatttctattaataatacatatataaacagtacaccaagtaatgaatctaaaaaaatatacagttctactgatatagtggcaacaatcgcccatgaattagcccattatctcggattattccatacattctccgaatcggatgatgaaggacttaatacatgtatggacacagactattgcgatgacactccaacctatgatagagaagcatatagcaattggatgcaaagttatatcgaatcaaagaacggcataaagaacatgagtcttagcgaatttaacaaattgtttgaacgaaaagactgcgtcactaatctaacatccactccaaacaacataatggactatgatatatcttgggtaaaccgtttcactcccaatcagcaagaacgtattcgctatgtgttgatgcatagtcctctcgttcccggtcccaaagtagaaagaacaactactcgtacgctatccggggaacaggaacttccgatgagaatgataaaatagcatttataatagaaaaagaggtgaaccgcttagcgcttcacctctttttctattataactatcttgtccaacgtcttttgcgcctccgtagaaggaaaccttaaaacaaccttctgcaaagaatttcttgccttttcatatcccgtagcaaataatttcgataatccatcgcggtatcgtgcgtactgcatctttgtaggggaagaaattttcttataatcggtttccaacttctttttctcctgttccgccattagataataataattacccaagaagatgttagcagctaagttgtccgcatccagttgcaatatcgtctcatacattcgcaaagcatccttttcctgcccacgacatacctgcatttctgcacaagattccagataagctacattattgggagccttttgaagtaattctttatagaacagataagctttgtcgtaatttcgtttctttctaaatgcaatagccagctcgttagccaacttcacactaatctcactgctcttatcaatatttgtccaataatacatttccgtacgatctatattcaagctaatcgtttgacggaaatagctcatagcctgcccttgctgcccggcttcaatagcggcagacactttctgcaacatctcatcaaccgactgtgcattcagcatcagcggcaatgaaaacagagacaaaaaaaatatagttaaggttctcataatccgttacattgctatttagttcgtgacacacaaagatacaacaaaaaaataaaaaacgtacctttgttcacgaaaagaacaatcatttagataaaagtgtttctacaagatgataaatataaaattgtactccgaaaacagacgcatattacagattgccataccgtccattatatcgaatatcaccgtccctttactgggattgattgacgtaactatcgtcggtcacctcggttctccggcctatatcggagccattgccgtaggaggaatgttattcaacatcatctactggattttcggtttcctccgtatggggacgagcggcatgacctcgcaggcttacgggcaacatgacttgaatgaaatcacccggttattactccgctccgtcggcgtcggtctatccattgcaatctgtctgttaatactccagtatcctatcctaaaacttgcatttacttttatacagacgactccggaagttgaacaactggcaaccacctatttctatatctgtatctggggagcacctgccatgttagggttgtatggatttgcaggctggtttatcggaatgcaaaattcacgtttcccgatgtatatcgccattacgcaaaatatcgtcaatatcacagccagcttatgccttgtctatctgctggacatgaaagtggcaggagtagctaccggaacccttatcgcccaatatgcagggttcataatggcaatattactatatatccgttattacagcaaactccgcaaacgaattgcctggcgggagatatggcagaaacaagctatgtaccgcttctttcaggtcaaccgggatatattcttccgtacactttgcttggttatcgtcactatgtttttcacttcagccggagccgcacaaggcgagatcgtattagccgtaaacacattgctcatgcaattattcactctcttttcttatatcatggacggttttgcttatgccggtgaagcgttagcaggacgttatataggcgcaagaaaccaaccggctctccgtaacacagtcaatcacctgttctattggggcgtcggtctttctgcagcattcacccttttgtatgcaataggcggaaaaggctttctcgaattactgactaatgacacttcagtaataaacgcttccgacacctacttctattgggcactcgccattccgttggccggtttttccgcttttctgtgggacggagtttttatcggtgccactgccacccgttccatgctttattcaatgctgattgcttctgccagctttttcctcgtctactatgctttccatgactttttaggcaatcatgctttgtggctcgctttcctcatttatctttcattgagaggaattgtacaaacctttatcggaaggcaaatcgtgagaaaagtaatcgtaccgcaatgaggctatccaataaattatctctatatttgcggcaaataataaaataaaaaaggtatggcaaagtataaaagagtcttgctgaaattaagcggagaaagccttatgggcgaaaagcaatatggcattgatgaaaaaagactggcagaatatgctgcacaaatcaaagaaattcatgaacaaggcgtacagatcggcatcgtgattggcggaggaaacattttccgtggtttgagtggagccaataaaggattcgaccgtgtgaaaggcgaccaaatggggatgctcgcaactgttatcaatagtctggcattgagttcggccttggtagctgccggggtgaaagcccgtgtgcttacagcagtccgcatggaaccgatcggcgaattttatagtaagtggaaagcgatcgaacacatggaaaacggtgaaatcgtcatcatgtctgcaggaacgggaaatcctttctttactaccgatacaggatcttcattgagaggaatcgaaatcgaggcagacgtgatgctgaaagggactcgtgtggacggcatttatacagccgacccggagaaagaccctacggcaaccaagttccacgacatcacttacgatgaagtgctgaaacgtggcctgaaagtaatggatctgacggctacttgtatgtgcaaagaaaacaacctgcccattgtcgttttcgacatggatacggtaggcaatctgaaaaaagtaatcagcggagaagaaataggtacaattgtacacaactaattataaaaagaggacgttcccggtaaataagggaattaggatttattatagcgatgagcgatagacagagcatatatactctcctatcgcattatcgctattaatttctataaatttcttcaacaaatccgagaagccggattttatctgccccctgtttatctgtacaagacgagaaactcccaagcattggataggatacaatgaaaaaggcgatttggttctaagggtacaatttcttccgtgcatatagtttccctatttgcctaagaattattcttccggctacacttatttaatcttccgatcgcataaacaggattagttttatgcagccgaaataatagtttttagcacacgaaagattaaattatactatcaacaggctaaacacttgtttatcatcagtgaactgtgtacttttgcacgccattttaaagacttaaagcaatgaacagcaaaaccaaaggttttatttatggagcgattgccgccgcaagttacggtatgaatcctctttttacactcccgctctatgcagccggcatgagcgtcgatactgttttattttatcgttacttttttgctgtcatcgtactagggatactgatgaagatgcagcatcaatctttcgcccttcgtaaagcggatattcttccgctggttattatgggattgttgttttcgttttcttcctcactactgttcatgagctacaactatatggatgcaggaatcgcgtcaacgatcctgttcgtttatccggtaatggtaacggtcattatgggagcgttctttaaagagaagatttcagcaatcaccgtcttttccattctactggctctcgccggcattgccctgctttatcagggagacggaggcaaaccgttgtctaccattggaatcatctttgtcctgctatcatcgctatcttatgccatatatatagtaggtgtcaaccgctcgacactgaaaaacctatcgacaacaaaactcactttttacgctattttgttcggtctgtcggtctacatcgtccgtctgaacttcctgacggatttgcaagtgatacctaccgcgtggctctggggagatgtattggcactggctatcctgcctactgccgtatcactggtttgcacagcattggctatccattacataggttccactccgaccgccatactgggggctctggaacctgtgaccgctttatttttcggtgtccttctgtttcacgaaaagctgacaccccgcttaatggtcggtattttgatgattattacagcagttaccctaatcatcatcggtaagtcactcataaaaaagatgagtatgctgttgcaggtgaacaaaaaataatatacttttgctacttaatcaatcgaatagcaactttaattatcaaaaaatatggtagacgtaaagacttgccttgacaatgcacaagagaaaatggatatggccattatgtatctggaagaagcgttggcacatatccgcgccggaaaagcgagtacccgactgttggacggtatccgcgtagattcttacggaagcatggttcctatcagcaatgtagcagccgtaacgactcctgatgcacgcagcatcactatcaagccgtgggacaaaagtatgttccgtgtaatcgaaaaagccattatcgactctgatctcggcatcatgcccgaaaacaatggtgaaataatccgtatcggtattcccccattgaccgaagaacgtcgtaaacaactggccaaacagtgtaaaggagaaggtgaaactgccaaagtgagcgtacgcaacgcccgccgtgacggtatcgacgcactgaaaaaagctgtaaaagacggattggcagaagatgaacagaagaatgcggaagccaaactgcaaaaaatccacgataagtatatcaagcaaatagatgatatgctggctgaaaaggataaagaaatcatgaccgtttaaaaaacaaaaagcaagtgcacggattagtaatcaaaaacacgggcagttggtaccaggtgaaaaccgacgacggacaatttattgaatgtaagatcaaaggtaatttccggttaaaagggattcgcagtaccaatccgatagccgtgggcgaccgtgttcagattataaccaatcaagagggcactgcttttatcaacgaaatagaagataggaagaactacatcatccgtcgttcttccaatctttctaaacaatcgcatatacttgccgccaacctcgaccaatgtatgttggtggtaactgtcaactatcccgagacttccaccatttttatcgaccgttttcttgcgtccgcagaagcctatcgggttcccgtcaaattagtatttaataaggtagacgtttacaacgaagaagaattgcattatctggacgcacttattaacctgtatacgcatatcggctacccttgtttcaaggtttccgcaaagaacggtgacggaatagacgaaatcaaaaaggcgctcgaaggtaagattactcttttctccggacattcgggagtagggaaatcgactcttatcaatgctatactgccgggaattgaaacaaaaaccggcgaaatctccacttatcacaataagggaatgcataccaccactttctccgaaatgttcccggtagacggagacggatatattattgatactccgggcatcaaaggtttcggaacattcgatatggaggaagaagaaattggtcattattttcctgaaatattcaaagtttccgccgagtgcaaatatggcaactgcacgcatcgtcacgaaccgggatgtgctgtgcgcaaagcggtagaggagcatttaatcagcgaatcccgctatacttcttatctgaatatgctggaggataaagaagaaggaaagtaccgggctgcttactagcactctttttttctttcgattgattaactcttttttaccatttctctcattaaacctttcctttcagagagtgtctaagtttgtgaagatattatataacatgctatacatacgatactaaaccatgaataagaaaactaaatggggcatcattatcctcgttggtgccggaattatcggaggaggaatctactcacaattaccaaagaaaaacgacgaactggcagccgccgacaaagtaatgggtggtaatcaaaaaaaaggaaaacaaatcttaaacgtaaatgccaaagtcataaaaccacaattattgacggatgaatttacgactaccggtgtacttctaccagatgaagaagtagatttgtctttcgaaacttccggaaaaatagtcgaaatcaactttgaagaaggtacgtctgtcaagaaaggccagttactagccaaggtaaacgaccgacagttacaggcacaactacaacgactggtttcacaactgaaactggcagaagaccgtgttttccgtcaggacgccctgctgaaacgggatgcagtcagcaaggaagcctacgaacaagttaagacagatttagcaacgctgaatgccgatattgaaatagtgaaagcgaatatcgaattgaccgagctccgtgccccgtttgacgggattatcggactccgacaggtcagtgtcggcacgtacgcctctccgaccactgtcgttgcgaagctgactaaaatcgccccgctgaaagtagagttctccgtaccggaacgttatgccaagcagattaaaaaaggaaccaacctgaatttcagcgttgaaggtaaactagatgccttcggcgcacaagtatatgcagtagaatcggcaatcgacccgaatctgcaccaattcacagcccgcgcactttatccgaatgtaaaccacatcctgctgccgggacgctataccagtgttttattgaaaaaggaagagattcccgatgcaatcgctatccctacggaagctattgtgccggaaatggggaaagataaagtctacctgtataaatcggggaaagccgaaccggtggatattattaccggtatccgtacagcatccgaagtgcaagtgataagaggactacacatgggagatacaatcattacttcaggaacactgcagctccgcaccggactggctgtgaaacttgataacattgattaataccagcgccttatgaatatatccgaattaagtatacgccgcccggtattagccactgtattgacaatcattattctcctgttcggatttatcgggtacaattatctgggtgtccgcgaatatccgtcagtagataatccgattatctctgttagttgctcatatccgggagctaatgccgatgttatcgaaaatcagataaccgaaccattggaacagaatatcaatggtatccccggtatccgttctttatccagtgtcagccagcaaggacaaagtcgtattaccgtagagtttgaattgtctgtcgacctggaaaccgccgcaaacgacgttcgtgataaagtttcacgtgcacaacgttatttacctcgcgactgtgaccctcctaccgtctcaaaagcggatgcggacgccatgcctatcttaatggttgctcttcaaagtgacaaacgttcgctgctggagttgagtgaaatcgcagatttgacagtcaaagaacagttgcaaacaatttccgatgtaagtagtgtgtctatctggggagagaaacgttactccatgcgtctctggctcgaccctgtgaaaatggcaggttacggaattactcctatcgatgtaaaaaatgcagttgacaatgaaaacgtagaacttccttccggtagtatcgaaggaaatactaccgagttgacgatccgtacattaggactgatgcacacggcagatgaattcaataacctgattatcaaggaggagaacaaccgaattgtacgtttcagtgacatcggacgtgccgagttggggccagccgacatcaagagctacatgaagatgaacggcgtacccatggtcggcgtggtagtaattccacagccgggtgcaaaccatattgaaatcgccgacgctgtataccagcgtatggaacaaatgaaaaaagacttgccggaagacgtgcactataattatgggtttgataacaccaaatttattcgtgcgtctatcaatgaggttaagtctactgtatatgaggcttttgtactcgttatcatcatcatcttccttttcctgcgcgactggcgtgtgacactggtaccatgtatcgtgattcccgtttcccttatcggagcattcttcgttatgtatctggcgggattctctattaatgtactttccatgcttgccattgtgttgtccgtgggactggtggtggacgatgcgattgttatgacggagaatatctacatccgcattgaaaagggaatgagcccgaaagaggcagggatcgaaggagcgaaagagattttctttgctgttatttcaacgacgatcacactggttgccgtattcttcccgattgtcttcatggacggtatgacgggacggttattccgagagttcagtatcgtaatttcgggttcggttatcatttcttcgttcgcggcactgactttcactccgatgttggcaaccaaactactgatcaaacgggaaaagcaaagctggttctatgcaaagaccgaaccgttctttgaaggcatgaaccggctatacagccgttcgctagctgctttcttgaacaaacgttggattgcccttcctttcacttttattactatttgcctgattggagttctatggaatgctattcctgcggaaatggctcctcttgaagaccgttctcaaatcagcatcaacacacgaggtgcagagggtgtcacttacgaatatattcgggattatacggaagatatcaaccagcttgtcgattccattcttcctgacgcagaatctgttactgcccgtgtatccagtggtagcggaaacgtgcgtatcacgctgaaagacatgaaagatcgtaactacacgcaaatggaagttgccgaaaagatttcgaaagaaatacggagcaagacaatggcacgttcgtttgtgcaacagcagtcttctttcggaggacgtcgtggaagtatgcctgtccagtatgtgcttcaagctactaatctggagaagctggaagaagtactgcccaagtttatggctaaagtatatgagaatccggtctttcagatggcagacgtagacttgaagttcagtaagccggaagcccgtattcagattaaccgtgacaagtccagtatcatgggagttagtaccaagaatattgctcaaacattgcaatacggattgagtggccagcgtatgggatatttctatatgaacggaaagcaatacgagattctcggcgagatcaatcgtcagcagaggaataagccggccgatttgaaagccatttatgttcgcagcagcaatggggatatgattcagttggataacttgattgagttggaaagtggtatcgctcctccaaagttataccggtataaccgatttgtatcagctactatttccgcaggattggcagacggaaaaacgatcggacaaggactggacgaaatggataagattgccaaggaaacattggacgacacgttccgaacagctttgtcgggtgactccaaagaatatcgtgagagttcttccagtctgatgtttgcctttgtcttggctattcttctgatttacctgattctggctgcgcaattcgagagttttaaagatccattgattatcatgttgacagtaccgttggctattgccggagcattggtattcatgtatttcggagatataacaatgaatattttcagtcagattggtattattatgctgattggtctagtggcaaagaacggtatcctgattgtggaatttgccaatcagaaacaggaggccggagaggataaaatgagtgctatcaaagatgccgccctgcaacgtctccgcccgattcttatgacaagcgcttctacggttctgggacttatcccgttggcattcgccaccggagaaggctgtaatcagcgtattgccatgggtacggcagtagtaggtggtatggtcgtttctaccctacttaccatgtatatcgtaccggctatttacagttatatctcgaccaaccgaatcaaaagactaaccgaatgaaacagaaaggaatttgcatgaaacgtatcatatatatagttaccgcatgtgccttcttgtcagtttctactgcgaaggcgcaacaagtcctcacactgaaagagtgtttggaggaaggactgcaaaacaattactcgttgcgcatcgtccataacgaggaacaaatcagcaagaacaatgcaacgttagggaatgcaggatacttgcctacattggatttctctgccggatataccggaaacctggataatattgaaagtaaggcccgtgccaccggagagattacaaaaaacaatggggtctatgaccagaccgtcaacgtcgggcttaacctcaactggactattttcgacggattcaatatcagtacaacatacaaacagttgaaggaattggaacgtcagggagaaactaacacccgtatcgccattgaggatttcattgcggacctgacctcggaatattacaactttatccaacagaagatccgtctgaaaaactttcattatgcaatgtcgctctccaaagaacgcctgcgtatagcagaagcgagtcatcttgtcggaaagttctcaggattggattatcaacaggcgaaagtagacttcaatgcagacagtgctcaatatatcaaacaacaggaattgctgcactcatcgcgtatccagttaaatgagctaatggctaacaagaatgttaatcaggctattataatcaaagactccacgatcgacgtacatggggatttgaaatttgaggagttatggaatggcacactggcaacgaacgcttctttactgaaagcagatcagaatacggtacttgcgcaattggattataaaaaggtaaattcacgtaactatccgtaccttaaactgaatacgggatatggatatacctttaataagtacgatattaatgcaaccagccggaggggaaacttgggcttcaatgccggagtaactgtcggatttaatatattcgacggcaaccgccgccgtgaaaagcggaatgcaacccttgccttcaagaaccgccgtctggaacgtcaggaattggagcttgcccttcgctccgaccttagtaatttatggcaggcttatcgcaacaaccttcaattactgaatctggaacgtcagaacctcgtaactgccaaagataatcacgatattgccatggatcgttatatacagggagacctttccggttttgaggtacgtgaagcacaaaagagtttgctggatgcagaagaacgcatcctctccgcagaatataacaccaaactttgcgagatctctttgctgcaaatcagcggaaagattacaaaatacctggaagaatagaaaaactacgtgaataataaacgatgaacggtgaacacaactggcagcatattgcgcagtttgttcaccgtttatcgcgtttatagtatatcgttttacagattatcccatgatgtatttagcaggtttaccgatacgattcaccaagtttacaatcaaccaggacaccagaaaagcgactatcgcagctatcggtatctgtaaaggaataggtatattgagtgttcttaccaataccactgacggaccggtaaagaagtaatgtatcatatagacaccgaaaccacatacggtcaggttagccaatgccttccgtactctttccgaacggacattgactttcttagccaacataaatacaggaattgtcatcatcaccacattgagagaacaataggtaaaaaagagttccaacatttcgtccgtacaatccggcaaagctgtcatgtaacggaaaccaaagaacgtcacgacataccccaccacaaacatcggaataccgattgccaatgttttcttcaggctccaatcgagatctttcagataatgtcctaacaataagtatccgttgaaaccggcaaatgcatataacattccaaaagaattccaagagcaagagccccataagtaaggggaaacaaactgataataataaggtagcaacaatgtcactccccaagccagcaggaacattaacttagcccgttgcgaagctttttccacccatgccgaaaaaacaggcaggtaaagatagagtccgataagcagatagatataccacatgtgtactgccaaaagggagaagttaaaaggaattgtcagaatgtattgtatagctactgaaagggattgctgcatcacttcttcaccagaataaggaaagaaatcaaggataatctttgggtctaaccccaataagccggtaatccaagggaaaagattatagataatagaccaaattaagaacggataaaaaacacggggaatacgttttttataaaaagtagaagcgtcaccccggacaggcaagagcaatgcgcctgtaatcattacaaacagaggcacacacggacgaagtacagcaccgtaaatggctccccacaattttatttccccaatattgggagctgtgcccggatagaagttgaatgggtcggtacaatggcagcaaacaactgtaaacatggcaataaggcgtactacatccaaccagacgatatgttggttcttcggattgtttaattcgattgtcggtggtttcataatagttagtgattagaaaaagagagttagtaaaaaagggatgcctatacgaatttgacaggtatcccttaaataaatcatttattgaatcagaactgcaaacaaattatttagtgcaattccacggttttaactgtttgaagaagtcattgcccttatcatctaccagaatgaatgccgggaaatcttctacttcaatcttccagatagcttccatgcccagttccggatattccacacattcgatgctcttgatattattttgagcaaggatagctgccggaccaccgatagagcccagatagaaaccaccatatttctgacaagcatccgtcacttgctggctacggttacctttcgccaacataaccatgctgccaccgtgactctggaacagttccacatacgaatccatacgtcctgcagtagtcgggcccattgaaccacaagccatgccttccggagtttttgccggacctgcatagtagataggatgatccttaatgtattgaggcaggtcctcgccacggtccaaacgttctttcagcttggcgtgagcaatatcacgacctacgataatcgtaccattcaatgacaaacgggtagataccggatatttagtcaactctttcagtatttcggacatcggacggttcaggtcaatcttcacaacatcgccttcgcctgccttacgtaattctgccgggataagttcgcccggatttgaatccagtttctcaatccagataccttctttattgattttacatttgatgttacggtcggcagagcaagatactcccaaacctaccgggcaagaagcaccatggcggggcaaacgaatgatacgtacgtcatgagccagatatttaccaccgaattgagcgccaaggccaatcttgtgagcttctgccaatacttctttctccagttcgacatcacggaatgcacgaccatattcgtttcctgttgtcggcaggttatcatagaaatgagtagaagccagcttcactgtcagcaaattcttttcggcagaagtaccgccgataacgaaagcgatatggtaaggagggcaagcggcagttcccaatgttttcatcttttcaaccaggaacggaaccaatgtacccggattcagaattgcctttgtttcctgatacaaatatgttttgttggcagaaccacctccttttgttacacaaagaaattcatactccataccttcagtagcctcaatgtcaatctgtgcaggaaggttacattttgtatttacctcatcatacatattcagaggtgcattctgagagtaacgcagattttcttcagtatatgttttgtaaacacccagcgaaagagcctcttcgtcagaataccctgtccatacctgctgtcctttttcaccgtgaataatagcagtaccggtatcctggcagaatggaagtatacctttcgatgccacttctgcattacgcaggaaagtcagtgccacgtacttgtcattctcgctggcttccggatcgctcaagatttttgctacctgttcgttgtgcgaacgacgaagcataaatgatacatcacggaaagcagcattggccattgcagtcagaccttctttctcaattttcaggatagggtttccttcaaactcacttaccgacacatagtctttcgtaagcagataatactcagttgtatcttttcccttttcaaacatgggttgatacttaaacggaggtgttgccataagtttcttattttattacgtaatgttagttagtgaggcaaaggtaataattaagaatgaagaatgagaaaggaaagaagaagaattaagaatgaataacggagaatgacgaggtacaaatgaagacggtgaacgaattgtactttattgtacaatgtccaccgctcatcgattcatagtttggttcacttattgtatatgttcgattcgtttaatcagttcatttcctaaagcagttttgtcctcgatgtgtttcaaaactgcagtcacgaatgtattgctttcaaagtcaccacgtacttgttcgaaatcctgtttcatatcatcgcgagaaccatcaacaccgaatccggtcattgaagaaagcgagaactctttctttgcgtcttcataaaccattttatccaaccctaccacagccttctgccatgctttcacgatagtaaccacgtcctgagcagttaccgtttccggattcaaaccataaaattcctgaatcttattatatgcccaggtccattcatacgtgtaatagttttcatgcatttccgcaaaactggcattaatagatttcaggcggttaatagagccgttttcgataccgtccaacaatcggtctatttcactcttgggagcaatcagtccggagatgtccacccattcgccgacaccgatttccgtatccggtttcaggcgctggcggatttcgtcattactttggaaattaatgccttccaaccgttttatgatagagttccccaggaatttgttgatggcaatttcatagaaacgaatcccgttattcaaagaagaattcttgatctttgcactctggtaagagtagatttcagaggtttcgccggatacccgtttcaattccttcaaaatagaacgtcccttgaacatcttttgaatggtatatggactcaaaaggttataattgatataatcaagccggttcggatctttccgtttgtcacgtttcggccatttctgggcgtcacggattgtcccgacacttctcagattcactccgggaaccagataagtggtattccgttgttctatcaaataggagaaaggaagattggaagtgtcggcatggtttacatgacgtcccattaccaaagaaaaagctccgacacgtgccggccataagatatatgaatcagaagtcgtttttgcccctctttccatggtcccctgatgaatcggtcccaacttatacatatgattactctgattagatcccgaacctgcattcatgaatgagaacattccggcaatcaacaaagtcgatttatggtgagtcaccgtgaaagggcctgcgaagatagcgcacgcttctccattttctccctggcagttgctgaagaataacgagtcggaagcagaataattgtgtcccagtttacaagcttgtccgacaaagcaacggcttagcatcgttccgtcgtccacgtctgaaccggaagagataataaagtcgtcgcagatcaccccgtgaccgatatgcacaggtgccgtcacattactattgatactgccattggtcagccgacaggttccacagatgtggcaataatcaccaatcctgacatttctgattgaacctgtattgagaatcatcacatgatcaccaatactgccgacagtagaagcgtgcttattggaatagtaatccgtaatcgctttcatgcgactgattagttcaggacgatgacggtacaacgccaatatgtaggcctgatgcgctgacaacttgtcgttaatgagtacttcacgccctcctgtttcattaagaactgtcgcctctaccccattaccgaaagtagtaagcctgtccaccagaatgatatccacattctcaatgaaggtatcattaccgatctcataattagcaatgtagttctgaatgttttcaatgcagcagttatcccctactgtcacattgtgcaaagttacatgacgcaatccggaatgtttcctgatgcctcccggcaatgtaaattcagcatcaaatacacccagtttcacttctcccgaaaaacgggtgtgatgaacgtactcacaattaaacccctctgcaactgatacatttccccaatcatcagccagacacgactggctctttaactgaagcacttcatcttcagttagtctacgataatctttcatattaataaatataagtaatgtgccgcttcccccaatcagcaaagcagcacattgattaattattcctcctcttcgtaggtctgataaagaaaatcgttataggggtatttctgaacgtgtaattctttcactcgttgataaactacgcttttcagttcgtccatattgattctttcgcgggcggaaataaagagacagttgtcttccatttttgccatccacgtcttcatcagttcttcgagtgttaagttttctttcgttcggggggtaaggtcatccggcgctttctccacataggtgtaagcgtctattttattgaatacaagtatcatgggtttgccaccgccgccaatttcggcaagtgtcttgtttaccacttcgatctgttcttcaaatccggggtgagaaatatcgactacatgcacaagcaaatccgcttcacgcacctcgtcgagcgtcgacttgaacgaatcgaccaaatcagtcggcaatttacggataaatcctaccgtatcggataacaagaacggcaggttatcgataatcactttacgcacagtggtatccagagtagcaaatagtttgttctcggcaaacacttcgctcttcgagagaaggttcatcatggttgattttccgacattagtgtaacctactaatgcaacgcgtatcatgcgtccacgatttttgcgctgggtagctttctgcttgtcaatctctgccaaacgttctttcagtaacgacatacggttcaagatgatacggcggtccatttcgagttgcgtttctcccggtccgcgaagccccacggaacctttaccgccaccggctccggaaccgcctccctggcgttccaagtgagtccagagtcgttgcaggcgtggcaacatatatttatactgggcaagttccacctgcgtctttgcattagcagtctgagcacgcatcgcgaatatatcgagaatcagtgatgtacggtcaagtattttaattttcagctcagcttcaatattacgtatctgtttcgcagaaagttcatcatcaaagataaccattcccacttcacgttcttcttcctcctcgttccggatatattgtttaatctcctccaattttcctttaccgacataggtcaccgagttagctgtcggcaacttctgcgtaaatcgtttcactacttccgccccagccgtctcggcaaggaacgccaattcatccagatactcgttcgttttacgctcatcctgcgtctgagtgatgagtcccacaagcactgctatttctactttggcttcggatattacaaattctttcattctttacttttttctttcctatataacacggggacaaagataatgatttcaatgagataataaaagagagtatgcttacgtttttttaaaacgcgaacatactctctatttattcttgtcaagaagaaatgatctatttcttcatgttaatcgtctttcaaatattgattagattcgaatcactcatcctcaagtatcaatttaaagtcatccggcactgtaagcacagattctttttgtccaatcagaccatccccgtaataatagacattgagagtcatcttatggcttgtcggatcatatttagaatccacatcatctacccctaaatagtccaatgagctaaatcctaggatatctgatccttcttctgtcaagtacccggtattataactatcgaaagcgactccattgtttttcggattaatcgtgaagaacaaatattcatccggttcaccaacttcttctcctgactctgccaaagcttgcgagaacggatcaacaatgcgataacgattctcgccatctacacgttgtacttttacattatattctttaccagcattatattcatcaaatacccagtctttgaaagcaaatgttcccgaaacatccacccatttcaaacattgaacagtgaaactagcatgtccgtttcctttatatggattaacggcagcagcttccaatgagatttgaaacgaatactcctcttttagctgtgcattttcaaaagttataaccagatcagccgttgcctgtccggctgcaaaactaacactctgagggatgttgaaaatattttccgtattagcctgtacctcaattgcaacagttgcagccgcctctgtcttatcccggctaattgtcaacgtcagttctttaggatcagtatcttccaactcttcatatccaatattatctcccacaaaagaagcaccaatacaattgggatcaactgccggagaaggagtacgtccatcatcatcggagcaagcagccatgcttagcaatgctattcctccaattaataaagctatatattttgttacttttttcattgtagtattcattttaatcagttgcaccatcttttagattcggattctgccctgctacgggaaggttacctccggtattattcacgataccggcattgttattgctttctttctgcgggatacgcaacagcaaccaagggtcatcagcagcaatattgaaacagaaagcatccggccagtttcccttgtcacttccctggaagcgaacaacaggtttacccaaacgcataatatctgccatagagaagccttcaccccataattcaatacgacgttgcaaccaaacatcatcaacagttacagaacttttgttccaactcgcatcacgctcatccatcaataccttaagctctttagcagcattaccttcgtcattctgttgtgccaaagcttccgctttgataagaatcatctcctcggcacgcatgatacaccagtcattgtcattattggagcttcctataccacttttcattccgaacttcacattggtatatttgataaatttcatttttacatcttctatttccaatgtcgaaatatcatttccaattgcagagccccagctaagtccagataatgcgtctgatttcaggttttcatcgacccaccattgtttgcggacatctgatgttgagattttcttataaagcaaggagtttatagtcttatacatggctactcccgccgtgtaagcataactggagaatgaccctaattgtcctgccggagttgcatacgcattcttattcaccataggtacagaaacgttaattccccacatccagttatgatcggatatatcataaaaagcaggtttggacacttcttccttagtataaggagtatagccttccattgccttatcagcatcattgtatgcttcttgccacattcccatatacaagtgagcacgtgcacgtaacccataagcaacctgttggtcgatacgagtcttatctccctgacggttatatccttccaacaaatcaatagcactattcaagtcacttataatttgttcgtagaccttacctaccgtagcacgaggattattgacaaaattagtcgtttcttccgttatcaacggcacacatggaaggtctttactggtagcatagcggaactgataataaggtgccagacataaataatcaaacgcacgaaccgccttagcttgtcctaaataatacttttcagtctcactcgccgtcgccggatcaatagaaagaataatatcattagccgcttttatctgattataaaagatagcataacgtgcaaagggattggcatacgtagcataacggtcactatattcactgctgacagaaaaccagttataaccattattggcacagatcatatccgggccattcaaatcctgagaaagacaaactgtcggataaccaccgtcatcatctctggtatcagaaggaaatgcagcacacactgtccccatgctgctatacatacctgcaattttagcctccacacgggaagggatgacagatgtagcatcatctatctgttcacctgtaattcggtagccctcactctcaatatcattgatgtcagagcaggaagcaaacgataatgctcccaatataaaaagtgcaaacttatttattcgtttcatagttctttcttttttaattaaaacgtaagagaaattcctcctgtgatagtacgcatcgcagaatatgaactggtagtattggcaccactttcagcagtcgagcttcccagacctaatcccaaacgcgggtcaagacctttgcgtgccgataaaagagctacattgtcagccgtcaaataaactctacaatgagatagtcccagtttgctggtcaaacgtttcggtattgtatatcccaatgtaatattgttaaggctgagataatccgagctaacaaggaaacggctggaatcctgttggtagcttgcatcacttgcacttaaacgaggtacgtcagtataacgattgtccggtgtccacgctttacggatgtccgtagaccagtttgtaccttgcataccactatttccattgtgcatatatgcctgataagccccgtcgtaatatttgccgcccaactgataagaaagctgcaatgagaaatcaaaaccgtagaatcgcactgaagtccccaaaccaccatatacttttggcaacgtagtaccctgatccgcttgttgggcttcttcatagttagaagtctttgtataatcaccattatccggatccacataatacaatgcctttcccgtatccggatctactccggcgtatgttttcaaataagactggtaaagagatcctcctacccggtaaatataataagaacctttttgaccgccatttttctccaaatccggatccaatgcagtaattttattggtatagtgcgtcaggttgaagttcatagcccattcataatcctttccgcgaaggataatgccgttcaaatccaattcaacacccttattcataatatcgcccacgttggtcggctcatagcctgtactgataccggatgatacagggatcggtttgttatacaacaaatcgacagtttttctgctgaaatattcaatagtaccattcaaacggttgttgaataattcaaagtcagtaccgatattgaaagcataagacgtttcccaagtcagatctttcgttcctttatatttgagaatcagtgaatattgcccgttagcgtagttcacatcatactggtcttgataagcataccagttgtcacgctgtacaccgtttacagtaatcagcagtctgtcattaccctgcacaccccaactagctttcagtttcaacatattcacccatttcacgttttccatgaacttttcgtggttaatcagccaagctccacctacacttccgaagttaccccaacggtgatctttatggaaacgtgaagaagcgtcacgacgataagaagcactgaggaagtattttccgtcatagttatattgcaaacggctcaaaataccttcggtcatataattgtccgtatatgatttcgcattcttcttgtctatacctccggcattattcaactcaccaatatatgggttgtacagattggtgttttctccgtagagtacttgattcttataacggtattgttcataaccgaccaataaatctgcattatgcttatcggtaaacgtacgtgcataggttgccagatactggttattcactcccatcattctggtatgctgtacaaaaacagaaccatcatctgccgatgcagatccgaaagcactgctcaactggttcaaacggctgttctgtacattcgcagaaatattggcagtcagcgtcaaaccttcaatcggagtgatgttagcataccattttccacttaacaaatcggtatattcatgctgacggttcagttcgatgtctctagccgcatttccagttaccgaaggacgagaaaagccgctgttgttacccgagtcatagattttataccctgtgttgggattgatagcaatacttccgtcagcattacgtacatataaaggatagatcggtgcaattgtattggatacataaaataagttagcagaacttccccaagaatcaccatcctgatagtcaggagcttgtgaatccgaataagtgtatgcaatgttggttcctacttttaaccattctttagcttgataatcaacttttgcacgaccggtataacgtttgtaagcagaattttgaataataccggaatcattcaggtaaccgacacttgcatagtaattcaatttgtcagaacggcctgagatattaacattgtattcctgacggaaatttgaactgaatacttcgtcataccaatcgtcaggagtataataatatttaccatcagaataccctaacttagcattcggattaagcttgaaattgttaccaatcaatttttcaccatcaggcacggtataaacaaggtatcccaatccaccattttttgcgtccaacaaagttttatctgcataattataagcttcggccttagaggaaccggtatagatcttggaattgtacaaagtcttgtactgcgtttcgtaatattctgccgttccaattacatcatattgaggaaccatgcgcgaattggacccccatttggcatcaaatgtgacctttgctttttctgttttagcagatttagttgtaatcaagataactccattcgctccgcgtgctccataaatagagttagcagccgcatccttcaatacagaaaggaattctatatcttgagggttaatggaagacatatcaccatcataaggtactccgtctactacatacaacggagcattgcttgaactcatagaaccgataccacggatacgaactgtcgcagacgctcccggagctccgttagcatttactgtctgaataccggccacctgtccggagagggcattggtgatattcgacacaattctctcttccaatttatcagctttaatagttgaagcagaaccggtaaatgctgatttcttagcagtaccataagcaacaactataatctcatctaattgtttagcatccggcttcaatgtgatttttaaatggggtttaattgccacttcttgcgcctgcattccaatatacgaaatctgcaaagtctttgcagaacttggtcgttcgatattgctcttattatcaatagattataactatttgcaaaacataagtatcttgtcattcttcttaataaaaaacaacctatatctttaatttatagcttattatttatagtagcaatgatataaaaacagaaattgtgctactaaatatctacttgaaaaagagataagtatttagtaaataatcgtttagactttgaaaagaacccactttgactttgttattttgttccacaacaatttccattgaatgcaaatactagaattacttaattgagaatattcctcagatgttaataaaaataggttttatttattctatgtggtatcttattttataaattaaaatgatttacttctttccgtacggttgtggattatttttaagttagtaactatctacttctcgtacttaataaatcaatctttgttattgcataattttattcgtctgacagatgttgttttttcgtctgacaactgttagacgaaagagaaacaactgtcagacgaaagtttaacagttgttagacgaataaagctatgcataacgagtactaactaatagtatccggagagcttaatcctggaagatttaggattagtttcctttatgtttgccaccggcttttgagtagattgctttttcaagatcccgtacaagagttatatccataatattcgcatatacctgagtcgtttttacacttttatgtcctaacaacttttgtacagtagtgatattagcaccactatatattaataaggtagcatttgtatggcgggcggtatgaaatgatatacgtttatcaatttctgccagtttccctaatatactcagttccttattaatattcgaattatctttcaatttgaaaaaacgattaagatcatccttatagcgctgcaatatatgaatgcctttcccttcaaacaatagatataatggtagacgtacctcaataccagttttgactgatttgtaaataagccacgtttcctgttgaaactcaacaatatttgcagatgtcaaattggtaaagtcggagtatcgtaatccggcgtaacagcaaaataaaaaggaatcttttgtcttttgcaatttagcatattttcctcctagctgtaaatcctccaatttatgcaattcttccggtgatagatgactatgtctgccttctacactttttattttatattttctgaatgcatatttctgcacgtccatataatccttatttatagcgacgttaacataacgtttcaaatgtttcatatgtttggcaatcgtattcaggtgatatcccttggattgcagataattgtcaaatgaagacacaaattcaaatgtcaggtccgtgaactgtacttccttcttaaattcttggagtagctccagagtagacaggtgattctgtctggtgctttctttcaaagaagaattagcgacttcttctctgaagaaagttaagaacgatctaccgttgcttacaggtttatcgatggaatcctttaataactccaaagaaatactcttcccctgttgccataatccaagttctatttgttcaatagccgcaatgtgctcgtataacatacgattcaatacgtctgcattaggatgtccctttaccattctacgtttcgtatcccactgttcaggtttaaggtatatcttagtagagaaatatatttttcttctatttaaataagcttctacctgtactaatgccattccctttttattcaatcttttttttctgttaaacacaaggttgtaactaatcttttccatacttcagttttttaattaataatagaacaaattagacgtagttctgtgctacgccagggttgaatatgcattaatatctctaaaaaaataaatcctcaaaaatgaagtattcacaaaactttaaattaaatgccactttttattgatgtttttttcaaaataagcaaaaaggtttgttaatagaggtgttttgtgactaaaaatgagtatgtgaaatattaaaatgagcattttgcttttgcaaagtgtcgcttctgagttttgaaatcaaaacttttgcagccaatatctatgcttattagcataaatattagcaattgaataacagaatgccatatttgcaacctttttttattaaataaattgttagtttcatatttattaatatatttgcaaattgttagagtaaagaaacaattaatgtaaagttaaactttaagagagaatttatgaaaagaaaattgatgctgttattggcatgcctttttgtgggcataagtctggtaactgcccaaactcagaagatcacaggtgttgtgatttctgaagaagacgggcagccagttgttggcgcctctgtgttagtaaaaggtactactcaaggtacaatcacagatgtggatggtaattttaatttggcaaatgtaccaagttctgcaaagactttgcagatttcgtatattggaatgcagactcaggaagtcattattaaaccgaccttaaaagtcatactgaaagctgatgcacaaaaattagatgagatagttgtgacagcaatgggtatctcacgtgagaaaaaagcattaggatatgctgtacaagatgtaaaatcagatgtactgacacgggcggccaatacggatttagcaggtgcattacaaggaaaagtatcaggtattgacatcactccttcatcgggtatgccgggagcctcttctaaaataaccattcgcggttcccgttctttcacaggagataatacccctttatatgtaattgacggtatgccaattgcttctactgccgatgttagtacatctcttactgacggagcatatggcacagactatgctaatcgtgcagtcgatattgatcctaacgacatcgaaagtattaatatactgaaaggacaggctgcttctgcattatatggaatgagggcctcgaacggtgttattgttatcactactaaaagtggtaaaggagcaaataaagggaaaccaaacatcacttttagcaccaacctttcattcgataagatctcaaccctgccagagttacaacaagaatacgcacaaggctctaaaggagtatttgaccccttatcaccttttgcatggggtcctagaatctcagaattacctaatgatcctaactatggtggaaatactaataatagttacaccaataagtatggtaaacaaccagacaggtattacgttcctcagcttgcagcagccggtatggacccttgggctactccaaaagcatataacaacatgaaagacttcttcgaaactggtgtatcgtggagcaacaatgtgaatgtagcccaaaaatttgataaagggaactactctttctctatgggaaataccactaccaatggtattgttccctcaacaggtatggatagatacaatgtaaaattatcagcagaagcacaactgcaccccaactggactaccggatttaatgggaattttgtgacttcaaagatcacaaaacaatctactgccaacacaagtgtagttgctactgtttacaatgctcctgttagttataatatggcaggcattccttcccatatagaaggtgacctatatactcaaaatacctatcgtagtgattggattgacgatgcttactgggctgtcgataataatcaattttcagaacgttcacaacgcttctttggaaatgcctttgtgaaatactccactaaattcgggaccgacaaccataaactggatattaagtatcaaataggtgacgatgcttatacaactaactattctgaaatttatggatatggaagcacttgggccgctacaggtgaagattcggaatatcactatactgttaatgagctaaactcattactgactgcctcttacacatggaatattaatgatgaatgggcattagacgctttaatcggtaatgaatttgttgataaaaagacaaaatacgaatatgcgtatagcatgaatttcaactttccgggctggaatcacttaaataatgcttctgtattttccaatgaaagtcaatacaataaaaaacgaaccgtaggtaattttgcaaatgtatcagttgcatggaaaaatatgctctacttaagtggaagtatacgtaatgacatcgtttcaagtatgcctcgtaacaatcgttctttcacttatccatcagtctcattaggattcatttttacagaattggcaccgttaaagaacaatatattaactttcggtaaaatacgtgcctcctacgcagaagtaggtatggcaggagattatactcaaagctattactacactcccgcttatggtggcggtttctatatggggaatcctattgtatacccaatagccggagcaatggcttatgtaccatactataaagtatatgatcccaacttaaagccacagaatacaaaatcatacgagataggagctgatcttactttcttcaacggattggtcacattgaattatacttactcccgtcagaatgtaaaggatcagatatttgaagttcctttagccggttcaaccggagcctcaagtatgataatgaacggaggtaagatacatactaatactcatgaagtgaccttgggcatttctccggtagatacaaagaactttaaacttgattttgccttcaacttctccaaaatcgacaattatgttgatgaactggctccaggagtagaaagcattatgttaggaggttttgttactccacaagtacgtgccggaattggtgacaaattccctgtaatctatggaaaaagctatatgcgcaataatgaaggtaagatagttgtagatcaaaacgggctccccatgcaaggagaagatgcggtcatcggaactgtatctcccgatttccgcctggggttcaatactaatattgaattatacaagttccgcatttcagctgtatttgattggaaacaaggcggtcaaatgtattccggtaccgctggcgagatgaactattacggtgtgagtaaattatctggagatatgcgtaaaactgattttattgtagaaaactcagttaaagaaacgggtaaagataccaatggaaatccgatttatgctcctaatgacataaaggtatctgatgctcaatcctatttcacaagaagaaggtctattgacgagtcttatatttatgacaactcttatattaagttacgtgaattatccataagctatccggtcctctccaaaaaatggctaaacgtaaacgtaaatgtctttgcacgtaacatattagtttggtcagaatttaaaggattcgacccagaggcttcacaaggcaatgacaatatgggaggcgcattcgaacgtttctctttacccggaacggccagttatggcttcggatttaatgtaaaattctaattagctaaaaagaaagatgaaaacatatactataattaaaggattttttgccgttggcgttttatcagttgtcctttccggatgttcggaagatgcaatggatagaataaataaagatcatggacacacacaaagcgtggctggaagatttatcctaactgatgtaataacctctaccgcgttttcaaatgcaggaggagacttaaatacttatctatcttcatatattgaatatgaagtaggtgttgacaatcaattgtattatgcagaaaccagagaaagtgaaccgacatcatcttccactttcaataatacatggaacaacctgtactcaacattaaaatccgcccgtatcataattaaccaatgtagtgatggagggatagattacggcaattatacaaccaaaggcatggccgaagtattagcagcctacaactgtgcattaatagcagatatgtttggcgatgctccgtgcagccaagctgccttagttgacgaaaatggttcccccgtttatctaaatcccaaaatggataaacaagaggatatttataaacaagcaatgcaatatctggatgacgctattgcagacttacaacaagaggatttaatagatccatccagtcaagatttactttaccaaggagatgcagaaaaatggctcaaatttgcatatgccctgaaagcacgctatacgatgcacctacttcaaaggtcaactaataaagacgctgatatggagaaagtgttggagtatgtaagcaagtcttttaaaaacacagaagaacaggcagcattcagtgtatatgatgtcaataacataaatccactttatggtttcttcaaagcacgtgcagcattgggagcaagcgaaagcatgagaagcaaactagctgaatataatgacccacgtctgtccagggcattcattacaaaactagacaaagagaaagaaggaaaagcacaagctccggggactcctgatactgatgtatatgcacctagcggaacaccggaacaaggaaccagcaaatatggtacatctctgtttatgtattcagcaacagcccctactcttttaatgagcttccatgagttaaagttcttagaagcagaagctttatgccgattgggacgtgatgcaaaaagcgccttgaaagaggctgtggtagccggattgctaaatgcagagaacagttttagtatttccagaaaagaattgggaaacacattactaaacccagctagcgctatcacggaagaagaagcgaatagctattttgacaacactgtagaagctacatatacgaatgagcctctgaaaactaccatgatacaaaaatattttgcactatggggagcttccggagaagctacagaatcttataatgacctccgtagaatgacagcacctactgaaagtttcattcaattacagaataccaagcctttccccttacgttgtccatatggcaatagtgacacaacgacaaacgcagaagtgaaagctgcttatggaaatggacagtatgtttataacgaaaaagtctggtgggcaggcggtaacagataattcattcatctgcaaacaacaaaaaatcgggtagtgagtaacttttccactacccggtttttcactattcttattttaagacaccaaccatcccttctctcactatatccaccaatatcggtttcaacccactgacgaaacattctactgcgatcaccattaagatcaatcccataagacgcatcattacattattccccgtctctcccaagacactcaccaatttcgtggaagcacggagaataaagaaagtcagcagataaatcagtccgatagttcctatcaaaatccctttcatttcgaagttgtgagcatcatgcatcaaaacaatagcattcgctatcgctccgggaccacacaacattggtatcccgagaggagtaattgaaatatcatcagcataagtttttatttcttcatccttcaacttcatcggcgtgtagcgggcttgaagcatatcaaaaccgattttgaagataatcaccccaccggcaatacgaaatccatcagtagagatcccgaaaaacttaaaaagaaactgaccggcaaaaacaaaaaccattaatgtgacaaacgacacaatggtggcacgttgcacgatagactgacgttccttatccgtcattccatgagtcattgtaagaaagacgggcattgtccccaaaggattggtcaacgtaaagaacgaagtgaaacaaagcaaggcaaacgggagaagtgtactatccatggcagtatcgcatttttatgcatttattaaacacgacaaaaatacgacttaatccataaaatctataataaatctatcaaatctttcaaagaataaatgtgataagtaggctgaaaaggaaatgaggtacgaccggttacattgtaaaaagcctggtgcatccctattccatgtgccccggttatatccgcttcccaactgtcaccaatcatcaatgattcgcgcagttcggactgagtggcggaaagagcaaagttgaatatttcaggccacggcttcagtaccccgagatcttcggaaaggataacctttttaaagtagatgtctacgcctgctgaacgcattttacgtgattgtaattcccgaaaaccgttggacagtatataaagattatatttcggagccagatactccaacacctctttcgcataaggcatcaaaccgcttttggtaggaataattgcgaagaaatcttccgagaacttttcagccaaggtctcatcctccactcctaccgcctgcaaaggataagaaaaacgttgccagttcagttcatccttcgttatcttcccctcaccatattcaatccagagttcggtattccgttgctgataaatcgtataataatgatcgaacgaatcaaaataacgttcgaatgaatatttccgatagacttcttcaaaagtatcgcgagcattacgggaaaaagcccagatagtgtcgtcaagatcaaaaaaaagatttctatatttcatcaacagttacgggggtatatataagaaacaaaaagccaatgtgctaatttcttgcattcaggaatcagcacattggcaattcaaaagaggtgtctaccttattttacctgaataaccaagtatctggatatactccagaattcagtaggattcgtaatcttcaaagtcaactgacctttgtcatctttcaccaattcgtaagaaccggcaggatgagtagtcaacaactcagcacgtttagagtacaacttgatttcttttgttgtacggatatcaatctgagtgaaataatccttgttgaaatcagcgcttttcagcacatcaccactttgaagaatcttctgggctttcagttcggattttgttccgaatacaaaccatgcagcattcaagctcttatcctgttcggcaactgtcttagctttcgcttcgttttcggcaaccagcgtttctttggcagcagatagatcgcttacagcagcatccagttcctgaatacggatattcttggaagccagttcggtttgaagttcttcgatacgttgttgtttagcattcaattcagcagtcagagcggcaaccgcctttttcatctgagcagaattataactgctatttttcaactgagcctgcaatttagcaatctgagctttgttttcctccatctgcttggagatgaattcaatatcagaagcgatttgttgtttggcactagcagaattttcggtaatagtaccgcgctgcaagtctacacgactttcggcagcattgatcttacggaaaccttcctgaacttcattgaaagttcccatcatatcatccagttcagcattgcgctggttcagttccatcaacagagagtcattttcagctttcaggtccttacttccacctttaaagccatcacacgaagccaacatggctgcgcatacaaataaaactgctaactttttcatacgtttacgttttacgtttttaaatgaagttattttaatcgtctattcctgctaatactatcacaatctcgccccgcggttcggtagcggtaaagtgttctatcaattccgccagactgccgcgaaccgtctcctcatggagcttggatatttcacgcgacacggttacctgacgttcagctccgaaatactcggcaaactgagttaatgtcttcaacaatcggtgaggcgattcataaaacaccattgtacgatgttcttctgccaatgccttcaatcgtgtctgccgtcctttcttctgaggcagaaacccctcgaagcaaaacttttcattcggcaatcccgaagctacaagtgccggaacaaaggctgtcgcccccggcaagcactctacttcgataccgttacgtacacattcacgaacgacaagaaatccgggatcggaaattccgggcgttccagcatccgaaattaacgcaactgtttcacctgcctttattctattaacaacactttccaccgttttatgttcattaaatttgtggtgggactgcattgcgttctttatttcaaagtgtttcagcaagataccggaagtgcgcgtgtcctctgccagaatcaagtcgacctctttcagaactttgatagcccgaaaggtcatgtcctccagatttcctaccggcgtaggtactacatacaactttcccatatattttttattacgctgattggttaaaatacttctttaacaactccagaaaatcaattgctgcttcattttcttcgttcatatcggctttcgaggaaagaaatgcaacagcagtcttgtaggagctcatgactgatatttgttcgatcacacgattcatcaagtctgtatctccaccaaacaactcgcgtgagaaacggaatgaatcattcagactgatagattgacgtaaccctccggcggacagtttgatactttctcccaatacggtcggcttactcacctcatcctcaataaatacagactcctctgtcactgattcatcagcaacaggttcttcctcttcctcctcaattgtttcttccacaacaggaggttccggttccgctacaaaagtgtctgattctttatattcttctacgataggagaaggcggcaaactttcacaaacagtatccacatcctgcaagagttcatccaaatgtccctgcatccgtgtaatactccgcttcaacagttcagacaaagtctgagtcgactcctttgagaatgactccatgaggtatttcaactcatgaacatccaactcgatatctgttaatagcttctgtttcatgtccgtctattatttaatatggtgcgaatgtaggaataatttatgcaataacttaaaataatggataatttaacagttcttgcatattaaattatgtactaaaaaacatccccgaatgtacttttcggcaatgcaaaaagatacattcggggatattatccatattatcagaatcgacagtatctattacttatagaaacccagaattttatcaaataaggatgagttttcagcaaaaccgcagaaatactgtgaacaggggccataagcatataaaagcgttggaatccctgtatggtcattcgtaaagaaattcccagttacagttccggttttataatcaccgtccaataaagtcaatcctcccgtctcatgatcagagagtacaagtattaatgtttctccgttttgatcagcatattcgagagctttccccaccaagcggtcaaaagacagatattcgtccaccactgtatacaaatcattagcgtggccgcctttatcaacttttgctccttctatcatggtgaagaaacctttcttacctgccgaaagacgggttatcactgtattgaaagattcttctatcacccgaaaattctttccatagtcatctccttgcaaacagataacacgctggtttaaaggaacctgactcagctggggcaattggttacagactgctatattcttctcccgcaattgcttcgtcaacagactatcgtttgctgcaaaagcctccaccggtgcggctatcaccagatctgcaggcgaagtaagcaaatcttccgctatctcttgccccatgtcccgttccggttgatgagcatagtaagcggaaggagtagctcccgtgattccgtcattactgatgattcctgtctgaactccttttgcggccaaagcttccgttatgttttgtattttattacccagagagtcggtaccgatacggcggttacgggttttctgcccggtagccaatgcagttccagctccagccgaatcagtcgtatagtcatttgtcggattcgttttcaacagtccgatattcttcatttgcatcagattcagcttgccgccattagccgtagccgcagcccacatctgcccttgccccgcaccgccgtcggagataagcacaatgacattcttaggcattttcttgcttccgtcatttttataggtgggttgataaatctcatgaaactttcccctgctggtataaaagttcttcggataacgtttcaggaaatcatccagcaaagcaggatggtcggtattcagatagtccaatcctagtttcataaaagtattccaagccgttttggtatcgggacacccccagaaacgtgccgctttcccttcggcatgagctttatctataaacgcttttaccttgttgtaatcggtttctaccattcttcccaatccgttccattgagtcaatgtccggaaagaagtactcatcatgggtatacgcaggctctgttccggcgtatagatgaatcggggtcttccgtcgaagaaaataaaatctgcgtaattggaaaattcttccggtgaagggagaaagccactgacaaccacccggactgccaaaggattcttctttacatcaaaacaatcccgatattccaatagttgctgttccaacaccttcattgtttccttataatctgttttcaagtcaatcagtagctggaagctctttccgttcgggtaaccggagccgccattcatttcaaattgttccctgatcggattcaaataaagattccggagtttacgggctttattaatttcattctctttatgagccacatacaactctccgtctaccagaaacacatcagcttcgatagaagcacaccgtgtggagtatgcagtataaaaaggtacattctgcaaataatcattatgagaatgtacattctcgactgaagaataaacacgtgattgagccgacaataaacaaaaggccgacacgatccacattcctacgatactatataactttttcattctatctatcatttatcatttgtattccatttctgaggttgaaaccataccatatctgtttcattcaccatgcgtccgattttctcatttgtccatgaaatcagattcgggttgttctgctcgttatccgaatagatatagcgcacgggaatagcacttgataccgatgtaccgaccttcaactccggatacccggtacgccgccaatttgcgaatgcctcaaaaccattcagaaaactatcaatccatgcctgtgtacctatttgtttcaatgcttcattctgagctgtattcaatgccacatccgaacgtgccagatagacgtccacgtcatcagaagaaatagcagcccacttctgcatagaagctctgatacctttggcatattcatcggctgcattccctgttatcatacctcggataatcgcttccgctttcagaaactgaagttcagcaaaagtcatcacgaaagcacggctttcgcttcggatcgtactgctcaatactgaataatcatccttatcaatctcattctgctctgccgcactcagtcccgccggttgcccgcgatagacaaaaggtacagaagcatttgcccgatgtgcttcaaaagaatgctttgtcggagcaacataaaccggtaaacgaggatcatccttggtttgcagagcatctactatggcttcacttacccggaaattatctccgaatataacacccgatccgtcagaaggcaggtttttaggttgtatataccacttgtagaaatcaacggtattgttatacaccagtgttgcctggtcgtcaatagaagtaaagacgggatattcctgtgcattgttgaagatcgcagctatatcggcagacacatctttcttcgccgactggcgcatcaggatacgtacttttaaagaatttgcatatttacgccatttcactgcatctccattaaaaagaatatcgtcactaatagtagcgtcagcctttaatgacttcaatagctgatttgcagtttcaaggtcggcaagcattaatcgatacacttccttctgttcctgataatgcggaaattccaatccgctgacatctccttttccagcttcattatacggaatatcaccatacgcatccgtcatcaatgagagaacatatactttacagatcaatcccaatgccttatactgaggctgattgtttttctctgcaatatcaaggatctgattaatatcctttacactacgcatcggagcattccattcttcgcggaaagaagccccggttatattgaaacgcccaaaactttcgttacttcctccgatatagttaatgtgttggataaactgtccggcagctccattgccactacccgtcattgaagaaacagcagtactgataacagtcggcaaaagaagattggcaggaacagtcgggggattattggggttgacattaatctcttcgaagtcactacaaccacacaccagtagaaatgcggcaagcaacaaagttattttatttcttttcatgatttctgttgtttattagagagttacgttaagattgaatccaaagcttctggtagaaggtaaagacattgtttctatccctttcagttgcccatcgtaagaagcaacttccggatcaatgttggggacatccgtccagataaagagattacgtccgaaagctgatacagagacgtttttcaacggagtattcttcagccatttctttggaagagtatatccgattttcagttcacgcagcttcacgtaagaagcgtcgaaggtggcaatcatatcgttgtcatagtacgcctgcacgtagtttctcaccggtacagccactgtattcttctgtcccgtttccacatcgataccgtctgctacaatcattccggctccgtcagcatcacgccatgccagagattctttcaacgaaccatttctcatcccttcaatataagtacgtgagtaaacagaacctccgtgctgaaatccgaaaagcgcactgaacgtccagttcttatatttgaaatccgtaccaagaccacccgtccaatcaggattcacatttcccaaatatccccagtcaccgttttcttctaccggcaggccgtttttcagttgcagttgtccgtctttgtataccagataatcaccgtaaagagaaccataagaaccatcgcccttagtgttttcagtacgtaattccagagaggcccaccgttcaatttggcgaatacgtgagattcctttatcttccgccaaagcaactactttgttcttattcttggagaagttgaagttcaagctccattcaaggtctttggtacgcacaggaaccacgttgaccattaactctattccctgattagtcatctttccaacattcatcagtttcgtatcatatccggcagacggattcagcgtgatcggaataatcaaatcagtagtaatacttttatagtaagccacatcgatccctacgcggctattgaaaaagcgaaaatcaccaccaaactcgtaggatactactttctccggtttgatatccgggtttggatagttattattggcagttgcagtagagttacctccccacccttgagaaatgataaagttggaagccgtctgataaggttccaaatcccgacgtaccatagaggtacttgttcttactttggcaaatgtcaggatattgctccttatatcgaacaagtctgtcagcacagcactcagagaagccgaaggatagaaataagaattatttttcttgggcaacgcgcttgaccaatcgtttcttcctgtcagatcaagaaacaatccgttcaaatagctgaactgtgccgttacatacaaactgttcaccttcttctgtgtaagagaattacccgcaagaatcggtttagcattatttgtcaggttgtataccccgggaatagtcagttccggtgcaatggcccccagtcgcttggatatctggttcatcatatttcctccggcagaaatactgaacccgaagtttcttacagcctcatccggcagacggtaactcaacagaaagtcattgtttatttccataaaagaaacgtcatcttcctgataataaccgttgaagaaagattgtgaagttacggcatgacgcatcgttctcttgtccgaatatacatcaagccccgaacggatttgtaaagacagccccttgagaatatcatatttcaaacgaagatttccgtagacacgatcgcgggtatttccgttgagattattgtagaccacaaaataagggttgttgattcctgtagacgtttcatcaccgataggtgtattctgggctacattttcttttccatcacgccactgctgctgcaaggaattcagactgacatttcgcggcattttcaagaaaatagccatgatgttgtcagcgttcttcgctcccgtacttgcccggttgtcgctgttggtatgtacatagttcatagtcacatcggcacgcaactgtggaatgatctgatatccggcagacaaacctatcgtattcttcgccagcccggtattagggacaatacccttctgctgattattagtatacgtcaagcgataattcagtttatcgttcgagttactcagcgtgattgtattagatatattatgtcccgtctgaaggaaatcttccaattgattacctccggacacaaaagggattgcaatccggtttccgttatcatccaacggagagtcaaactgagtaataagctgcccgttcattgcggggccccagttggctacgtccttatcgttcacaccacctccggcaccgtcaacataagcgtattttccttccagcccctggccgaaactgttctgaaattccggaagccgaagggcagtctcaaaagaaacggtagagctatatgtcactccaagtcctttttgccctttcccgcttttggtggtaatcagaatcactccgttagcggcacgtgcaccgtaaagagccgaagcgttcggacctttcagaatagaaacactctcaatatcttcctgatttatctctccggcagcgtttccgtagtctacttcagcttcacctgatgtaaaattaggattattgtagtcctggcgtccggtgaaacttcgagtagactgctcattgttattactaataggcacaccgtctaccacaaataaaggagagttgttatagttgtatccgcccacgaagttttgaccacgtatctgaatactcgaagaagctccgatgccaccagaagaattcgtaatctgcacacctgcaatacggttgctcaacgcgttcacaaaattggattcgtgcgcttgcaccactccgtcacctcccaacttctgtaccgaatatcccaatgatttagcctcgcgggtgatacccagggcagtaaccacgacttccccaagcactttggtatcctcttccattatcagactgacaatctctttttccggtttaaacacaacctttttgaaccctacacaagcagcctccagttcgcctatcttgttcataatcttcaatacgaagttaccattgacatccgttatggtaccattagttgttcctttctcaataatagtagctccgataacgggttctccgttcggcgttttaatcgtacctttcaccttttcaacaggcacagggggatttgccattgcagcagccacactgcacaacagcatcaacaaacaaacttttaccttaaacattgttttcatttaattatattaataaataaatcctgatttacggctgcaaaagtatcggagcggatttacaaaagcgagacaagaaagttacaatgccaacactattttatttcaaaaaagttatgctacctttgtacacacatttatttaatcaaggaagcacgaaatcatatcatggtattattctcagaagatcatatacaagagactaaaagaagaggtagaatcgaaattatctgcggctccatgttttccggaaagacggaggaactaattcgtagaatgaaaagagccaagtttgcccgccaacgtgtggagatattcaaaccagctatcgacacccgttattcggaagaagatgtggtttcacacgatagtcactctatcgcttctactcctatcgactcatcggcaagtatcctgctattcacttccgaaatagatgtagtgggtattgacgaagctcagtttttcgacagcggactaattgatatctgcaaccagcttgccaataatggtgtacgtgtcatcatcgccggactggatatggacttcaaagggaaccctttcggaccaatgcctcagttatgcgccattgcagacgaagtatcaaaagtgcacgctatctgtgtgaaatgcggacagttggcttctttctcgcatcgcacggtgaagaatgacaaacaggttcttttgggagaaacagcagaatatgagcctctctgcagggagtgttatctccgtgcgctcgaagaggacggacaaaaaatataaactaacaattacatatatggaaaggaaaaaaataacattcgacagttttatacgtggtgccatcggatgtgtattggtggtaggaatattaatgctggtggaacgactgagcggagtgttattgcccttctttattgcgtggctgatcgcttacatggtttatccgctggtcaaattcttccaatacaagctgaagttgaaaagtcgtatcgtctctatcctctgtgcattattcctgattacagttgtcggagtatccttattttatctgttagtaccgccaatgatttcggaaatcagcagaatgaatgacttgctcgtgacttacctcaccaacggtgccggcaacaacgtccctcaaaatctttccgagtttatccatgagaatatcgaccttcaagcgctcaaccgtatattaagcgaggagaatattcttgcagctatcaaggataccgtgcccaggatgtgggctttgcttgcagaatctctcaatattctatttagcattcttgcgtcctttattatcttattatatgttatttttatattgctggattatgaagcaatagccgaagggtggttgcacctgcttccgaacaagtaccgtacatttgcctccaatctggttcatgacgtgcaggacggtatgaacagatattttcgtggtcaagctttggtggcattttgcgtaggtatcctgttcagcataggtttcctcattattgattttccaatggctatcgctctgggacttttcatcggtgctctcaacatggttccttatctgcaaatcataggtttccttcccactgtattgctagctatcctcaaagcagcggatacgggacagaatttctggattatcattgcgtgcgcattagctgtctttgctatcgtacaaattatacaggatacttttctcgtccccaaaattatgggaaagattaccggcctaaatcctgccattatccttttatcactttctatctggggctcattaatgggaatgttgggaatgattattgctttaccgttaacaactttaatgctctcttactaccaacgctttattatcaacaaagaaaagataaaatatgatgaagtagaaacaactgataatcaagaaacaagcagtaaaaaggaaaaataattggaacttttttccacgaaacgcttgcaaattaaataaaagtcactacctttgcacccgcaatcaggaaataactgatttgcaaataaggattgattcgctagctcagcaggtagagcacaacacttttaatgttggggtcctgggttcgagccccaggcggatcacttaggagaaatgaaaatactccgacaaactaagacaaagctctttaaaccagtggtttaaggagcttttttcttactcgcctacgacagaaaaaagacctcaaaaagccaccctgtgaagattaatcgttactaattcgttacggttttccgttacgataaaaaccgtaacgaatttataggtaagtcgctcatttgtcgaatattggcagtcgaaagtcatagccgttacggaatgaacaaattaactttgcaacaagaaaggagttacggtatgaaatcgacattcaaaacactcttctatttaaagaagaacgaaccgaagaaaaacggtcatgtagtaattatggtgcgcattacggtggacggtgatcaggtgcaattcagcagcaagctggacatacaccccgacaattgggacacgaaagcgggaagagccgtcatcaacaaacagagtgcggacaagaaagaaaacctcagggtatcctcacttaacaagacactggacgagatacgttcggccatcaccatgcactacacacgcatgatgaacgtggacggttacgcactgccggaaaaaatcaggaacgcattcctgggattggaggaaaaggagaaaacgctcatcagctacttcacccagcacaatgaacagtatgcaaagaaggtcggcaagactgccacgcaaaagacctattcccgctacgaactgaccaagcagcggatgatagagttcttgcagaaggaatacaagttgtcggacattcccgtgaaggaaatcaccgttacccacatcgagaacttctacctttatttgcgtcaggaatgtgaggtaagcaacaacaccgccatgaaatttgtacaacgtttccatacgatactgttgttcgcccagaaaagcggattgagctttatcgatccattcgggaatttcaagttcaattttgacaagaccgacagagggtatctcacgcaggaggaaatcgacacgatctattacaaggagttcaagtcaaagcggttggaacacgtgcgtgatgctttcatcttcagctgttataccggtttgccttactgtgacatctatacgctttcaagtgaggacataaagatcggtgtggacggcaagaagtggattatgaaagacaggggtaaaaccggagtggagtcattcattcccctactgcaaataccgttggatattctcgccaaatatgagggcaagttgaaaaacggaaaactgcttccggtaatcagtaaccagaagatgaatgaatatttggcggagatagccgctatttgccagatcaacaagcggatcacctaccatcttgcccggcattcgtttgcgacggaaatctgccttaccaaaggcgttcccattgagagcgtgtccaagatgctcggacacaccaacattcagaccacacagatttatgcccgtgtggtggacagaaagttgagccatgacatgaatatgctggatcgaaaacttaaaagtatgcaaaaaggtacgacgcaaaacgctgtatgaataaacaaatcattatattgtcacaccatttaaaaacaacgccttatggaaaatagaggatacatcaccatcaccggtttggaaaacaaggatgaacaacccatcgtcagtgtaaagatagagaacggcaacgtatggatgaccaagcacgaacttgcccgtctgttcggagtgttcgtacagacaatagacgccaatgtgcgctccatcttcaaatcccgcctgctttatgacggcgacgtgaccataaccgagaagcaggacaaaagcatcgttacctattataatctggaagcgatcatatttctcagtttccgcatcaacacctattgcacgaaactgttccgtgaatgggtactcaactccctgtgcgagtacaaacgcctgcaagagaaaaagcccgaagttcttgtcgttttcaatcccggcagcaaccggacaaccatttcttataactgatatgcatagaagcctgtaaatagcgagccttgcccgaaaatccgacgggcaaggcttttttttctcctgaaaatcctatctttacaccaaataacagtgtcatgatagaaaaccttaccatatccatatccttcagcgaagtagaggaagcccatgtcggcaactatttccacctttccgaaatgtccggcgagtttctgattatccagaaacccgacaataccttctacttcctttgttccaatgattgtgacatcgtgggcatctgccaatcctttgattggtatattgtatcaaaagacgcttttaatgaccgcctgataatcggcattggtttgtcggataaagaaagcatcaacggagaactctatcgtgtacaggatgaaaccacgctcatcctttggcgtgacatactccgctttactttcgagagcgatttcgtgcgccagttcttcccgtacaatactcacttcaaaggcaagatgcgtatcgacggagcactatgtttctatattcacgattattacccgaccagatgcaaggacatatcggtattcgacagaaagacgagtaatctggtatttagatttaaggaaggccgacaagcagcccttgtcgccaagatcttctcgctttgtatcgctcggatgccgttctttaaagagaaagccgccaacgccgtgctgatccccataccggcggcaacccgtgaacggaacatcgcccgttttgcccgtttttgcagccttctctcacatcggcttaaagttgtggacggttttcgtgccacatggataaaagaagaccgtgagcagatgaaaggaactcacggacaagacaagttatccaacttgatctttcatcccgattattttaaaggccgggacgtatttttaatagatgacattatctcttccggcgagaatttcacgcaaatgaaacgcaaactgatacaactcggcgcaaaatccgttaccggtttgtttttaggtaaaacagtaaaatctgaaaatcaaaagtaatatggcaatcaagaaatcccagatcgaaaaatggatagtcgcccaaaagaaacaccggctatcggatacccatgtacaaatggcacgtgaacttggactcaaccccgacaaactcggcaagatagacaaccaccggcaagagtcgtggaaagcccccttaccagaatttatagaagagatcttctataaacgtttcaaaaaggaacatcctgatatagtcaagcccctgaaacaaatacttaaaaaacaggaaataaaggataaagaaaaaaagaaggaaaaagaaaaacggcgtaaagagcatgaacaggaacagatgaataacggaacggatgaagttcttccattctaatcctcaaccccgatagcggaataaaaaccgcatcattatcggtagaaagaacgttcccatttctccgaaaccggagcgatctttcatccatacaaaatcgtagaaaagtgttgtacaagcaagcgtgatgaatcacattgcccggtacaacacctttcttttttccgtttttgaaataggaaggcttttattattatctgtatatttttactctctgatttcctcaaaggcaatatctatcgcatcatagtaatcaccgtcattaacgctcaacgcagcaacaaggctgttcaatgtccgaactgcgtccaaacgcttttccgtatcattttcatccggattactcaagacatctatcgcacaggtcaaatgccctttcatctcttgcaatgtagataaactctgaatgggaaacagatagaaaagcccatcttctgaagaccggactattcctttcaggggagtcgattgtaaatccataacaataaggttattatattaaattgacgtaacgctgccagtcacaagtccaaagcatcgccaaacgctcaatacagagtgaaccgacaggttacgtcaaagtataacctatccggttcatttacctctgtatttttgaaattggcgatttctggactacggtaaacgaacacattacacgatgctatttgcatcgctaacacaaaggtagaaattttttcgtattaatcaccgctttatgcataaaggatttataacacaacgattctaagcaaagtttaaggctaacttccttcggggtatttctcttactgttttcagtagccatcactccacatttaaaacaaaggaacgaattaaactaacttattcaagtgcaaaggtacttcgggttcttaacggaaaaacaaggtcaagccgttccggttttgaaaaaaatcttccctgcgccataaatggcacgaggtattttttccaaaaaccttgtttttcctgaaccctaccttttgacgcacatgaaataagtcagctcaactcgtcaatgcataaaaaaaatgtcgtgattatgaaaacagcaagagaaatacataacggaaataagaacagactcaatctgcctctgcataaattgtttggctggtcggttcggctcattctttcaggcttctgttggagtttgtacggtggcagtcttttggcgtggtttatcggtctgtggctcgtaaaagaactgataacggacgtgatccgcttcgcatggggttgtctggtttccattctttcctttgctgtcgtagtcgggattatcatttggttattaatactttaatacacacagttatgacaatggatattacaaaatcagtagcgttcaccggacaccgttcagagcgtatcctccaagtccgtatgctgtatctttatctggatatagtttcgcaagtgaaaaggttgtatagtctgggctatcgttactttctaagcggaatggcggaaggctttgatttgcttgcagcccaagcggtagccgacctcaaaatggaatacacggatattcggctcattgccgttgtgccgttccgccggcagtcagacagataccgtccggagaacaagtccttatacgaccggataatgaaaactgccgatgaaacggtcattctcagggaagattactgcaaagggtgcttccatcacaggaacgactacctgattgacaactccgaaatcgtcctggcctattgggacaagcagccctatggcggtacttattataccgtaggaaaggcacggatgatgaacagaaacattataaacctttataaataaagccttatgaaacgatatagcaggactgtcgcacaacagtgcagatattacgaggtaaacaatattttcgagtatatggtggaaacctaccagaacggcaacatcaccacttttggagaactttaccgggaattgtgtaaagaggcgagaaaagattttatcgactttcttctcagtgaggtagaaccgatatactggagagagattttaaagatgactgtctaatgaataaatcaggaaaatatgaatgtaacatttgaaaccgtaatttgtgcatgggatgagaaaatccctgcactccttatccgactggtaaatacccttctcttttgccggacggaagaggaactccgccaatccatcgacaaacttcgggaaacgaccgaactggatgaatttttcacctacggctatggctcacaccatttctggtgcaaccagcgcatttccaaaggaagcgtgcagttcatccaaagccggttattcattgcgacattttaatcctctaatacataaatgacatgaagccaatatttcaaatgacacgagaagagaaattgcaggagattgtagaatacagtccttgcagggtggaacgcagcacagtcctccggtacttgttggcactacgccgcaatgacacggaacaaatcgcctacttcgaaagtttcggcaagagtgtacgacatatcatactcaatgtacgcacgtatgaaagagggctgattttcggctatgtcggcaagcggttcaacgaacacggttggattaatggtatgttaccgatagttgaagaaatcaaattggatacttccaacacgatccatatcgggcaatccgttgacgggacgtatgcggtatccatcgactggtgtaccggcacagccggaggcggcagccacccgtccgtttgggatgagcctgtcagagattataaggaagctgtccggcaaggcatccgcctgttggaacgacaatacaacaaagcggaatgttggtctgtttccgacagaagcaattacaacccgaaggttatccgcagtttgaaagaaaaactgttggaactcaagcggaaatacacacagccccgacagttaagcctgttttaatattcacaaactataaaatcataagttatggcaacaaaaatgaacgagaacggagtttcaacctgcaaggcgggtgagaaatatgaaaaattccaaatgaccgtaagacggaaaagccgcacgttttaccattatgattacagggacacggcagacaacgaacttttctcctgtgtgaagcccacattggaagagtgcagacagaaacgtgatgaatggttgattcaaaaacaaagaaagtatatgacagaacaataaatatctgaaaaacaagatataataatatgtaataagattgagagagagttattaaccatttgcaccaaagaactctccttgccggttgtctgcaaggagagttcacatgtcatagttttattccttttcttttgatttgtctgaccggtgaaaagttgaactctttcagccttttgtcaaaggaaaccgccacatctttcattacccccttcggagtccaaatttccttaacaggcaaagccttcccgtcatacagtttttttatctgcccgacagagaactttgtgcccgtgcattgttccattttgtgattgagagaatatacgttacagctgtttctgacaatatcgggaatcagttccggttgctttttcaatagttccggataccaattttccgcttgaaggcagatttccgcacttcttttatcgggtgggatgttcagaaaactttccggtacatttttgtccattcccgcaagatatgctttttcagtcttcagatcataccttatgcttttcaactgcaatgccgaattataggtatcggcggcagcctgacagaccattttttccgtctgcaggtgtaccggcacagacgaaattgcatagccgtccctgcttacagcatattccgccatccggtcatctataatgttccaccggacagaacgcatcaaatccgaacatctccatttcccttcaagtaatttcataatctccagacaaatgtcgggataaggaacatagggcaacagcacagccggatcgtgctttacttttgataatgcggtacggcagatttccggtgttctcatgccttcaggcacatattccagagcctttccgttccgtctgaccatctcctcatatacctccaaaggtatgtcgtctttcggcagtgcctcccggagataccggtcatcttccagaatcaacggcaaaaagcacttcagtaccccacaaggcatatcatgtatggaatcgggtttgtttgtcagagccataccgacaatctcgtaggagaacatttcttccggtacatgacgcacattggcactgtcggcattgacagcgtgccagcatacattctcagttttacgttccggaggaagatcccgaaaatatccgggattttcctgtactgattttatatccgcatcttcctgtttcctatccatgcccgttcattaaaggttttatcaattttctcatgtcatcagccatccggctctcttcatatttggaacggttcagattctcaaacacaatctgtcttgggaggacttcccaacaaaagtaacttgatccgaaataggcagcgttcttttccgtaaactggatacgtttgtcgaacaacaacatctgcatctccttttcttggaacaagtgaaccggtgcactgctgttcagccaaagattggaaagcagtaacgcaaacggcttgccgagtgcaaggcagcgttccacaaccttctgtttgatactgaacggaggattggaaacaatcagatcccactcttccggctcgtaaacgaagaagtcctcaccggtaaggatatgggagtgaaccactctgataccggcggctttcagcgcaagcacgtactcactatgctctgtatcaaatggacaccagactattttatttccgggtatatatttgattataggagccaccgcataagccggagtatactgctcgtcgctgctttttttcggggtatatccggcataaatcattcggtatcctccttttcatcttcctcttcattattaaaggcaaaagacttttgtacaacctgaccgaaggaatcaagaatgtaaatatctattttctgctggtctgtgtcaagtgatttgtaatagagtctgaacgtttcttccggtaacggatacaggtcgtttggcaatagcaccgtaccgtcctccatgcgaagttcccctttgcctgtcggttggaagtacctgatgaagtatttggtgtcctgatactcgccgcttcttacaagctgacaacggatttccgcttcctcgccctttacgattgtcgtctgcaccggcaaggtcgccagatcaaactcatatacctgctgaacgtccaatttgtcagaacaggcggttacacatatcataccgacaagcatgaatgtaacaataaacaatgtttctatcatctttttcatacacattaaaaatttaatcgtttaaaacagtactatttctgatgcgttccgctacggcacgtaccaccggtacgctcacggcattgccgagcatcgcataccggttggctcgtgagatttccctcacttccccgttgataattccgtatctggtaaaatcatcgggaaagccttgcaagcgttcgcactccacttccgtcagcatacggattcgggatttctgttcttcgttcggctgtccgtcaaaagtttcccccggttgcaggtttatcagataattgccgaaattgggctgtttgtaatagttacgtgttatcgttccgcaggtatgggaatgaaccgtgtctttcctgcacggatgattccctccacccggcgccgggaaaggaaatacatctccggtacaccggtctgcaacacgtccgacaaggtagattctctctctgttctggggtagaaaccatgccgtattaaacagttgccattcaagtcgataaccgccaatgtcggcaaacgctttgataatgctccaaaaatctgatcgatgctttgcgaagaagactcccttaacattctcccagataaaaacgtcaggtctgaatctcccgacggcttcgacagcatacctgacaagggaacttgcctctccacgcagcccgctgccgtcgccgactgaactaaaattctggcaagggcttccgaaagtgatgatgtcgggatgtccgatttccgctgttccgatttctgtaaccgatccgatatgttccgcataaggaaaattgtatttgaaattggcgattgcatttttttctatctccgagaaatatactttctcaaacgagtatccggcagcctgcaatcctttactaaagccgccaatacccgaaaataattccaaaagaaccatgccctaatcaattatgaatttgacgcccaccccgaactggaaatgaaagtgtccgctgtcatttccccagaggcaacgctcacgggcatggaacagcaataccacctggttggcaaggtaggtttctatctccagcgataccgcaccgccataaacaaacgcatccccggcacacaggcgtgagccgtcgaacaacgtacttgtgccccaattcacggtttcatatcctgccagcaccgaaccgccggcatagcagagaaacaccttgttggcatccgaaaggaaattataataatagccgccttccgcagtgaattgggaaaccgggacacgtatgtccttgtatggataatacttctggagatactcgcccccgaatacccacttatggcagccgttcacatatctgtccgttcccagtccgaaatggtaacccaattcgttacgtttgtccgcagtgtgaaaaccgtccgtcataccggcggtaatacgcagcccttttgtaccgggcaggcaacgttgggcatgtgccttgtccgtcaggacaaagcacaaaaacatacatataataacagatacccttttcatactatttcaccttcagctcgttaatgactctggcacggatcagctcggcattggtcagaataaaccgctgatgccttcccccgttctgctcgttcatctcgacaaccagctgcttgtcatccggaagggtgaatttgggcagggtaaataccgtccgttccttgctttttccatcaaccgccgttacatagttgaaggcacgaagcggcacgataacctgttcctgaatggcggtacgttttgcaacctttttgtccaccaccttaaaagtaacgaaatcaacggagaacggcacgttggaagcgtttttcagttccgtatggaaataaagcagaccgttgtgcgtataaatccccttcaggatatactggatgccgaagcgcttgcagccgatatgcttcaccagacgtttgttgttgtcatagacggacttcatgatcagccgtaccagcagcggggactcgctgccgagttccgtaaggtagatttcctgagagttgttcggccggttcaccgcctcgccatcatggatgaagtctttcatctcgatattcagcttggtcggctcgtccgcatacttcacattgaatgtataatagctgccgtcatccgtgatcaccgccagattcgtttcacgggagaagtccctcaacgccgctttcacccgaagcacgttctccgaaccgtccgctttaccggcaagaatgtccgccgatcccagatccacatacttgatagcagccgggaagataaggtgtaccgttttattgaatgtcacctccaaagcgtatggaggaaccatccggtcgaatgccaccgggcgtgtcagcccgtcaaacagatcaccggtggacggactgcgccttgcgtcctccttatccggcagcggcgtggtttccgtttctccggaatccgccgtttcttccgtgtcatttcccgtcttttccactttcacggtcttttgtgcatacgcaccggtcataccaatggcaaaagccatcattaaaattacttttttcatgcttgttgttttttcttgattgataaattgattttaaccgtttattgtcttgacacgagcagtagctcgtaatccgccttcaaagtcgccttggcagtcctgaactttgtggaaaggtattgcgatgcgccctgtatcacccctttgcccaagtccgcagccaactgtgcgccggcattggtggagatgttgatgctgcttcccattgccgagcccatgttggccgccatctccttgacggcggtaagctcctgcgatcccctgacttcaatgcccttcatgcccctcgtgtcataagcgtccagctccaccggcaggattgttccctgaaaggcaatcgaagaaacggtgatttccatgcgctcaccgctgattttcgccgtgccggtcagtatcgtgttggcgggtatgtacaactccccggcctgcaccggctccagcaggcgcagacccacctcctgaccgtcgcttcccgaaaccgttaccgtcctgtacacgcaggcacggataccgttcctttccgtacggttccggactgtccccaccgtgtggaaacccatgtttctgggtttgccgtactgtctggcaaactcttcatcggacaggggtgcggccagcaggctgaccacccgttccgttacctgcgtaaccgggcagaccggcgttttacccgtagaggaggacacggcgacctgtttggtttcaccgccgcccggcatgtaccttgccgccatctcgtaggacttctccatcagccgcagttgctcctcgctgttttctctggccttgcgctcttcctccgcctgacgctccagctcctgaatgcgccattccagttccagtgttttctgatcgtcttccgcaggccgtgtttcataaaaactgtccaactgccggttgatgtcctgataggcattggccgaggaacggatagacggactgccgttgtccgtgtcctcttccgtcaggaatacttcgtccgctgccggctcttcctgttccagtgataccgccagatcctgaagcgtgttcattttctccttttgtttcttttcaaaggcactttgttcgtaggcggtctttttatccgacagcagccccttgtcctccggcatcggaacatccacgttgaatccctcccttaatggctcgtcgctgtccgaaggagcgaatatcagccacattgctcccagaaacacgagaaagaacaacggatacacgagcatcttcttccgcttgagcatctcttccggagtcagaggtctggcctctttcttcccctgtttcggcgtttgtcctttctcttccgccttttcaggcgttgcagcgttcgccggttgccgttcctgattttttaggttctccataatccacttggtttttaatgtttatactatccttgtttatccccctgtacagctccatccgcctgatatgctccatttgcaactgctccccctcatgcctgccgatgcggtatatcgaagataccgtcatgtatatcgacagacagccgaagccggtgagcatgaccaccacgcagacgagccgtacatcgggcgacatccgtccgcacagatagcggagtccgtcgtctatcctgtcaggcacgtacctgatccattttttcaatcggttcatttcctgtcttttttaagttatcgttcaatggttctcaaatcccggttctccacgatattgaactgctccatcgtgaagccgtgcgggttattgtccgacctgaccgagttcaacagccggcaacgggttacaaggctccgttccgtgatgttgcttgacctgaccagcgactgccgtgcgtaggtcgttaccacatacgggtagctgttgaagtcgcacgccacgctgtccacccggatgctctggttgatattggccgagattatacggttgtaataccccttttcctcccagtccttgtagtagcggaacgcactctcgtcgcacaggaacaacgccctgcggatattcgactcgatagccgccttgtcgggcgacaaggtgaaaaacagctcgtgaaaacgccggatatgttctttcgcctccaccggcctgttctgcgaaaggtcttgggaaagagcaagtatcagggacttcccattgtccagcacatagattttctccctctgccgttcggcgaaccggtaggaactccagagagcatagccggtaaccagagcacagagcgaaacgaacacgatacccatcgtgcggatttgccggaagctcgtttctatattcttcaaactcttaaattccatatgtttataagattttatattgggttatctgcctcttaacttgccggctacatggccgacggctgcaccggaaacagcggcagccgcacgtccgcccttcaatgaccacgagttgacctgcttgccgtagttgccggctcccgatgcctgaatcacccatgtggatactgtcggaatggtgaaataccccacaatggctatcagcatgaagatgatgtaagcggaattgttcacgtcgggcacataggcgggatcgctcagtgcggcgatgtccttttcgatcatcagtacctgaatccttgccagcacggagctgaacaggtcggatatgggcagccacagatagatgctgatatactggcaaatccattggatcatcgtattgtggaagccgtcgtacaccgatatggcgaacgacaggggccccagaatgctcaatacgatcaggaagaaggttctcagcgtgtccagtaccagcgaaaccgactggaacagcagttccagaaagctgcggagaaaattgttcacgccctgcctggcctggtatttgaagcgttccgccgccatgcccgccatcgctttcaagtccgaaggcgaccatcccagatcctcgatctggcgttcatattcctcgttgtcgaccagatacgccgtttccggattccttgtcatcgcctcgtattccagcttctgccgcttctcggaatactcccgtatgttcagcgtctggccttccattatatcgtggcagccggtaaccacaggactcatgatgccgttgagagttcccagaacgaatgtggggaagaacatgatgcacgcacccagacaaaaaggtctgaagagcgggtaaatgtcaatcggctcggctctcgaaagagcctgccacacccgtgaggccacatagaacagtgcacccagtgcggccactccggtagccacacccgtgatgtccgaacagagcggcatcatctcgtcataaaggttgcgcaacacttcgtgaaggttgctgaaagtttcctcgcccgtcatgtcaccagtatttttgattgtccgttccgtacaagtccagcacccttcgggtatcgttcttcttttttgcacgcaggtaagagatgccgatgttccggttcgtgtaatacctgaccagattgcgttggtttcttacgtcacggtacacacggtcgatcacgtccatgcgctccttatccgtcatggaaaggctggtggaggttacgaccgtcttcatctcgttcagcataccgctgctctcttccagcatcttcgcatatccggaagcgattgccgaaagctcgtccggcgtatagttctcgtccgtcagcattttctggaaagagtttacatagatgtccgatatttcaccgaccagaagaacggtctgctgtaccttgcgggcatccttaaccagattgttgaccgctttcaatgcgtcgtaataacgcttcccctgttcgtagatcttgactgtttcctgaaaattcttcaccatattttctgccgtcgtcgtggtctgcaccacattgcgggttgtattcacgatgctttgtgcaaagttcgagggatcgaacgtcacccattgtgcctttactgccataatcgggcaaagaagcccggccaggcagacagccataattcgtttcatgtcttttaaaattttaatgttgaataaatcggatagttgttactgtcatttacgggagaaccggggttctccattttccctatgagtcatccgcacgtacatagatcccttcggtagccagcaccagccggtcttccttccggtcataagcgagctgcaccctccccagcaggtctgcccagatgatgccgccgctttggtggatcgtgcctaccaccaccgcatcaaggtggtaggtcagggcaatcttgtatgcgccaccgtcacggaatacggtaacgggcggcgacttgcggttgcttttccactccccgcatatccagtagagcggaaacaaggtttcatactccataggcatttacggtatttcattgctttgattccgtttcttttccgcaagccttcggatagccagttcgatattgccgtccagctgtttcgccagttgttccacttccaccttctcgctctcttcggtcgtgtagcacagatattcttcgggcgatacctccgtggcgtacaccgttgactgtacgccccccaatccgaaccagacctccttgtatttgcgtttcgggtcattggacatgttcaccgacaggatctgcgccttttccttgtccgtcagtcccagcagggactgtatctgcgagaacttgttaaggtacttcctctggtcaagcagaatcttgcagtcgctgttgttcactatagactcctttacgataggcgaggaaatgatgtcatcgacttcctgcgtcaccacaacagcctctccgtaaaatttgcggacagtcttgaaaagatagcggatgtagtccgccatcccttccttggcgatagccttccacgcttcctctatgatgatcatcttgcgcacccctttcagacggcgcatcttgttgataaacaactccatgatgatgatagtcgttaccgggaaaagaatggggtggtctttgatctgatcgatttcgaatacgataaaccgtttgccgagcaggtcgagttgcttgtcggagttaagcaggaaatcatattctccgccacggtaataaggctccagcacgttcaggaaacccgcaaggtcgaaatccttttcccggactcccttctcttccagtatcttccggtagtccgttttcacgaactcgtagaaggtgttgaacgagggaacgatgctttcatcctccttgatgcgcctgatatacagggccaccgcattggacagcgccacttcttccgaacgtgtcgccggttcgttgtcctttttccagagtgtgaggatcagtgtcttgatactctctcgtttctcaatgtcgaaaaccttatcatccgtgaaaaaagggttgaacgctatcgggttttcgtccgtataagtgaaatagatgccgtccttgccgccggttttctggtgtatcagcgagcaaagtccctgatagctgttccccgtgtcgatcaataccacgtgtgtgccctgttcataatactgcctcgctaaatgattcatgaagaatgacttgccgctaccggagccgcccaatacgaatttatttcggttcgtggttacgccacgtttcatcggcaggtcggagatgtccacgtgcagcggttttccgctgatacggtctgacatcttcagtccgaaaggtgaaacggagctgcggtagttcgtttcttccacccagaagcagagagcctgttcgatgaacgtatagaagctctcctctgccgggaagtcagcgccgtttcccggcattgccgcccagtacagcgtggcggcgtccactgtattatggcgtggcttgcactccatcatggcgatctgactgcccacgtcattgcgcatgttcttcacctccatcgggttgtccgtccatgcgatgacgttgcagtgggcacgtaccgaggtaagcccgaaagagtgtgcgtcattcaggtacaggtcaatccactccttgttgatctggttgctccgtgagtacttcgagagcgactgcatgttgcgtgcgctcttttcaaaacgttgcaggttctcgccgctgtcatccaaaaagatatactggttgtacaggtggttgcacgagagcagcaggcctaccggactggcgaatgacagcttgcagtcgcttttgtccgttgacagcctttcataccggcagtccgtacccaccttgttgggcaacgcatccagttccgatagcgtatgtaccgatacgtgcttgtcgccgacacgcaggccgtcatctccgagttcgatgtcttccagcgcagtggtattttccattgacagacagaaatatttctccaccagtccggccttatcctccgtgcccgtaatctcatcaccgacgagccgtcttaggtgcaccagccctgtatcgttcacgatacgggcgaattgtcccaccgtatccagaaaatgggcggtggtatccttgtccacctccttggggatgatgaatcccctgcacagcgaagagaagctgctctgcatcctcatgcgttctttcgtcgtcttggtcaggtacagatagcatttatggttcaggaaaggacgttcgttgaagtgcatctcgtagctccgggaaaggaaacttagattttccttgtccgtctggctgcggtaatcctcccggataaaccagtcctgtttatgtaccaccgtataattgggcaataccttgattgcctttgcccatgccgcatggatagcctcgtattcagctgccgttaccgtgaagagttcgggcagctccacctcaaagacggcggtgatgtccgcatctttggagatgatacagtccgcttcgacggcgagaagcgggaacttgctttccaatgtggcggcctttagtgtgttccgcatacattcttctttttaatcgtgaataattttcggggactgatccggttgatcaggtagcgggggtgctgttttctggccagcagcttcatcagtccgtgttctccgaacttgccgttcaggtggaatgtcagccagaccagtgcggatgcggaggttacaccgaaagcgatgcagagccattggctgacaccggccatatagagaatgacaaacagcacgaacagagccagcagcccgccggcgaaaataaaaaggtattgcgccttgagtcccttgaactccgcactctcgccgatccccttgttcagttcatagtccatatacattattatatataggcgaatctgtcctttagaggaagaacgaacgcaggatagtggcggcgacaatcagaaagatgcacgcaccgaaccaggaggatgccaccttgcttacgtccggatcgccggaactgaacttattgtacactttaatcccgccgaccaagccgatcacggctccgattgcgtagcacagcttcgttcccggatcaaagtagcttgttaccattttcgtcgcctctgcgataccggccgagccgtttccctgcgcatggagcgagcctgtggcgattagcatgaccgccactaatacaagttgtttcgtgttcataaaataaatggatttgaatgagggacacgacggagggaagagtccgccgtatccggttgttaattaaatttgtctggatttctactggtaagaatgaaccgtcagctatccgtaatctctttttttcatgtacgttttactttattcgttagacaatatcgcttatggagaaagtgtccggtatggtttctgccgccggttcgctgtccggctgtttacgcttgcggtatgccgcaaggtgcagttctatcagcgagccgatccgttcctcacgttccgcatcgccggaggtcagctgttcgaacatcggggtgttgcgaagttccgccagcgtctttccggcctgaatcctttcctcctcactggctgcttcaccgctgaccgccacacgcaccgccagtcccatgtcctcgaagcggatgcccgtggcttgcggcgtgcatcccggcaggcgtctgttctgttcgtcatcatctatcggaggattgtcatccgccggttctttccggaactccagcggaacatccatatcttccatcagttccagttcttccggcagcggactcccttctgcaaacagcttgtccagttcctcggcggaaactgttttcgggtacttttctttctccggtgcaaaagtatccgcttcacttacagatttttcgttttcaattttttcgggtgtttgtggcgtggagtggctaagggaaaatgtgcttttgcctaaaatctcgctcacgtccaccgccatccgggtaaggatctgcccggctttttccgctttcttcctccggctgttccgctcgtggaagaggtaggcggctatccacagcagatagccgccggtaagtaagaataagattgctgacatgatttccggggtttaaaacagttcggtacttcgttttctgtattccttcgtaatctcgtcctgataagtggaaaagtgctgttccagcacattgtccacatagctgaaaatggacatctcgttgttcccgattgtctggacaatcttctgaatccgttcatggaactccttacgaaggtagattgtcttgccaagccgtgcgcagaccggtgactcgtggatgaacagacggacatatccgttctcttcaccggactgtccattatttccggctgcttgcgcctgcccgtccgtctgtcggccttccttgaacgaggcgactatggagtcctcgtcaatgtccgtcaggtttatttttttccgttcgtttcccatagcctactttttgataatggacaacagttcttccgtaatctctttcaggttgctgcctttgaccagcgtaccgtccgcaggaaacagcgtggaacggaacaatgccctatgttcccccgtcagctcacggcggaaccgtttgctgtccggcaggaaggtattcagcactttcagtcccagctcgccgatcacctgttcgtacaccttgtacagttccgatttctcccggccgtccaccatgttccacagaaggtacagacctttgatattcgtcttgcccgtagcgatcagcgtgtcattcagccggctcgcaaagcggagtgtgctttccattaccaccctgtcggcggcaatgggggaaaagacatagtccatgttcgccagcgtgttcaacacgcccgtactgtttaccgtgcccggcaggtcgaagaacacgatgtccgtttccggcatcttttccagcagttcgtccgcctttgcgacagcatcctcagccgtactctccgctatcggataggctttcttccttatccgttgcagttgcctgtacgccatcagtttgtaatgctcgtcctccatgaccgttttcaggtcacgttttctcatctcggcaatgctgtgttgcgggtagtcgcaatccaccaccgctacattcatccctttcacatagtgcaggtaacttgctaccagcacggtcagcgttgtttttcccgctccgcctttttgcgtggaaaaggcgataaagagtgtttctttttccatgatgcagtttgtttacaaatgatacttttgaatcaacgccgcaaataaagaaggaaaaagaaggggaattcatggtttgggaacggaggggttcgagtggccggctcctgacgtggaatggctgactgaacagccgaccgaccgaagtattgtccgtctgattggccaataggatacttgtccgaccatacatgatattattggattgtattgcctgtcggataatcagccaaggaaacaaccgaccgatgaacaggttgcccgaacaaaaggttatccgcttggttggctggtcagccggacgaccgcaccaacgttgcaacggctgaccgtctgattggttatctgaccggttgggcattcagtccgccattacgcatcccattcaggcacattctcagccgttggttcagccatcatcggccgcccgtttttcctcctgttccacctgtgtgtacaagtggcttctatttggcataatgtggctaatattggtgatatacaactgattatatcacttcctaactttgcggcatccaaccggaagtgggctgtttgccttcgtcggtcgtcaatccccgctttcccccgaaagcgctctttcctcttcggagaggaaagatttatgttcgcccgaacatagcaagctgtgttttttgcagcaccactccgttttgcagcaaaaaacgcttgcccttgcagggggctgcaatttgctccgaagtcgcaaattgtgggggagaaacagacggcggcaatgccacccggtggaattgtaccacataaaaaacgtatatatgaacaacgagaaaaagcgtccccgcacacggggaaaagggggcaggttgcccaagtcgaacccggccgtccgccgtgaaaccgtcaatctggacgaagccggccatgcacggtttctcaccatgtttgagcagtccggcctgttgtccaaatccaagttcatcgccgcacggatctttaacgaggagttcagggtgatccggacagaccgtgccacaatggagtatgtggccaagctcacggaactgttccggcagttccgtgccataggagtgaattacaatcaggcagtcaaggagttgcacatccatttcaccgaaaagaaagcgttggcactgctttacagacttgaaaagctcacccttgaactcgtggagctgaaccgccggattgtcgaactttcccaaaaactcgcctcacatggtagccaggatcagcgtgggtaagaacttgtacggtgcattggcctacaaccagaacaaggtcgatgaaggcggtgcgaaagtcctgtcggcacatctcctccgttatcccgaagacgggcgtttctgtccggatgaatccgtgaggcagtttctcgaatggatgccgaaccattaccgcaccgagaagccggtcatacacatctccctcaacccgcatcccgacgacgtgctgaccgacgggcagctggcggaaatcggcagggaatacatgcagcggctcggttacggcaaccagccctatcttgtctttaagcacgaggacatcggtcggcatcatatccacatcgtttccctgcgtgtcgatagtgagggaaggaaagtagccgacaagttcgaataccgtcgcagcaaggagattaccgaacttctggagcagaaatacggcctgcatccggcggaaggccggaagaaaggcgaagagtggcagctgaagccggtagatgttgccaaaggggacatcaaacggcagatcgcctgtaccctcaaacccctgctcgagctttacagcttccgcacaatgggcgaactccgtgccctgctttccctgtataatataggagtggaagaagtgaagggggaaattggcggacgcacctatcacggcatactctataccgctttggacggcaacggcgaaacggcggccactcccataaagtcctcccggctgggaagaacggccggtgcacagcagttggataggaagatgcgggaatccgccgcaagaattaagtccgacccgtgccgtgaacggcttcggccgttagtggccgaagctttgcgccggtccgtggacgaacgggatttccgtagccggctggcgaaagaacagatagacttggttctccgccgcaacggaaccggcaggatttatggcgttacctttatagaccaccgcagccgcaccgtgctcaacggctcacgtctgggcaaggagttttcggcgaacacgctggacagatactttcaggagcggccgcaagatctcctgccgccacttctgccgtccgttccgtccgctgtggtttccggaaacggggagaaaattctgggagggttgctttccggcatggagccggagctgaactatgttacccggcatcccaggctactgaagcccgacaagaagaaacgccgtcggcgttacggccgtcaggactgaacccgtattacataattatcaagacgataactttttaaaactcagtattatgtcacaagaagatgatctcaggggactggcgaaagtcatggactttatgcgtgccctcagcgtgttgttcgtagttgtcaatatctattggttctgctatccggccatccgggagtggaatgtcagtatcggagtggtggacaggattctgctgaacttccagcgcacgaccgggttgttcggctccatcctttggacaaagcttttctccgttaccttccttgccctgtcgtgtctgggcacgaagggtgtaaaggaggaaaaaatcaaatgggcgcatatctggacagccctttccgcaggtgttgtcctcttctttttcaactggtggctgctcagcctgcccgtaccgttaatggcacgcaccgccttttatatactcactcttgccgtcggctatctctgcctgcttgccgcaggtgtatggatctcccgccttctcaaacaggaccttatggacgatgtgttcaacaacgagaacgaaagtttcatgcaggaaacaaggcttatcgaaaacgaatattctgtaaatctgccgacacggttctattatggcaagaagtggaacaacggctggatcaatgtcgtgaatcctttccgtgcctccatcgtactgggaacgcccggttcgggaaagtcttttgcagtggtaaattcctatatcaaacagcagatagagaaaggctatgccgcctatatctacgatttcaagtttcccgacctctccaccattgcttacaatcacctgctcaaccatttggaggggtacaaagtgccgccgaagttctatgtcatcaacttcgacgatccctcacgcagccaccgctgcaatcccctcaacccgaagttcatgaccgacatctccgatgcttacgagagttcgtacagcatcatgctcaatctcaaccggtcgtgggcggcgaagcagggcgatttcttcgttgagtcgcccaccattctctttgccgccatcatctggtttctgcgggtgtacaaggacggcaggtattgcaccttcccccatgccgtcgagttcctcaacaagccttacgagcagatctttcccatcatgtcctcctatcccgaactggagaactacctcagtcctttcctcgatgcgtggctggcgggagccgccgaccagctcatgggacagatcgccagtgcgaagattcccctgtcccgtatgatttcgccggcactctattgggtgatgtctgccgacgagttctctttggacatcaacaatcccgacgagccgaaaatcctctgcataggcaacaatcccgaccggcaggcgatctatggtgctgcgctcggcctgtacaacagccgtattgtaaagattgtcaataagaagggcaggctgaaaagctccatcatcattgatgagttgcccaccattttcatcaaggggctggataacctgatagccaccgcacgcagcaacaaggtcgccgtgctgctcggttttcaggatttcagccagcttatccgtgactataccgacaaggaggcgaaggtgattatcaacacggttggcaacatcttttcggggcaggtcgtgggggaaacggccaagactctcagcgagaggttcggcaagatacttcagaaacgccactccatctccatcaaccggcaggatgtttccacctccatatccacccaaatggacagcctcattccacccagcaagatcagcgggctgacacaggggatgttcgtcggctccgtagccgacaatttcggggagaggattgagcagaaaatcttccactgcgagattgtcgtcgatgccgggaaaatagccgaagaggagaaggcatatcagaagatacccgttatcaccggcttcgtggacgatgacggagtggatcacatgaaggaaatggtacaggaaaactacaaccggatcaaggaggatgtcaaacggatcgtggccgacgagctggagcgcatcgccagcgatcccgccctcaagcaccttctggaactgaacaaatgacgatgtgccgaacggaaaaaatcccctgtaagcggctatggcttgcaggggattccgttcgttccggaaatcggattaccttctatggtaatgtttctcgtcatcttcttccatccgtttgagcatcacttcacgcaggcggtcgatgaagtaggtacgctcgtccgcctttcgcctgcgtatccgtgcgtagtagctcgaagcgttcttcacatccagtcccagcagtccgcacacgtgttccaccacacgcttcagcgtgacatcaccgccgttgaacagtttcagttcgtggcaggcgtacagcaactctatcagatttatcacttccgatgtccagataaccggaggggttccggccggtacggtggaaacatccgcacccgccggatgtatctcataggcgaacttgcagtgggcttgcatcccttccagataggtcagagtgccgatgatataggagtagcagatcagatgttccttctgtgccgtgcggtaatgctcgcgcaggatgaccagcctgcaactcaggtattgcagctggaaaaggacaatggtgatgtcgttctccgcacgttgtagctcgtacacttcctttacgaactcggcattggctttcgacagtgtttcctcgttgctgttctcttgttccagcaacaggagataaggggtaacattgaataatttcataatgttttttcgtttaagtatgaaaatggcttcaatgtaagcgctttgcccgacatgcctgttccgcttttcgccgaaaatgccggtgtctattcgcccagatagaacttacggcgttccttgcacagttcatcgtacagatccttgtgcagctcgctcggactttgcttcatctgttccgtacagaactcccagaaacggttggccgatgcgaatccgttcttctcggctatttccattagcggacggtcatagtaatatttcaagtcccgccgtatctgtccgatacgttgttcctggagccatctgttggccgggcggtggtagatcttgcggaacttgtcacggaaggtcgaaacgctcatgcagaacattccggcgagttcctccacactgtgcgtccggtagctgtagcggttcaccttcatccggaacacggcggcatacaggggcttcagccgtttctcggcaaactggaaatccagctcggtaagcggtgtgtactgccggctgatctgtttgcgccgttccacgaagaagtagtcgcatacctcattacacatgttgtacaggggttgtggagtgccggtatggtacagcacctcgcacagatagagcatctccggcgtgcggtacgctttccggtaaggctcgacgaaatggtgcagcaggtcgttctgtatctccacctctttggagagggagagcagcatcagcaatggccggtactctttgcatgacacggaaggcagttcgggcagtttttccatacgccgcaggatatggcggcacagttccgtgttccgggaatagggttccagtacaaggaattttttcgtacttttcgcctttagcagttcctccacttccgtttggagggcaagggttgtttctctcagtgattccggtacggccatcaccagctgttcgataaacttcgtttccatgataatgtttttttaatggataaatcggtaatgtatgaaatcctgcaaagataaccgccatagaccggtaaccgcttccgtttttcgccggaaatgcttccgtgtctggaaatggaattagggacttcatctcatcctttaattctttacaaaggaataatacacccagtagatgaaaatccagaccatatctccggcaagcagacagatgatccgttgcctgaatttcaaatcatacttttccgctttcagctgtttcagtttggggaagaagtcgcttggcagatagtgctgcctgcacagatagaacggtgcaaatataaatatgacgagcatttcccaccatcggtaactgacattcctgttcttctcgttctgtttgtccatgcgggctttctcagcacgtgcggcggcatccagccgtcgcatgaaggcctcctccttctcttccatgatgtcggcgatcaccttgtcgtccacgcctcggttgtacagttccagctttgcctgccgcacctgcttgtcggtatattcgccggttacattgttggcgattagcaatagctcgtctgtcgaatattctcttgtcctcatatgctcaatcttctatcctataatccatagccaagcctttgggggcaaagctgaatatcgggtattttaatttcgttttcattctctacttctttacaaataaacaatataccttatatatacaccggattgtattctaacaccatttacaaataatccatcccaacttagctaatagccatagctcaaatccacataataccataggaagtaatagtagcaaagttatcgtaatcttatttttggacaaatgacgataatggtttactaatgcagatgttctatcttttcgatacctaacaaggcaaaacaagacaggaaaaagaaacattcccatacaacataacaaataccatgtatgtggcaagtttctgtcaaatagcggaatacacgggatttctattataaaccaccaatataaggatagcatgagtacccctgaacatcgggacctcattttatgaccttgctcacctttgaagtacaggtaatcaaaaaaataatacctgtaattcgtccggttggcacgttgcttcactcgttcaaaatagttatctgttttttttattcttttactcatatatagtcgatgaattatgttctccaaaatgcaaaataaagcagggtcatacccagcacaattccaaaaaagacaagccctgtcaggagaaagacccaatccgaataatgaaagtcaatttccttgtaaggaatggcagttttcttcacatacttgttccatgcccatataagaactcttcccaatctttctgctgtaatatagctcataactatttttacttttcaatttgtattccctcatgcgctggcgagcaataaatagaatgtcgctaaccgtataatcagggaaacgacatagatgccgtagtagagcagataccttttctttttgtcaaactcggcgaaatatttcctgtatttgtcccccttgaataagaatatttcattgacataatacccgcatatcccgatgagtatcaaaagcaaaaaatagacaccgtttcccaaaatacttaataggcttatcctgaaaatcttgatacaagcaaggcagacaaggcagaatgcccaaatactgatgatgtatggggtgttactcgccatactgctgatatagacatcgacacctttatccattccggcagcttcttgtctcttattagtcgaaatgcaccgatttatatagccgtttttccatttcgagaaacttagccaatagaaaagatttagcatcctcctaaaaatgaaaaactgcaacttataagagcagtaaaaattgatgttgtaatatttttccaataaattcctcatgcctttaatggtttggtgagaaataacattaagttgttttctcgactttgcacttctttgattacaagtccgatgaagccgcataccagcactatggggaatgcgactgcaaaatattcacaaagtttcttcaaattcttcatactattgtcatttataggttattataagctgtgcctaatgagatgcatcttgccgccgtgaggtggcacaggtacttgtttcagcatattcgttttagttatccccctgccatcttcctctatatacatctgataatctgcctgttttaccatcatataatctcacagtcatgttgcaagtatcattagagacggtggtatctttcatcataacatgccatccacattttttatatggaatggaatcggcatcccgatagtctgttccataatatatggaagtgttatggaacaaatctatattttcctgtttcagtttctctattaactgatgaatggagtaagtaggataaatataatctttctcttcggagcaagtagcactcaattcgcatacgtttccttctttatcataccatacccaaggtgatatgttgttccagtcaataaatcgttgatgccagtctatcagctttccgtcctttccatcatacgacatcacatctataatcggtatgtttgggtactctattgcataataatagttgtttgcataatctaattgtattagatgttgttctccattggggaatgtagtatcaacctcaattccgtttccatacttccggaaaaataatgtatcaagaactcttggaggaaaatccatcttgctcagactatcacacatatgtctgtactctcttttctgtttgttgatacaacttacggaaaataagcagaataatgaaacagccatcattgtaattttcactgttaaccttgtatattttttaagttgaatattcatattcttagtgctgataatggtttggtgaggaacagcattcagctgttggctcgaccttgttataaactcagttataagattttacaattggaaaagacatgacagtatctttggcatcaagtaatgaatgaccatgtcctataaatacatttttactctcatctatatgaaaagaatgtatctcatacctcttatgtggaataatatcaccaccatcaaaactaccaatatatttctcgactattccttgtttcctatatactctcttttcattatagtcgtcaaatagtgatgctgtgacataatgacgaattatatattgttcgtcttcggctatcttcttggaattgcttgaataatcaatgaataatatcaacaacatgaacagtcctttaggaacaaatagacctataataagaccgagcaaatagagtcctctatatattcttatgctatatttgatccccttgggtaatttattaggaatgtgtatgaagaaggaaaaaatcaaagataacacgaaagtatatccgataatgtatccgatattccatcgtatatgatctgtttctggaactgtacatattactataaaaccaagtattccacataagatatggataccaaaaaatatatacaataatttatatttcgtcattttcaatcaacagtgtttataatggttagaaaggagcatcgttagatgctatctttcgttgttagatatttattgccctttcccgcttggggatattgaacaaaagttgcctttataattcgattattacagttaaatggtacataagccacg

SEQ ID NO: 2980 - DNA, 4970 bp, Unknown
  gut microbiota DNA sequence
ggaaggataaagttacccgcataggtagcttgcaacctgattgtaaatatcttcgtttcgccccggcgcagattgaaataagtcaatacacgatcgtcgcggatatcctgataagtatattggccgctcacattaccggacgagtcggttgtctcttgtggctctgcttcgggaaccgtcattctctcgttatacacttcccagccggacgggatgatgtgagtcaatgccaagttggtgtaatcggtggtcccgcttgtgttggatatcgaagcaatagccgtgaagtccgttccctgccggatatcgttgacagacatcggtttaccatccatacttgcatacctgatatccatacgaagattgtcggaaatagccggcaacgtatcattcaacaactgtgtacgtgtaataaggtctacgcttagtgctcccttgccttgattctttacggcaaccgttcctgatttgggagaagtggaaatctctttctcgaagacggctttagccgattttacggcaggctgttgtttgccgttccatgtccaggtgaagtctaacgagccggacaacttctccgccaggcatcccattgccataagggcgaaagcggtggactgtgtgctgaaccagttctcttgtgacagattctttgaaacgactttcgcttgctgtaaagcatcccgttcccggttcatcagaagtaatgtttccaagatcatcgcttcatcccggtcggacgaaccgtaaatctgattcatggaagagtaggggatgactgttgtctctgcattgtacactagttcttcggcaggcttcatcttacccgtcagtgcgtaggcagctgccagtctccatttagcttggatagataatcccggttgttctttcatccggttcatggcgccatattccggtgcaccggccagagccagggtatagaggcggaaagcctgttgcagttctgactgccattgttgccagttgtttgcctcttgaggcatacgccaattttgtgcggcagcacgttggaagcgtttccacttgttcaatacatttgcatggacggcatagcctttctcctgcgccagtgttaagaacattcctgtgtaagaactgatccattcgtcagcaacggcatttcccggccagtagacaaatcctccgttggggagttggcgggcgtaaatctgacggatcgcttcttgtacatttgcttttatcttctctgcttcccgggtatctattgttttgaactgagcgataaacaggagtggcagtgcttttgaagtcaactgttccgtgcagtggtgttgatagttatataagaagtcgaaccgacggctgatgtctactgatggaatgcgcgatacttccagttttatctggttgtttgcagacaaacttcctaactgataggataattctttgttctgtcccgtttctatccattcgctgctgcgtaatgtaactatcggattcggattccgtacttctatttcaatggtttctttggtttgttgtccgccaccgcttgccgtcagtttgatggttgcctttccggttttgtttccggtctttaaagtaaagaacacaagttggtcgccgggccggttgaaggtgagcgactgttgatgggaaccttctatctgaactccgccaccggacgcctgaagcgatacggtcacattcttcacttgtttttccatagcgaagacattgaccggaacagtgatttcttcctgaatactaagtacgcgcggcaaagtggagagtaacattaatggtgtccgtacaaatgcagtcttttctgcattcccgtaagctccgtcctgtcctgccactaccatggcacgtaccgaacccacatacatcggaagtttcaatgtatgcgtctgctgcctgcccttttccaaatagaatggccctataaacttcactacgggtttgaaccggttcgcttttgcgtcggccggtttgagcgttgcatctccaccaacgctgaaaagtgaactgtaagctccggcagaagctcccaatacattgtcgtacatatcccaagtgcggataccgagtgcctcgcgtgaatagaattcattccagggatcaggtgtcttgaaattggttagatccaataatccgtcatcaacaatagctaatgtgtaagtcatcggcttcccacttttttcgctgactgtgacgttgaagtctgtctccggtcgcaatacttccggcatctgtatctgaggttgcagaacagtctggcggttggtgacaaataccggagcaatgccatacatacggatcggtaaatcatttattgtctgtgcatgaggttgtagcagactgatgtgcagatatacgttcggagccatttccggagtaatctcaaatgtatatttcgtgtctccctcgttggttacctctatccattcccggtgcaatacggacgaaccgttttctatggataccaacgcacgccctccggcagccgcaggaataattgccgtagctgtttctcctatctcgtaagagtctttatccagcgagaaagtaagcatcttgataccgctgggatcggtcttgttcgaacgtccccgtgattccggccagtctacatagatggttcctccggtggcgtggccactatctttgtcttttacatatacgagatagcgtccccaagacggataatcgacacggaatttaaatgttgtttttcctccgctggtctgcaatttaccactggctacgggggtaatggaactattgttgatgtaagtgccgaaagactcgtcgctgttttcccaccaccagctccaactgatgcggtatatcttatattccaggttggaacggttcaccggctgtccttgcgaattaacggtcacgatatcaaagacgtggtctttatccgtttcgatatattttcctttcggttgattcagattgattcctacgtaagatacaaatggggagaacggaatgctttgtgtatagatgctggcgtctcctcccggttcgaatacccgggtggtgaaggtcacattcagcatacccggtgcatttgttgctgccggaactttcaacgtgactcctgcttttccttccgcattaagtatgccatcgaacacatccgttttaatggttgtgaaatccgtagcaggatcgttgaatatatattgtccgtagttcttgaattgcgtgtttactttggacaaagacatttccactttagctttcaatttggaggcagtggctcccgtcagccacgcagaagcgagcggaacagtgacatttttgtctgttgattgaagaatcttcggtagcgtcagattgattttcagtcggttgggctttatcgtttcaatacgcaggcctttgtggaaagtagttcctcctacctttatatatgcattccaaagaccggtcgggtcaccggcttgcgtaggaacatcaaacgtgtagaatccgttcataccttgtgtagaaatcattttggtatagaactgccctttcggattatagatttcgagtgctacgggatgtttgtccggtatcctcttttcccggtcttccaatatgaaggagatgtgtagtgtatctcccggtcgccatacgcctctttcaccatagataaatcctttcagtcctttctgaatctcttttcctcctacatcgaaccggctgacagactgttcttcaccgtctaccacgcgaacataagccttttgtttctccgcttctgccacaacgatgaagggtgttccttttgaactgatttcaacaaaaccctctccattcgtttccccttttcctatgggttgcaattggaagttgtaaaccgttacctgtgcttttcctaccggatttgtatccaatatgttacttacggcaatccatagtttattcagagaattacgtttcacgatcattcccaggttagaggcaaaaacgttgcaggcggcagcccgatccgaattcatataataggaagggtgacagggattatcccgttctttccatcggtatacactccagtccattgttccgccgttatagtaataataggcttcgggcgtatcccaaaccgcttcatccgcttcggacaaggcacttccgcttactttcatcaaaccgtccggcgtattattgtcagcgaacttgatatcctgattgtcgactccgctgcatggataagcggagtattcctggcggaaagagagtatcacccggtaaatggctcccggttcctgacgaatcaatccggcaaggtctatcgaatagttttcccagttatgaatatcttttgaggtatctttgcccagccataatgttttcttgtataccaaccgtcccgaacggcgtaattcattagcggaagcaagcgaattggtttgcataaacatcagcacattattttcaaagatacgaatcacgcttaagtccacagcatacaggtttacagcccggaatgggataatcaggctttttgaatcgggcaggatagcggcggttgtcaacatctctacctgcggtttcagatttatttcgctgaatgagatcgaatgtgaagttcccaacgttttgccctgactgctttttactccttcatggatgttgagcgtcaatttgcttagctggtttgcttcgaagtagatgaataccctgttttctttgatctggaaaacggaagaagaaagctccggaatctcaatcaaccctttcaggtcctgtgtatcggataaaggggtggagaacacaacctcaattccattttccggttcgtcgatgcgtgtggcggacagaaagcggaaactatctttcgctggaatcagaacctcttcactttgagtttgatcgatacgtgcgggactgccattggcagtgatggtcagttggtaatcctccgtatctcttggaacctggttgatacagaattggtatcgggtaagattatctgttggtat

SEQ ID NO: 2981 - DNA, 102550 bp, Unknown
  gut microbiota DNA sequence
gtcggcggtcacacccggagcaacgattttccagccattctctgcattaccacgattagcggtgcgtgctgccaatcctgtgctggttgccattgcctcggatacagaaacaatgtcaccaccaaatttcatatcgaacaatgcagaaagagtaaatcctttgtaggtgaatgatggagaaacggacattaataattccggttcaatattaccgatcggatgatccaatgtgtattggaaagcgtcttcgccggagaccttggtcggacggccttgtttattaactatcatattaccgttttcatcacgcttgtacaggtttttggcataaatttcacccaagcggtgtcctacgcgtgtaccgacattgattgggaaatttgcatctccattgaagaagagataatcaacgccatctgccagttcttttactttagatacattcctggataagttgatattcaaatcgaacgtgaaatctttcgtttgtacaggagtagaatatagcatgaattcgaatccttggttgacaattaaaccggagttaatcattttaccaccactccaaggagccggtgcagggactttcatgatctggttcttggtacggctgttgtaataagtgaagtcgaatcccagacgattattgaggaatttcatatccaaaccggcttcatacgaggaggaaatctccggcttcaactggtcattctttttaatatcagattttgtgatattgagcactccgttgctgaatgcatagctcaatgtattatacaggttgtatggttctgtatctttacctacttgtgcggcagataggcgaactttggcaaatgtgagccatgaaggtaatgtcttgtctaatgaacgaagaaaatctgttatgatgaaacttaagtttgcagatggatagaagaatgaacggttgctggagggtaatgtggacgaccagtcgttacgtgcagtcaagtccattgacaaatactctttccatgcaagttgtgcagatgcaaatacagagttggtagcgcgttcgtgtccatcttcagcagcactgttcagaatgtttgcggcattgaatatccattggttcttgtttaccatgtcttttgtttcagccgacaagatctcaaatttctgatacatgaagttggcacctactgtgtagccgatacggaaattttctccgatacggttgtctccggcaaggataaattctgcatttgactcaaagaagttttcctcactgcggctcatacggtcatcggtaatgttttcgatagttttaccgataccgttcgataagtcggtgctttgaacacgtgtacggtaatagtcgaatgcatatttggcgctaaagtgtaaccagtcggtaaagttgatttttgcgttgtagtatccgaaagctctccaacgttcgtcagaattatggcgctggtcttgtacgtaatatggattttccaatccggggttcgggcctgcccaattcacgtgtgcggagttttctgttgaataattctttaaatcatccaaagacacgttgtgcggaataccgattaactgtgcaataactccataacttccgaaatagggacgatcttctgccttggttcgtgataaggagacttttccttccatagagagatatttgttcatttctgcaccggcgttcaggtcaatatttatcttatccaatttctcgttcgggaataaacctttattgttagaactgccgaaagatgcacggaaatgagacttgtcggttacattactgatagacacattatggttgtgggcaaaaccggtgttgaaataatcttccagtttgtttccatacttagaataagcacgttgttctccgttccaggcttctaccatgtgtccatccaattcgctaccccaactactgctcgcagccttattgtaaacaccgtctgttccttgaccgtagcgttcctgcattttcagtgtttcagctactgtgctccatgtgaagttcccgctataacgaacaccgaatccttctttttttgaaccttttttggttgttatcaggatgacaccattaccggcacgtgaaccgtagagagcggcagcattcggacctttcagtacagaaatggtttcgatgtcatcgggattaatgtcgacagaggcaccgccacggtctacaccgccatagtaagaagcgtcagaactgttgttgtcgctgaaaggcacaccatcgataatccataaaggttggttattgtctgataaggaggaattaccacgaatcgtaatcttggtggaacctcccaaacctgtacctgccgtattcatctgaagacctgccacttttccttgcaaagcgcttgtcacagaaggatctccggtcttgttcagctggtcgctttttatttcctgaactgcatatcctagcattttcttttcgcgtttgatacctaatgcggtaacgacgacttcatcgataacttgagtatcgtccgacatcgtgacattgagagtcggtttgttgcccggaatctctaatgtcttatatcctatataggaaaataccaatacaggttgttcaccgctgaccttgagggtataattgccatccatgtctgtaatggtaccattacttgttcctttttgcaggatactgacaccaatcagcatttctcctttagtatcgatgacttgtccggtaatcgtgtgttcctggccaacttgttgttggttggtttgttgtgcatttttttctgacaggtatacaatattgtcttctaccttgtacgaaatgcttgttccgctcagaagagagttgaggacttgttctaaagaagcgtcttttacattcactgcctctacttgggtggcagataacttgtcgttataaaagaattgatacttagactgggactgtatctgtttaataacagttcctaagtttgtgcgtgtagttgataatgtcaactgtgcggtagcccattgtaatgggattgccatgaaaattaaaaccaataaagctcgaagtaagttcgacttttgaatagaatgattgctttccatacatttaatttaatggttgtataaaaattattgaactaataaaagaagtcttattttcttcttttataaataaaacaatgctaacgcaataaacacttagtctaatttatctttttttctttatataattaagagtattatgatttcgtgtgtaaatccctttgtactatcattgcagtgcttctcatttaagagttgtgacatgggcttggcacagttgtgccaccacggtgtcattgttgtgacaagcccgtggcacagttgtgccaatgctgtgttgcagttatgtcaattgagagaccggattaccagtcatagtcttcaacgtatgcatcaaattcttgtgtggtggtaactccgcagtttctgaggatattcagtatatgctgttgttcggaaggagagagtaaacgttcgcctttacgggcacgatagtaggttctgcgtcctaaatagttcattaggtgcaggataacggtttgcatttgtttataaggtagattctctaagattccgatgaatccttgggcgtatcgtacttttgtactggaacggtaatggggacagccgcctttcacggtagacagatatttgggactgatgataatccagtgttctatgttttccggtacgctttgttctgtaagttgtcttaggcaggtacctgcttgggggcattgtcggttaaggcacatcgaatattgataagggacttttgcaaagtcaattttttcttccatgatttgtagatgtttgttgagcaaaagtagtgaaaacttattgaaaaatagcctgaaagcaaagaagtttactttcaggctactacttttagtcgaaatctcaatgaatagccgctttcagaagtgaactgaaggacagcaattgaaatagcggcacactattgaataaaggattattgctctttagagaaagaataaggcatatcttcttctttcgtacctctgttcatattcggttgattactcatatctactttgataataccacctttgaataattcttcgtggcgaagataatttttagtatagtcagtgccgtttacgttcatcgaattgacatagaagttctttttactgttgttcggggcatcaatcaccaaactgttgccattctcaaaatgaagtgtggctttcttgaataaaggagcgcctacgatatattcatccgttcccggacaaacaggatagaaacctaatgcagagaatacataccaggcggaagtttgtccgttgtcttcgtcgccgcaataaccgtcaggccccggagtgtacattctgtccatgacttggcgcaaccagtactgggctttccagggctggcctgcataatcatataaataaatcatgtgttggataggctgattgccgtgtgcataattacccatattcataacggtcatttcgcgaatttcatgaatcacctgtccatagtaactgtcatcgaatacgggaggtacggcaaaaacggagtccatcatagtgacgaacatctcttttccgcccattaagtcgattagcccttgcggatcatggaacacagaccaggtgtagtgccagctatttccttctgtaaaggcatcgccccatttcaatggagagaatggtgactggaatgtaccgtcttcattgcgtccgcgcattaatttagactccttgtcgaagagatttttgtaattcatggcacgctttgcaaaaagattgatctcttttttcgggcgtttcagttctttagccagtttgtagatacaccagtcgtcgtatgcatattccagtgtacgtgctgcattctcgttgattttcacatcgtatggtacatatcccagcttgttataatattcatgtcccaagcgtcctgttgaagatacttcaggatgtacattctctgttccatgcagcaatccttcatacagcgtttttatatcgtccactttcacgcctttcatgtaagcatctaccagaacagaagccgaattattacctaccatacatcctctgtgtcccggacttgcccattcggggaagaacccgctttctttatatgtattgataagcccttcctgcatctccttgttaaccgaaggatacatcagattcagtaacgggaacagacatcggaacgtatcccaaaaacctgtgtcggtatacatatatcccggcaatacttgtccgttgtatggactgtaatgaatcggccggccgttcgcgtccagttcgtagaacttgcgcgggaacaggagtgaacggtataaacaggaatagaatgtacgatattgatccagattgccgccttccacttcaatttttcctaatacctggttccatgcttcttttcctttcttggctacttgctcgatattatccttgcccagttctttcatgttgacagccgcctgttcgaagctgataaaagaagaagcaatccttgcgtgcacctgttcgcccttatgtgtccggaaaccgataatagctccggcatggtcagttgtttgttcggtaacgttttcttgaagattgccattggctactgttgctttgtatgtgaaaggcttgtcgaactcgatgataaagtaattcttgaagttttcgggaactcctccgctattgcgggtggtatagccgataatcttgttttcctccggaatcactttgacatacgagtctttgtcgaaagcgtccactatgatataagaatgttcattttccgggaaagtgaagcggaaaaggacagcgcgttccgtcggggccatttccgtcacgacgtcatgttcggcgagatatactttataataataaggagtggcgatctcccctttgtgggcaaaccagcttgcgcgcttttcttcgttaaactccggtttgcctactacgggcatgatagagaactgtccgtagtcgttaatccacggactgggttgatgcgtctgcttgaaaccgcgaatcttgttagcggtataagtgtattgccagccgtcacccatttttcctgtctgcggagtccagaagttcatcccccagggacgggcaatggccggataagtattacctgttgataattcgaaagtagactgggaacccattagcgggttgacatactgtgtccagtctttggctttggcaaagaatgtgcaagcaagtacacaaattattattaatagtcttttcatggcgtatatgttttaatagtaagcaatcaaacgtattatctcactccccatttcgtgggttgggcggtcattttgatttccattgttcctccgtttgcaatatcctgatgatggaagaatggggtattcaacggttggccgttcagtgttacgctttcaatgtatttgttcttcttttcgttgttttttactacgatactgaatgtcttttcttcgggcagattaataactgccttgtcgaaggcgggacgtccgatagaatatatcggtttgccgggacatacctgatagaatcccatagaattgagtatataccaggcagacatttgtccgcagtcttcattacctgacagtccgtctgtactgttggcatattggctttgataaacactgtctaccagttcctgtgttctccacgggcggttgacgtagttgtacaggtgaatgacgtgatgactcggttcattgccgtgcgcatattgtccgataaggccgctgatgtctgacgaaatcatttctccttcgagtgatgaatctgccgtaaacagtgagtcgagtttttgtacaaaagcgtcttcacctcccattagattaaccaatccatctacatcgtgaggtacaaaccaagtccattgccaagctgttccttcgcaataatcatcgctgcggtgagtagaggcacgtgggttgaacggggtacgccattcaccttttgaatccagtccgcgcatgaagcgggtagatttgtcgaaataaaactcgtaggctttggcaaaacgttcgtatttggcttttgtttcaaagtcgctcattgcttctgcgaagatagaaatacaccagtcgtcgtatgcatattccaacgctttggctaccgattcattttcacggtcgcaaggaatgtagccgattgcgttcttgtaatatttggctttcggcataaggtggggtaacaccagggccgggcatttaataccggtagtgtcatattccgcagcgcgcagagatgctttgtatgcttctttggcatcaaaattacggtagcctttcatatatgcatccacgatgaccggaacggcatgataaccaatcatagtaccggtatagttggagcccagatcccacatcgggtatattccgccttcctgatgttttttgatgagcgaattgataaactgattgttcagatccgggtcgataattgtcattaacggatgcagtgcacggaaggtgtcccataaagagaatacagtatacaggggattgattgtatctccctgatgtacttcgagatccattcccaggtaacgtccatctgcgtccgtgaacaggttcggactgatagccgtatgatatagagcggtgtagaagatcgttttgtcgtccttgtcgggagtcgtaatatctatctttgacagatactgattccaagcggagcgtgcattcttgcgcactttatcgaaatcccagccgggtatctccgattctacattcttgcgtgcaccggctatgtcgacggcagatacacctactttaaccagtacttgttcatctttggtggtattaaagtgtaataaaactttgcagacaggaagccgcttgccgttatccatagtgatagaatcggtcaccaacgtataagagaacggcttggagaacttggcatagaaattgatatattggtcgaaagcccaataagttgttttcttatgtccgcagatttccgtgtcgctgataacctcgatccccatgtcggaattagtctgccgttgcaggctgtaatccaagtcaagaataaatccggcttcggaactttcggggaaggtgtagcgatggatagcgccacgtttggtagccgatatctcggcttttacctgataagtgtccagaaaaacggaataatatcccggttctgccgtttcattctcgtgcgagaaggcggaggaatacgctaattgctgactttgcggatcagtggtctgatatcgctgttcgccgacagtcggcatgagtagtacgtcgccgtagtcacaacatcctgtgccactgacgtgcgtgtgtgagaatccgttaatggtagagtcttcataataatagcctgaacaagcgtcccagccgtcaattcgggtatccgggcttggctggatcattccgtgcggaactactgctccgggaaacgtatgcccgtgtccgccggtaccgataaagggattgacaaaaacgctataatctttctcattagtgggagctgtacaggagttgagtgcgaagaatcctcctaaacatcctactatcaggaatgtttttagtttcatggtagtaatagcttttagttttgccgaaagcaatccctttatttcggggaaataaagatattgcttcctacaattttataatcaataggtatagagttttgtaatgacgttagcacagaatcgatcgtcgactttcttctcagtacaccggagtaagtcttatccgcccggatgtccggtgacaggataatcttcacgtcataaaaacgttccagtgctttcgtaatggtaaagatatcggccttttggaatggaatcaggttgtcgtgccatacggcgtccaacttagcatccacttgtttcacagtcaatcgtccgctttttttgtttaactcggcacgttggccgggggcgagaataatctgcccttcctccttattgcctttcacttcaatttcaccttcaatcagtgttgcttccgctacccggcaattcttatcggatttaaagttgaatgtggttcccaatacacgtacacgcatagcgtcgctttgtacggtaaatggtttatgacggttctttgttacctcaaaataggcttctccttccagatagacattacgttctttttcagaaaactcgcgtggatactttaaggtcgcaaggttgttcagccagactctggtaccgtccggtagaaccacttcctttacgataccttcgttggcaacggcgaccattaattgctggtctgccccgttatgatagaaccagtacccggctccgcctcccataagaagaatgacggcaataacggcagcatatctcatccaacgatgcatacgcagcagtttggcctgtttcccttttgcttcatccaactttttgtataacagcttttcagcatgagctatccgttgttcgtcggcatatcggtcgaatttacccaaatgataaatttcttccatgcgaaagagttgacgggcattttcttccgattctttcatccaagcatttacttcgatgatttcttcttccgagcattgcccagtcaaatatttattcattatgtcttcacttagatttctcattttcttttccttcatataaataatacaattcagaacctaaaaacacttagcttacttgcacaaaaataagactataatgatccaaagaggatctagacgactgcgtaagtacttcagtgccttgtacatatgtgcttctaccgtgcgtagtgaaaccccgaggacatcggctatctctttgtttttcatatcatgcagatagctgagtttgaaaacttctttgcacttgtccggaagttcgttgattgcatcgtagatttctttccgtagttcccggtcttcaatcctccggatcacttcgttgttgtccggttgatagaattcggcacgcctttggttgatttcttccatggcggcgcagtagccgtcttccacattgcgatgtttcaggacgttgagagcacgggtgtaaacggcacgatagagaaaggcttggatctgatctcctatctctatggtatctttccgcttccataattctacaaatacatcctgcactacgtcctccgcttcttcctcacccactagacgggtggcgtagaaaatcaggttgggatagtatctgcggaacagtgctttataagtaatatcgaagttttcgttcatgctctcggtcagttaagtttggttttatttatggattcttttcttcgaatatgacgcctattgctttaggggtgttactcatttcgaattccacagtagctccgctcatgatctgttcatgggtgagataagtcttatcgtaaggttggccgtccactttgattgactggatatagatattttctttgtttacgttcggagcgagtactgtaaaagtcttgccattggcgagatgcagcttgatttccggaaataggggagtgcctatttcatatcttccgctgaccggatttacaggatagaatcccatagcactgaatacgtaccatgccgacatctgtccgcagtcttcgttgccgcaaaggccagccggttcgttcttgtagagctcattcattacttttgccacgtaatattgagtccggtcattgaatcctatcgaattgaacaggtagataacgtggtggctcggttcgttgccgtgcgcgtattgaccgatcattcctgtgctgaaaagtgggagctcgtcatcttcggacggatgataggtaaacatactatccagcttttccgcaaaccggtttttgcctcctacgagattgaccagtccgtcaacatcatgctgtacagaccagaaatattgccatccgttgctttcgcaaatatgcggagtatagtcgtctgctttgaaatctttgataaagacgccttcgtcatcacgcggttgcatgaatgaagtggccgggttatagacattcttgtagttttgcgaacgtttatagaattcgtctgcaatatctttcttgcccattttctgtgccatttcggcgatgcagtagtcatcgaaagcatattccagtgttttggataacgaccagttttctgcgttatagctatccgtcacgttataaggtatatatcctaattttttgtagagcccgatgccccggtaattgtccaggttggcagttgctacgcaggcagccagtgccttttccgcatcaaagtctccgattcctttcagataagcgtctgcaatcaccggaacagcgtggtaaccgatcatcatgtccgtttcgctgccgtagaagttccataccggcagacgtccgttctgttcgtagaaagcgatgaaggatttcaccatatcgttgacacgctccggttcggtgtaggtaaaaagcgggtgagcggcacggtacgtgtcccataaggagaaagtgctgtaatttacccaaccgtcggcttggtgtactttcttgtcgggaccgtaataagctccatccacatcactataaattgtcggggcgatcattgaatgatagatagctgtgtagaagttcactttatcatcttcgttgtcactttttacttcaatctttccgagttggcagttccagttagctttggttgcagccagatatttgtcgaagttgttttcggggacttcagcttgcaggttcttggcagctccttccatgctgacgccggaaatggctgtgctgacaagtatctgctcgccttcttgagtgttgaagtcgaagcgtgcgatagtagctgtgccgatacgtttgttctctttgacgatagccattgtatccagttctattttctcgaaaggcttggagaagcgggtacggaagtagatgtgctgatctcgtgcccagccgtcagagaaacggtaaccttggatagtgacggagtctatcacctcaatgtgagagtcgttggtaaagtcccaattcatcgctttcttcaagttcaggaagatagcggattgagcttcgggaaaggtataccgttggataccgcagcgttcggttgccgtcaattcgacgttgatattataatcggtcaggcgtacctgataatagcctgcataggcgctttcgtcatcgtgggagaacttggagtgaatgcccagtggagcttctgcttctttgtaaggcagcgtgacaggcataaaagatatatcatacagatctccagctccggtaccggagaggtgcgtgtggctgaatccggcaatcgtgctgtccgggtaaaaatatccggagatgcggtcccagccggggagtccgttatccggactaagttgtaccattccaaatggcgcttgtgcgcccggataagtgtttccggtgaagtctgttcctataaatggatttacataagatgtgtaatctatttcatgtttctcttgtgtaggggtacaagaaatcagcatgcagattaacagcaggcatagacaagtgggtgttctcatcgttctttgggtattagtgattatttattttatttatttgaaggataagaaaaataattaatctgcgtgcaaaggtagaaaaaaactgtgacaaccctatattatatacgcaatatttttaaagtgaggaagatagactttataattgtgtttgtgcttcccgatatcggagatgtccctcactggtgtcggagaccgagcccttggtatcttgattcaaaccttctctgtgtccggatttggatataaaaaatagagtgtgtctcacagtaattcctaccttaagacacactctatttattttatttatttacttactcttagattcctgcaagttcgagtactttttcaactgctgccggtaacccgtcagcgtttttgcctccggctgttgcaaagtgaggctggccgccgccgccaccttgaatcagtttggcagcttctttcaccagattacctgctttcagaccaccggctacgaggttatcgctaatcataactgtcaacatcggtttgcctgcatccgtacttccggctacgaagaataagttttctgtaatttcgccacgaagctggaaagcaatattcttcaccacttctgcgggtagaggagcacagaacttgattactttgatgccatgaatttcctgtatattcttcaacagtctttctttcaaggccgcttctttttctttcatgaaatcttccacttgtttcttcaaaccggcattctcttcaatatatttgcggatagcaattcccaagtcaggagtgttgttgaagagtgccttcagatcgctgagcgtatcctggatagtatccaacatttcttctacacgtgcacctgtgtaagcttcgatacgacggacaccggcagcaacggaactttctgagacaatcttcaccatgccgatgtttcctgttgcggctacgtgtgtacctccacaaaactcaatagaagaaccgaattgaatcacacgtactctgtcaccgtatttttcgccgaaaagagcgatagcacccagctcttttgcttcttcgataggaatgttacgatattccttcaaaggaatattggcacggattcttgcattaacgatgtgttccacctggcggatttcttcgtctgtcaccttctggaagtgagagaagtcgaaacgcagtgagtccggagtgaccaatgaacccttttgttcgatgtgttcgcccaatacttcgcggagagcagcgtccagcaagtgagtggccgagtggttggctgcacaggcagcgcgtttgtcggtatttacacaagccatgaacggagcttccgggtgttccggtaactttttggtaatatgtatcggaagattgttttctttcttggtgtcgattacttcaatcgtttcaaattcgctgaccaatacacccgtgtcacctacctggccaccactttctgcatagaacggagtgtagtccaatacgatttgatacaaagtctggttcttttgtttgatctggcgataacggaggatagaggcttcatattcggtataatcgtaacctacaaattccgttgttccttctttcagtgtaatccagtcgcctgtctcgatagcggcagcgttacgtgcacgctgtttctgctgttgcatttccgcgttgaattcttcgaggtttacagtcattccgttttcgcggagaatcagctctgtcaggtcgagcgggaaaccgaatgtatcatataaggtgaaggcatctttgccgctgatttctatttttccggcagccttggtatcttccattgtcttgtccaacagacggattccggtttccagtgtgcggaggaatgcttcttcttcttctttgataactttctcgatcagggttttctgtgctatcaattcaggataagcgtctcccatgttatcaatcaataccggaagcaacttgtacatgaatgcttgtttttgtccgaggaaagtatatccgtaacgaacagcacggcggaggatacggcgaattacataacccgcttttgcgttagagggcaattgaccgtctgtgatagagaaagcgatggtgcggatatggtcggcgatcacgcgcatagcgatgtcctgctgtttgtcttttccgtattctgtgcctgacatgacagcaatcgctttcagcatcggttggaatacgtccgtatcatagttggacgttttgccttgcagcgccatacagagacgctcaaatcccataccggtgtcaattacttttgccggaagcggttcgaggctactgtctgctttgcggttatattgcataaatacaaggttccagatttcaattacctgcgggtgatcgtggttgactagatcacgaccggagatttttgcacgttcttcagcaggacggaggtcgatatgaatttcggaacagggtccgcaaggtcctgtatcacccatttcccagaagttatcgtgtttgttgccattgatgatatgatctttcggtaggaattgctcccagtaagaagcggcttcgtcgtcacggctcagtccttcttcggggcttccttcaaatacagtggcatagagatgttccggattcagtttcagtacttctaccaggtattcccatgcccagttgattgcttcttttttgaagtaatcaccgaaggaccagttgccgagcatttcaaacatggtgtggtggtacgtatcgtgtccgacttcttccaggtcattgtgctttccgcttacgcgcagacatttctgagagtccgcgactctttggtatttcgccgggtggttacccaaaataatatctttaaactggttcatacccgcgttggtaaacatcagggtagggtcgtcttttatcaccatgggagccgacggaacgatgtggtgtcctttcgactcaaagaaattcttgaatgaatctctgatttcttttgcagtcaacatatcttctatatatctatcgttgaggttaatattctcaaaaaactgtgcaaagatagcttgtttttattacttttgccgtattaacaagcgaaatatttccaaaaagatgcgcaaagtatactatatctataatccacagacccagacttatgaccgaatttatcctactgtacggcagcgtgcgctcagtatcctgcgcagactcttttacggtatggggctgggagcaggctgtttcatcgtgttgctctttatcttcggttcaccgtcagaaaaggaattgcgaatagaaaacagtcgtttacaggcgcaatataatgtactttcccgccgtttggatgacgccatgggggtacttcaggatattcagcagcgtgatgataacttgtaccgcgtgattctgcaagctgacccggtttctccggctattcgtcaggcaggatacggaggtacgaaccgttatgaagaacttatggacttggccaatgccaagcttgtcgtaaataccactcaaaagttagatgtattgtccaaacgactgtatattcaatccaaatcttttgatgatgtggtggatatgtgcaagaaccatgacgagatgttgaaatgtattccggccattcagcctatttccaataaagaccttcgtcagaccgcttccggttacggaacgcgtatcgatccgatttatggaacgacgaagtttcattccggtatggacttttcggctcatccggggacagatgtatatgctaccggcgatggaactgtcgtgaaagtgggatgggaaaccggatacggtaatacgattgagatagatcatggctttggatatatgacgcgctatgctcacttgcaaggtttcaatacgaaagtgggtaagagggttgtgcgtggtgaagttatcggaaaggtggggagtacgggaaagagtaccggaccgcatcttcattatgaagtgcacgtgaaaggtcaggtggtgaatcctgtaaactattatttcatggatctgagtgcagaagattatgagaagatgatacagttagctgccaaccatggtaaggtgttcgattaaattttaaagaaacaaaagaatgctatgctcaatacggataaggaattaaagctgtattattcaataggtgaagtggccgatatgtttggtgtcaatcagtctttgctccgtttctgggaaaaggagtttccacagatctctcccaaaacaacgggaagagggatacgccagtatcgcaaagaagatgtggagacaatcggactaatttatcatttggttaaggaaaaaggaatgacccttccgggtgccagacagcggttgaaagataataaagaagctactgtccgcaattatgagattgtgaacagactcaaagcgataaaggatgagttgctggcaatcaaacgggaactcgacgggcgggagtaaattttctcgcccctacttgcaaacattttaattcgatgactattcttctacgcggtttacctgcttgatattctgaatcttcttcaggttgttacagattgtctttacgtcttccacatcatgtacccacaattgtatctttccttcgaagatgccatcgttggtttcgattgtcaatttgcggatgttgacattcagttgtcgggagataacttgggttacttcatttaaaagccccatactgtctattccttttatatatatatagacgaggaaggagagttctttgtgggtatcccattcggtagccagaatacggttaccgtaactgcttttcagcttggctgcaaccggacattggcgtttgtggataataatccggtcgttctcatcgacatatcccaaaacatcatcacccggaatgggatgacaacattctgccatgatatacttcttttgaaggctttcttccgtcagtttgagtatttgtttcgggttaattttttctttctcttgaggttgctctttttcttccggcttttctttattggtattgccgaaagagaaagtgaggtatttcttccagttgctggtttgtttttctttcagttcgttcttgtccacttctcccaaaatgataaccttgctgccgatagctgccagcagttcctcttcgtttttggcattatgcaatttacgcaatttttcaatcacggaatcttccggacggatttcctcttttttgagaaattcgctaaggatttcttcaccaagcttttggtttactttgcgttctttgcgcagaatagcggctattttggcacgggcacgggcggttgttgcaaacacctcccattgcggttgtacacgttgcgatttagatgtcagaatctccacctggtcgccactttgtaacttgtgacttagtggtacgagtttatgattgactttggcgccgatacaatggctgccgatatcagtgtgcagtgagaaagcaaagtccagtgctgttgaattttgcggcattgtctttaactcccctttcggtgtaaacacaaatatttcggaagcaaagaggttcagttttattgtatccagaaagtcgatagcgtccggttgcggatcatccagtatttccttgatcgttttcagccatttctctaattcgccttcgtcctcactgccgcctccctctttatatttccagtgagctgcgaagccttgttcggcaacgtcgttcattcgttcgctgcgaatctgaacttcaatccattgcccgttgttccccatcagggtaacgtgcaacgcctgataaccatttgccttcggatgacttacccagtcacggaggcggtcaggatgaggcttgtatattttggagatagagacgtagatatcgaaacagtcgttgagttcctcctctatgttgcgaggctcaaaaataatacggacggccagtaagtcgtagatttcttcgaaaggaacgtgcttggtctgcatcttgttccagattgagtagattgattttacgcgggcgagaatccggtatttcaatcccattttatcgagttgtgtacggataggagctgtgaaatcgttgaataccttgtcgcgttcggctgctgtcgcattcaacttttcttctatctcggcatattcttcgggatgttcgtatttgaaacttagattttcgagttcggtctttattttataaagccccagacggttggcaaggggagcgtagatataaagagtttcgccggctatcttgtattgcttgttgggcaacatggaaccaagggtacgcatattgtgcaggcggtcggctattttgataaggatcacccggatatcgttcgacatggtaagcagtaactttttgaaattctctgcttgtgccgaggcacggtcgccaaagatacctccggatattttagtaagtccatctacaatttgggcaatctttggaccaaagatgttttcgatatcttctaccgtataatcggtgtcttccactacatcatgcagtaacgctgcacaaatagaagtcgatccgagaccgatttcgttgcatacgatactcgccacagcaatcgggtgcataatatatggttcgcccgaacggcgtttgattcctttgtgcgcctgattggcaaagttgaaagccttcgtaatgatttcaacacgtttgcgatgttttgtagcgagataatcattcagcagttcgtggaacgcctgattgatcatctcttcatcagctatttctttgggggtcagattatccataattgttatcctttcacttgcttacttttgcaaaaataagcaaatttccgaacggtgcaagcgggataccgtttatttgtatattttcaatcgttttcctgctgcaatcttggtgtttgacattccgttccaccgctgtatatccttaacactgacaccatattttccggcaatagtcgacagagtgtctccactttttattgtgtagtaagacagttttccttttccagcaacggctgttgtagctttgcgggtactaggtgtattctcttttacggcaacagtttttcggttacggaacaattcattcgagcgatgtgcatagattgtatcttgtttgtcgatgaaattgctgattgcttcgatcggcaaccgcagggtataaggcttgctgtcacccgggataacttgtttcttgtactgtggattcaaactctttatttgatccaatggcacattacaaagatcggcaatctgttcgaaatgcaggttcttgttcacttgcacagtgtctgtgcttgccggaatattagtttccattggacaaatattgtggtcgcagtaataggtcatcacatagttggctgcaataaaggcaggtacataaccacgtgtttctttgggtaataaattgtagattttccagtaatccgtttcaccgttggcgcgacggattgctttgttgattgtgccgggaccacagttgtaggcggcaattacaaggttccagtcgccgtaaatggcgtacatctctttcagataacgtgcggcagcccatgttgctttgatcgggtcacggcgttcatctaccaaactgttggactccagaccgtagattttacctgtgccgatcatgaattgccacaagcctgatgcgccggcacgtgatacggcggaagggttcaaagctgattcaatgataggaagatatttaagttccaatggaagtccgtatgcatccaatgcttcttcgaaaatcggcatatagaagttgcaggcgctcagcataaaagaaacttgattacgtaggcgtcctgcatacatatctatgaatttgcgtacaatgtcgttgtatggcatttccataatagccgggatgcgtgagaggcggtccatgtaaacagaatcactgaataaaggatttacttcagccgtgctgcaatctttgcccagatcaatgtaatttttggctttccaatcgttcagcaaactgtcgagcggataagtcatactcataggcaggtcgatgctttccttacgttctgtaccattttcacgaatcaccacatctacactttgggcttttacttgggatgttgccaatagtaaaagaagaataatcgaacaatagttaactaatttcttcatgcttcaataataagatcaatctaaattgtgtttttaaaatcgtaatacgcattgcaagccgaccgatttgcttttcaaactatttgaacggaactggttgttattgtcgataactgccggttccactttcatacttaggtcgggggttatatcgaagttggacaactcggcatctacataagcgtcaatgatagagatgaggtaaactccgataaatgcaaatatactaaggtcccggtaacgccggaacatatcctttcttcgttttaacgtactttttaattgttcctcgttgtaagaggaattagggggcagcagatcttcataacttttagtgtttggattgctgtccataatgtccagataggcttgcgaatagtctttatacatcttgccattccaactcaaggcatacgcacaaccggcaaatcctccatatataataggcagtttccagtatttacggttgtaaatctgtcctccacccgggaatacgacggcaagccaggtagctttggtcggattaggtacgaatatctttttattaatgtcttgggatggaggcggaaccgtatcggtattcacgacaatggctgccggctgttctatcttcttcagttcttttttgttggctgcatcaaggctgtcggctacttgtattttagctgccgataaactgtcaatagactgaagatgcttaggtggtaacattatgctgtcttttcgcaatgaatcttgctcttgcatagggtcacgatgtcttcgtgcacgggcttttggcggttctcggtgcgtaatggtagtatctttctgaactggagttacaggggcttgtgcatacacatcaatccctgccatctgtaaaaaacagagaagcagggtgctgattagtaactgatatttcttgttttttcttgtcatttatttctttagcgtatcgaagatttccatgatacgttccagttcctcctcattactgaaaggaatactaattttcccttttcccttttcggagcaagtgagttgtaccttggtgctgaaaaagcctgaaagttgttgcttcagtaagttaaattcttccggaagtttggcacgtttcggagttattttccgcgtaccgcttttcacagcttcaccttcacttaatgattttacaatctcttcgactttgcggactgaatatccgtgttcttgtatttcttcgaatatttttacttgtagtttagggtcgcctaatgaaatcaacgcacgggcatgtcccatgtctaactgcttgttttgtagcgccatttggataggagcgggtagcttgagcagacgcaagtaattggcgatagtcgtccggttcttgccgatacgctcgctaaggcgttcttgggtcagttcatattggtctagcagatgttgataagccaatgcgatttctacagcattcaggtcttcacgctggatattctcgatcagcgccatttccatcatgttttcgtcgtcggctgtgcggatgtaagcagggattgtttttaatccggctctctgtgaagcacggtagcggcgttcacctgcgataatttggtattcattgtccgataccttacgtaaagtgatcggttggatgatacctatttccgctattgaatcagccagttcctgcaaggccgtttcgtcaaactcacggcgaggctggttagggttgactgaaatcttagctaactctatttcgttaatggaagaagaaccttcggttttcacatcatccattgagagcaaggcgtcaagtccgcgtcctaatgcatttcttctttgtgttgccatatcttcttcgttacttatttattacggttaataatctctttagcaagagccaggtggttcttggcaccggtggaatccgcatcataaagaatagtcgggacaccgtagctgggagcctcgctcagttttacatttcgttgaattacggtgttgaacaccagttcctggaagtggcgttttacttcatcgtagatttggtttgcctggcgcaggcgtgaatcgtacatcgtcagcaggaaaccttcgatttccaatgccggattcaatttcgacttgataatcttgattgtgttcagcagtttgctgatcccttcgagagcaaaatattcggcctgcacggggataatcacagaatcggctgccgtcagggcattgattgtaataagtcctaatgaaggagaacagtctatcaggatatagtcatattctttcttcaaaggagtaagtacttctttcagtatcttttcgcggtttgggaggttcagcatttcaatctctgctcctacaagattgatgtgcgaagagattacttttaaagaatcaatttcggtgtcatggatagcgtcctgtacgttggctctgtcaatgatacattcatagatagtacattccgactgcttgatgtccactcccagaccggaggaggcattagcttgcgggtcggcgtctactacgagtacctttttttcgagtgtagcaagcgaagctgcgagattgatcgtagtcgttgtttttcctacaccacctttttgattagccaaagcaataatttttcccatattctctaaatttattggcagcgaaataagtgataaatccttagagcgcctacgaaaaaagagaaactttgcaatttctgttgataagtcacctgttttgttaataactgtcggacgaaacagataccaaacttcgacaggttcatcatctacctttctctttatgagcttgcaaatatacatatttatattggatatttatttctttttttgctcgcttgcagaagattaagatttgtaaacgggtagaaacagggaaggaagatactttttcatctggaggaaagagggtttggaggtacggcttctttttgttacttttgtgcgaatattaaaaaggaaaggattgaatatatggaaaataagaagccgttgatactcgtttccaatgacgatggggttatggccaagggtattaatgaattagtgagatttcttcgtcctcttggggacattgtggtcatggctcctgactctccgcgttccggtagcggatgtgcgctgacggtgacgcagcctgttcattatcaactggtcaagaaagaagtcggattaacagtctataagtgtacgggaacgcctaccgactgcatcaagctggcgcgcaataccgttctcgaccgagaaccggatcttgtggtcggaggcattaatcatggagataattcggcaactaatatgcattattccggtactatgggagtggtggttgaaggttgtctgaatggtattccttctattggtttttcgctttgtaaccatgaccatgatgcggattttgaagctacgggactctatgtacgcaagatatctgctatgatattggagaaaggacttcctcctttaacttgtttgaatgtgaacttcccgaatactgccgatatcaaaggaataaggatttgtgaacaggcaaagggacgttggaccggggaatggactccttgtccccgtttgaatgatacaaattatttttggttaaccggtgaatttaccgatcatgaaccggaaaatgagaaaaacgatcattgggcgttggttaacggctatgtagctatcaccccgactactgttgacgtgacggcttatggttttatggacgagcttaataaatggttcaattaagaaccttcaactatcatgaagtattatctgattgttggtgaggcttccggtgacttgcacgcttcccacttgatgagtgccttgaaaacggcagatccgcaagccgattttcgctttttcgggggcgacctaatggctgctgttggcggcaaaatggtgaagcattataaagagctggcatatatgggatttattcctgtattgcttcatttgcgcactatctttgcaaatatgaaacgttgcaaagaagacattgttgcttggaatccggatgtcgtaattttggtggattatccggggttcaaccttgatattgccaaatttgttcatgcaaagacgcaaataccggtctactattatatatctcctaagatatgggcatggaaggagtatcgcatcaagaatatcaaacgtgatgtagacgaattgttctctatacttccttttgaagttgagttttttgaagggaagcatcagtatcccattcactatgtaggaaaccctaccgtggacgaagtggctgcttatcaggaaatgaacccgaaagactttgctgcgtttattgcagcaaaccagttggagaataaaccggttattgctttgctggcaggtagtcggaagcaagaaatcaaggataatttgcctgatatgctgaaagctgcttctgctttcccggattatcaactggtattagccggtgcgcccggcattaccccggaatattatgaaaagtatgtggggcaggcgaacgtaaaaattatattcggacagacataccgcattttacagcatgcagatgcggctttggtgacatcgggaacggctactctcgaaacagctttgtttcgtgttcctcaggtggtttgctatcatactccgattggaaaagttatttcgttcctacgacgtcacattctgactgtgaaatatatttcattggttaatctgattgccgactgtgaggttgttaaagagttggttgctgataccatgacggtaaagaatatgcagtgtgaactggctaatcttcttgaaaatgaagtgtataagaaggaaatgcttactggatatgattatgtggcggaacggttgggacctgccggtgctccctgtcatgcagctcatggaatagtgaagctgttgaaaaaataactttctttttctgaataaacgtaaagccgatgcagtaattgcacggcttttttatttattaagcagaagactaaaaaagaaaggaacagatatgaaaaaatttaagtggcttttaggtatgttagtactggcactaatgccaatgttgcaatcatgtgatgatgatgatggatattctatcggagatttcagttgggactgggctacggtccggactaccggtggaggaggttattatttggtaggtgaccgttggggaatcatcgatccggttgctacttctataccttggttcaaacctgtggatggtgaacgtgtggtatcctttttcaatcctttggctgacatgagtgatgaaaaaggtgttcaggtgaaaatggaaggtattcaggaagtgttgactaaggaagttgaggaaatgactgttgaaaatgaagaagaatttggaaatgatcctattttgatttatcagggtgatatgtggctgggaggaaagtttctgaacattatcttccgccagaatttgcctcgcagtgaaaaacatcgcatcagtctcgtggagaataagatagcaactgagccgggtgaacccgaaactccggaaactttaagcatcggtgaagacggctatgttcatttggagttacgttataatacgtatgatgatgtaacagactattgggggtggggacgagtttcctataatttggaaaagttctacccgacacccaaagaaggtgaaactacgatgaaaggttttaaggtaacgattaactctgaagaaaatggagaaggagtagtggtagtacttgacttggaacatccggtcggtgtgccggagaaagctaaagatgtacatgctacatctgtaatcagataaataacctaacctatgtaactgtgtgtaaaaaaaggtcgggataattttcgcaaagaaagtttcccgacctttattttttatctctattctgaatatacagatttaaaaccaagtgagagcataaagatagactactgctgccggtatagccattaatgaactgtcgaaccgatcaagcatgcctccgtgtcccggaagaattgtcccggaatcttttacgtgaagttggcgttttagcaatgattctgtcaagtcaccccaagttccgaacactacaactaccagcgccaatcctgcccattgccacatcgacatgaacggaaaataatgtgccagtataaaggaagaaccaatagcaacgatacctccgccgatagagccttcccacgatttcttaggagaaatacgttcgaacaaacgatgctttccgatcagcgaaccgatgcaatatgcacctgtgtcactcaaccaaaggaagatgaagatagataacggcaaaatcgggttgtagctaacactgctgtattccgaactaggatcattgtggaaagcaagtacgttcagtagtgcgaatggcagaccgatgtatagctggctaagcatagaatatgcccagttcagcaccggattttcctttttcaggtataactcgctaatcattaagtagagcagtagcagtacgtaaggaataaagatcttggaatcagctgcatcaatacagaagcccattactgcaaggaagagataagctcctcccagcatgataatcgttttatttacgtttactccgtcagcacgcatatttactagttgtccaaactcataaatagtcaaggcgctaatgattatgaacagtataccgaaactgaatgatgtgtaaaggatgcatcccaccagaatggcgacgaaaagcacacctgtaatagcccgtttgataaaattgctagccaaaatatttgcgttttaagttgttttctttccaccttccgccgagatcacctttttttctatggaaactttaccttccacggtaatcttagcttcggttgcctctttctcctctgtagagttttcagcttcttcttccttgatttctttctccttctcttttacctcttcggccagtctcttttccgcttcggcagcttcctgactttctttggcagccatgatttcttctgagcgggaagcccaagggcgttttccaaagatacgttcaacatcttcggcaaagattacttccttatcaattagtaattgagcgagctggttgtgtccttcccgatgttcggacagaattttttttgcacgttcatattgctcattcaccatattcttgacttccgtatcaatcagttcggctgtcttttcactatatggacgattgaaagaatattcttcattgttataatagcataagttaggcagtttgtcgctcatacctaaataagctatcattccgtatgcttgtttggtgactctttccaagtcgttcatagcacctgtggagatacgattgagaaataaatcttcggcagcgcgtcctcctagagtggcacacatttcatcgagcatttgctctttagttgtgatctggcgttcctccggcaaataccaggcagcacccaatgcacgtccgcgaggaacaattgtcactttaatcaacgggtttgcatattccagcagccaggagatcgaagcgtgtcccgcttcatgcagagcgatagaacgtctttctgcttctgttgtaatctttgtcttcttttccaaaccgccgatgatgcggtctacggcgtcaaggaagtcttgttttccaacgaacttcttgccgtgacgggctgcaatcagggccgcttcattacaaacattggcaatgtccgcaccggagaaccccggagtttggcgggcaagaaggtccacatctacagtatcatctatcttgatcgggcgcaaatgcacaccgaatacttctttacgttcattcaggtcgggcaagtctacatgtatctgacggtcaaaacgtccggcacggagtaaagccttgtcgagtacatctacacggttggtcgcggccaggatgattacaccactattggaaccgaaaccgtccatttcagtcaataactggttcaatgtattctcgcgttcgtcatttcctcccattgcaggattcttgccacgggcacgtccaacggcgtcaatctcgtcaataaatacgatacaaggagctttctctttggcttgcttaaacaagtcgcggacacgggaagcacctacgccgacaaacatttccacaaagtcagaacctgccagcgagaagaaaggtacattagcttcaccggccacagctttggcgagtaatgttttaccggtccccggagggcctaccagtaatgctcccttaggaattttacctcccaagtctgtatatttttgaggttctttcaagaactccacaatttcttctacttcctgtttggcttccgccaggccggctacatctttgaatgtaatcttgatcgcccctcctttttcgaaaagttgggcttttgatttacctacattaaacacaccgccaggacctccactaccaccgccactcatacggcgcatgaagaatatccataaagcaatcagcagcacaagcggcaggacctgaatcaggatagcagggaatatatctgatttaggcggataatccgaggtcccgtcaaaatgaccggcttctttttctgcctgcaaaaattcttccagtttgtcagtagacggcgccctacttgtgatgatcgggttgcgccctactttggtagagtccgctccgaatacggcacctacggaattaggtttgagataagcctcaatcgacttgtcctcatatcccagcactttgctgacataaccgtttttaacgtaatcctgaaattcgctgtatgtgacagctttgtttccggctccccttgaatcactgccccaccagaggccgagaagcataagggcaataatcatatacatccagttcaagttgaacttgggcatattaaccttgttgttaggtttattgctattgtttttgttgctactattattgtccataatcgttgattagtctaaatcggggatttgaataagtttggcatctgcccaaaggtgttccagattataaaaggctcttgtttccggtagaaaaacatgtaccagtacgtccgcatagtccatagctacccattctgcatttcgaagtccgtcaacggcaaaaggtttgctgtccgcacctttacgggtaaattctttgatagaatctacgatagcaccaacctgactgggagaatttccctgacaaataacgaagtatttacagatagtatcttctatattggttaaatcggcaataatgatgtttttaccttttttctcttgaattccctcttttattttttcaattaatactttagtatcgttcattcttttaattgagattaataattcatgttctcttttggtttataacaaaaaaggcttcccctttgtttctgattataaacgtgatatttttgacaaatatacgctgatttattggatacaagaaagttatcacttaatttttgtgttttttagtggagatgcttttatttgaaaagttaatttggggatttttgcaaaaaaaatagtggaaatgttttgaattcccaaaatatttgtatctttgcacccgcaaacgaaaataattgggctatggtgtaatggtaacactacagattctggtcctgtcattcctggttcgaatccaggtagcccaacaaaaaacaatggttaattagaataaaccctgctaagaattagttcttgcggggttttatcattttttgcccgcttgaaatttaaagataatgtagactaattcggtgacagtttttgaaggcgtcaaatgctatcatttaataataaagaagaacaggctttattgttcaacgaacataaagcctgttttatattttcagtagcaactttctttacaaaaagattattcttctgcttttatagattcgtctattactttaatcttctgtgatacaagttccaaatctgctttcagcttttctaccttacggttcaactcggttaacaggctgctgcctttctttgaggtggaagtcaggaaacccaggttattttcgtaagtctggagttcattcttcatactctcgtaagtacgtaccagcttttcgcgttctctgtatagagattgtggtccgccaccttgtatattgttgatgtttgaccggaagttacttaacttcttgttcgaagcgctaatgttgaaacggtcgaacaactggtcgatcaatccatgatattgcttgtacaacttatctttttctttgaatggtacatgaccgatagaattccattctttcatcagatcccgtaccagtgtgctggcttcctcgatatccatgttttcgtctatggacgacaacttttcgatcaatgcctttttcttctccatgttttctacttcgatagagcgttgtgaagaagtagccttgtttttctgttcaaagaaatagtcacaagccgtgataaaacgtttccaaacagcgtccgaatgtttcttggctaccggtccgattgtcttccactctttttggagtttcgtcagggtatcggcagttgctttccagtctgtactgtcttttaaggcttccgctttttcgcaaagcgcttttttcttttccaaattctcgttcatgccttcttttaagctcttgaagaattctccttttttcttgaagaagtcgtcgcaggcacggcggaaacgttcgaatatcttcacgttcatcttttggggagcaaaaccgatagttttccatttgttttgcagggcaatgacttcttgtgtcttgttttcccaagctgagaatgttttcagttcatcgaactctatcgcttctacgatttcgcagataacggtcttttggtccagattatgttgttccgcttctttcagcgtttcaaaatgtagctggtgacggcgatttacagccgtagaagctgctttgaaacgattccaaatctcgtcgcgcaactctttcgctaccggacccgtatcacggaattcctgatgcaacttctggagttggtggaaagcagaaaccacatcctcttcatcagccagcttttcggcagcctcgcaaagatgcgtctttatttccagattcttcttgaaatcatattcgcggaattcgttgtttaactttaatagatcgtagaatttctctacgtataattgataattcttccaaagttcgtttactttgccttgcggaaccaacttcgtctcattccattgctgttggagctttttgaattccgtgtaagacttgttggcatcgtcacccgattctaccaattctttcagttcttcgataatggaaagtttgacttgaaggttttcttctttctgacgttcctgctcggctacaagtttgcttcgtttttctttgattacccccattaggcgtttaaattccacttccaccgggtcttcttcgggaacgaaatcttcttcggcgccgccgttgtcggtaaactgttttttagcagcttccagttcggcattatgtagcttgtagaatgattgtttcagattgtctatttcctgcttgttcgcattctctgcgtcttgtgcaagctctttcaatcggtttagtacgtcttcctttgtggcaggtttaggagctgcttcaggttgaacttcggcagtcgtttcttcagacggagtttctgtaatggcttcagaaacctcgactgttttcttttcttcttctaattccccttggttcaagggctgattagtgtcatgagcgtccatcattgtatattagttttgggtcacaaattaatgaaataaaacgattacttcatactattttgcttattttttttcgtttattctgattttatgataataaaacggtgattcccatgtagagcatcatgccgataatgtcgtttgtaatagctataaatggtcccgttgcaatggcggggtctattttaagtttttcgagagtcatggggaccagtgtaccgaaaatagaggcaaacatcactacggcaaacaaactgatagatacggagtaggtgactgttgctgttgcaccgaaccgtatgaaattatatgtatataccagcagggaaatgatagtagcattgattagggccaccaccgcttcttttgtcacttgtttgaatgtatttttggcatccagcgaactgttggcgaggccctgtacgacgatagctgacgattgcgttccgacatttccgcccgtaccaccgatcaacgggatgtataaagccatttcaggatgagtggcaaaggtcgaatcgaaatttcccaatatcatcgagttgccgattccgccgatcatgccgatcagtagccacggaaggcgtgccgttgtctggcggagaacattatcatccgtttctacatcctgtgaaagaccggaagccaactgatagtcacgttccgattgttcacggacttcgtccatgacatcgtcaacggtaatctgtccgacaagccggccgatactgtcgatcacggggatagccaccaagtcatacttctcgatcgcttgcaccacctcgtctatcggcgtatccacgtgtactgaaatcgggtctttctgcatcacgtgttttaccttggatacggaaggagacgttatcatctttttgagcgggaatatacctcgcaggcgttcatcgtcgtcgatgacatatacataataaatctcgtccagctcttccgcctgttggcgcatctctttcaggcattcgggcatactccagttctcattgacaagcaccatttccgtacccattaaaccaccggccgtattttcgtcatatttcaacaaatcgacgatgtctccggcttgttcgatgtcctcgatgtgcgaaagaatctcttcctgtttgtcctcgtccagttcacgcatcaggtctacggcgtcgtccgtatccatataatccacaaaccgcttggcgattgtttcggaaggaagcatatcgagaagttccttacgggcgtcctcatccatttcgacgagtacgtcggcagcggtttcgttattgagtagtcgatagacgaacttggcttcttccgggttcagatcgttgcacaattcggcgatgtcggccgggtgtaggtcggcgagaagctcttttacctggtcggcgtctttttgctcaatcaggtgtttaacgttgtcaatgtattcctcgttcatctgcttgtcaattacaaattacgaattacaacttacggctgaaggttcatctctttcagcgctatttccactttattggtcagatcgataaattcttctaccgatagctgttccgggcgtttattgaataatgtgtcttctgtgagcggacactcttttcccagaatcggcttaatagagttgcgcaacgttttgcgccgttgattaaaagtcgttttcacaacctgcttgaacaacttttcgtcacagccaagctcctgcgtatcattgcgtgtcatgcggataacggcgctttttactttgggcggcgggttgaatacgtgttcgctgacggtgaacagatattctaccttataccatgcctgtatcaatacgctgaggataccgtaagttttgctgcccggtccggcggcaatacgttcggctacttccttttggatcatgcccgtacaacaggggataatatccttgttatccaacattttaaagaatatctgactggagatattatacgggtaattacctgtcagtacgaaaggcttgccgtcgaacagccggtggagattcattttcaggaagtcgtcctcgatgatatgatcttccagcgacggataagcttcgcggagataagctaccgattcatagtccacttccacgactttcaccggccgttcttttttcaccaggaactgggtcaatactcccatgcccggtcctacctccaaaataggcagttcggggaaggtgtcgaccgtatcggcaatatcttgcgccactttcaaatctttcagaaagtgctgtccgagaaactttttaggctttactaatttcatttaccaactaaataattacttttgcagccgacaaaggtaattcttttaaatgaagaacgtaccactatttaaaaaaaataaatagatgtgtcagcgaagctaatgaagaattaagcatgaagaaactattaaagaagacgctgaaactgatattaccgattgttttgggcggctttattctattttgggtatatcacaactttgattttacaaaggtgggtgaggtgttgctgcacggtacgaactggtggtggatgttcttttcgttattatttggggtgctcgcacaggtgtttcgcggctggcggtggaagcagatgttggagccgttggaagctttcccgaaaaggagtgattgtgtgaatgctattttcatatcgtatgccgcgagtctgatagttcccagggtcggggaagtgagccgttgcggcgtgctggccaaatatgataatgtttcttttgccaagtcgctcggaacggttgttacagaacggctggtcgatacattgacaattcttctgataacaggcgtcacggtgttgcttcagctgccgatatttgttacttttcttcagcagactggaaccaagataccttcgctcctgcatctgctgacttccgtgtggttctatatcgtcctgttctgttttatcggagtgggaatgcttctttattatttacggaagacgttgttcttttatgaaagagtgaaaggttttgtgctcaatatttgggaaggtgtgatgtcattgaaaggagtgcgcaatatacctctctttagtttttatacattggctatttggggatgttatttttttcacttctattttacgttctattgcttcgcttttactgctcatctgagtatcctggcggcgctggttatgtttgtaggcggtacttttgcggtgattgtgcctacgccgaacggagcgggtccatggcattttgcggtcatttcgatgatgatgctttatggagtaaatgaaacagatgccggaatatttgctctgattgtgcacgggattcaaacctttttagtagttttgttgggcgtatatggtttggcggctttgtcgttgaccaatagacagcgaaagtaatcactataaaaatagatttgttatgagtactattctttctttagctccacaaaacgtatggaagcatttttattcgttgacacagattccccgtccgtcgggacacatggaaaaagtaacagaatttctgattaacttcggaaaaggcttgggactggaatcttttgtagacgaagcaggtaacgtaattatccgtaaaccggcaactccgggaatggaaaaccggaaaggtgtgattcttcaggcacacatggacatggttccgcagaagaataacgatacggtgcacgattttgaaaaagatcctattgaaacttatatagatggcgactgggtaaaggccaaaggaactacgctgggagcagataacgggcttggcgtggctgctatcatggctgtgcttgaagcgaaagatttgaaacatggtccgctggaagcactgattaccaaagacgaagaaaccggtatgtatggcgcgttcggtctgaagccggggacagtgaacggagaaatccttctgaatctcgattcggaagatgaaggcgagttgtatatcggttgtgcaggcggtatggatgtcactgctacactggaatataaggaggtagctcccgaagaaggcgatatcgctgttaaggttacgttgaaaggcttgcgtggtgggcattccggattggaaatcaatgaagggcgtgccaatgccaacaaattgctggttcgctttatccgcgaggcagttgccagttacgaagcacgcctggcaagttgggaaggcggcaatatgcgtaatgccattccacgggaggcacacgcggttgttaccattccagctgagaatgaagaagaattgttgggcttggtgaaatattgcgaagacctgttcaatgaagaatattcgacgattgagactccgatcagtttcacggcagaacgtgtggaagttccggcaggtcaagtgcccgaagaaattcaggacaatctgattgatgctatttttgcttgtcagaatggtgtgacccgtatgattccgaccgttcccgatacggtagagacttcttccaaccttgctattataacaattgccggtggaaaagcggaaattaaaattttggctcgtagctccagcgatagtatgaaggaatatctcactaccagtcttgagtcttgtttctctatggcaggtatgaaggtagagatgacaggaggttattccggttggcagcccgatgtgaattctccgattttgcacgcgatgaaagcgtcatataagcagcagtttggcgtggaacctgcggtgaaggtgattcatgcaggtttggaatgcggtattatcggtgccattattccgggattggatatgatttccttcggtcctaccttgcgctcaccacattcaccggacgaaagagcattgattcctactgtacagaagttctatgacttcctcgttgcaactttggaacagactccaatgaaataaatgctattctttcctattatataataggtctcttatagaaaaaggcacggatgaaatgttatccgtgcctttttgtcatatttgctgccttaaatattacgattttacttcataacaaataaattaattgatgcaaatcaataaatatgctataaaacataaaattcttcctttttggggtacaatgtataaacaaaggctgtatttttgtgttgtataacatgtaaataagaggataacaaaatgaaaaggttagaaagattgtttagaaagatcggcgaagccgacgtacatgtttggggatattcaacaattaatattcgcccgaacgaggaagcttaattttttagttttcaagtattagtaatttaaaagtttaaagattatgaagaaaataagttctttagttagaaaaatcctcagtgaagtaggtcgtaacgaaatgcttgcatgggggtacagaattgaaaaatgagagagagaacattagctaagtttgcagtggggatacgttattgaaagcgttatccccactttttttgcttcttataagtcccggatattgtattcactgtttttttcgatagaagaaggttgtgtacgacaaaacagttaccgtccgagttagtttcctttgcttgaaactaaagtttcatcagttagaaactatggtttcatcggtaagaaactaatggtttcaagtaactgaaactgaagtttccagcgtatggaaccagggtttcgagccgcgaaaccaacagtgttaaggcgtagtgtcagtttttcatgttcaatccaattccaggtgacagcattattgccgtcacttgctgctgtcacttgttgctgtcacatctttagttgctcataatcatttggttaggtcgcgtttcgtgacaggtgacagatatatatcataaacaatttgttaggagaggattaacggcgataactctgttttatgatcacaatcattgtggttgttatatctgttatgattgtgcaaatctattatatttattcaaaaaaagatgattgtttaaactttatttctttactttgttatttatacagtgagacttatagcgaacttaaactagaaagattatgaaaataaggcagatttgtatggtggtgctgttatggttgggagtgattccggcagtgcaggcacagagtttcgacaaattatggaaagaagtagaacaggcaggaaaaaagagtttgcctaaaacagtaataaaattgactgacgagatttaccggaaaggagaaaaagaaaagaattccgcccagatgctgaaggcatatatgtggaggatgaaatatcaggaaatagtgactcccgacagtttttatgtcggtctgaccgggctggaacaatgggcgaaacaaacaaaacagcctatggaccgtgctatattgcactcattgatagcgggaatctatgctgattatgcagccaataaccaatgggagctccggagaaggacggaaatcgtggaggaagctccttccgcagatctacgcgaatggacagcaaatatattcgtagagaaagtgcggacaaatgtgaaagaggctctggcggactctgtgctgctgctcaaaacgtcctcacgcgattatattccttttgtggaattaggggagactagtgaatattatcaccatgatatgtatcatttgttggcttcccgtggcatagaatccttgaaccggatagaaagacttagtagcggaacattaccgggcgatatttcttcggatccggtaaaacaggatattatatctatctatggaaatatgatttccgcctatcaggcagccggtctgaacgaaggatacgtgttggcactgctcaactatttgcagtggcgacgcatggcggatcaggcgttccgttccttccaggctaaaaacgggttgataggactgacgcaagatccttatttggctgcattgaatgaactgaaaagcaaattcaaatcggaaccgatatgtgctgaagtttatttggcgcaagctcagtttgcaattgaaaaagaccagccggtaagtgccttgaaactgtgtgacgaggcaatcggactttatccgtcttaccataggattaatgctttgaagaatctgaggcaggagattctatctccttacttgaatgtcaatgtgatcagccaggcttttcccggcgaagaaattaaactgagagcttcgcataagaatctggacggttttacggtacgcctttttaataaagcgaagaagttggtgaaggaacagcattattcggttcttcgtccggaagattatcggacgcaggacacggtgttcactttcaagtccccggaagtgggagcttacgtcatgcgtattgttcctgatattcgtgccaagcgggatagtgaaagtgagtttaacgtgacccgcttcaaagtgttgacgtgccgtttgccggggcaacagtatgaagtggcggccttggacgctcaaaccgggcatcctgtacccaacgcaaagataatattgtatagtaatgacgaaaaagtgttgcaggagtttacgacgggagaagaaggaaaagtggtgttcccctggaaatccgaatacagatatttgaaagcttcgaaaggcgtggatacagccatgccgaaacgaagtatttacggcggaagctacggttattacgatgatgaggatgaagcgacggaaagtatgacgttattgaccgaccgttccttgtaccgtcccggtcagacagtgtatgtgaaaggtattgcttatatgcagaaatcggatacagctaatgtgcttcccggtaaagattatactgtaactttgttggacacaaataatcaggaagtggggcgtaagtcggtacgtaccaatgaattcggttcgtttaccaccgatttcgcattaccttcggcctgtctgaacggaatgttttctttgacggcgggagaaagtagaacgaatatccgtgtggaggattataaacgtccgacattcgatattacgtttgaaaagcaaacggaaagttaccgactcggagatgaagtgcaggtaaaaggcaagatacagtcttatagcggtgtgatgcttcaggaccttccggtgaagtatacggtgaagcgttctgttcgcagtttctggaggatttcggaggctgtacagattgcttcgggtgaagtgactgccgacgggaacggagaatttacgatcccggttcgcctggaagaaagtgcagattataagaataatgataaaatatattatcgttattctgttgaagcgactgttaccaatgcggcaggtgaaacacagtcgtctacggagatgatttcggcaggacagcgttcattgattttgcagacggagttgaaagaaaagatttgcaaggataggccgttcaacattgtgtttgaagcacagaatctgaacggacagcctgtggaagtgaaaggtacatactctttatatccggcgaaagataaggactacaagcaactgggcgagaaaccggttgcaaccggaacgtttacttctaataaggaaatgaccttcaattgggggaaattttcttccgggccgtatgtgctgaaggcaacggtgaaagataaccagggaaaagaagtgacggcggaagcaaatacgattcttttctcttctgacgacaaacgtccgcctgttcagtccgccgtgtggttctatgcagagaatacggaatttgacactgctcatccggcggtattctatttcggaacttcggaaaaggatacctatataatgatgaatgtattttgcggtgataaactgctggaaagcaaggcactgaatctgtccgatacgattgttcgttttcaatatccgtatcaggaaagttacggtaacggtatcttcgtgaacttctgtatggtgagggacggacaggtttatcaggaacgggttcaggcgagaaaacgtttgccggacaagacattggtgatgaagtgggacgtattccgtgataaattgcgtcccggacagaaagaggaatggaaactgacaatcaagacaccgcagggacaggctgctcatgccgaaatgttggcgacgatgtatgatgcctcacttgataaaatctggaaccgccggcaggatttccgggtttactaccagcaactgcttccttattccgattggatgaacggatatgttggaaataactcctacaattattggtgggatcgtaagtctctcaaagtacctgcaatgttgtatgacagattcgctatgcagcctgatataagaaatgcatatgcgatgtcagaatccatagctgatggagtagtggtcagaggatatgcagtgcaaaagaaaatgtcggtgacaggcagcgttgtaagccggagcaatgcggtgagatatgcatcggcgctagtttccgaagatgctgcggatacaatgtttgaatcggagttagtgccaatggcagcaggaaaggccgatgtcgcttccggagaagaagcgcttcctgaagctcctgccggcttgcgtacaaatcttgccgagactgctttcttctatccccaactccgtaccaatgagcagggagaggtttctttctctttcactatgcccgaaagtctgacacgttggaatttccgtggatatgctcacaccaagggaatgttaatgggaacgctggacggagaagctactaccagtaaagaatttatgctgaccccgaatctgccacgtttcgtgcgtgtgggcgataagacctctattgctgcctctgtctctaacatgactggcaagccgcaagcaggaacagtaagcatgattcttttcgatccggtgacggagaaggttgtcgacacacagaaacagaagttctccgttgaggcaggcaagacaattggcgtgaacttcatgtttaccgtcagtgataaatacgaggtattgggttgtcggatgatagccgatagcggcacatttagcgacggagagcaacaattggttccggtactcagcaacaaggaacatttggtagagacactgcccatgcctatacgtggagaagaaactcgcaccttctcgctcgacagtttgttcaaccggcatagtaaaacggcaacagaccgtaaactgacgattgaatttaccggaaatcctgcttggtatgctattcaggcattgccttctttgagccttccggtcaataataacgctatttcatgggctaccgcctactatgcgaatacattggcttcgtatataatgaacagtcagccacgcatcaaggctgtgtttgatagctggagacttcagggcggtacgaaggaaaccttcttgagcaacttgcaaaagaatcaggaagtgaagaatattctgttgtccgaatctccgtgggtactcgaagcacagactgaagaacagcagaaagagcgtatcgctacactgttcgacttgaataatatccgtaacaataatatcgctgcactgaccagattgcaagaattgcaaaattccaacggtgcctggtcatggtataaaggaatgaacggcagcggttatgtcacggcctatattgccgaattgaatgcccgccttgctctgctgaccggtgagaagttggacggaccagcacttgctttacaggaaaaggcgttgacttatcttcaccaatcagctttggaagaatacaaaaatattcttaaagcacagaaagaaggagtgaagttcacaggagtgtcgggctctatcctgcaatatctgtatattgtcgctatttccggcggacaggttcctgctgccaataaagctgcgtatgcttattatctttctaaagtgaaagagttgcttccggcagcttcaatgaatacgaaggcgattgctgctatcgtgctcgataaagccggacaaaagaaagaagcgcaggaatttgttgcttctctgaaagaacatctgacaaagacggacgaacaggggatgttcttcgctttcaacgagaatccttatgcgtggggaggaatgaggatgcaggctcatgtagacgttatggaagctttggaattgatcggcggaaacagcgaaacggtggaagaaatgaaactctggctgttgaaacagaagcagacgcaacaatgggattcccctgtaactacggcagatgcggtatatgcactgttgatgaaaggtactaatttgcttgacaatcagggcgatgtacggattgtgattgccaatgaagtactggaaacggtgagtccgagcaagactacggtgccgggactgggatatatcaaacgttcgtttacacagaagaatgtcatggatgcccgcaagattgaagtggaaaagagaaatccggggattgcctggggagctgtttatgcagaatatgaatcgccgatcaaggatgtgaagcaacagggaggtgagttaaatgtacagaaacaattatatgtggaacgtacggtgaatgatacccctcagctgcaaccggtcacggcaaagacggtgcttcaggtaggtgataaggttgtttcccgtttgagtatccgtgtagaccgtgcaatggactttgtacagttgaaagatcagcgtggcgcttgtttcgagccgatcggcagtgtctccggttatcgctggaataacggaatcggctattatgtggacattaaagatgcttctaccaatttcttcttcgatcacttggggaagggagtttatgtactggaatatagttaccgtgtcagtcgtgcgggaacttacgaaacggggctggcaaccatgcaatgtgcctatgcgccggaatatgcctctcattcggcttcaatgacggtagaagtgaaataattaacttattaacggtgaacggtaaacgttcaccgttaataatcctttcaatacgtttcatatctcatctaaaactcctacatttgtacaccaaaataaaatatatcacatgaaacgtagtttactatctatattttttctgcttattgtcactttggcagctgtcgcccaacctcgtatttcttctaataaggagacgcacaacttcggacaaatagaatggaaacgtccggtgacagtggagtataccattaccaataccgggaatcagcctttggtgctgaccaacgtcaccacttcttgtgcctgtgccgtgcccgactggacaaaagaaccgattgctcccggagcgaaaggtattgtaaaggcttcatttgatgccaaagcattgggacgtttcgagaagtcggtcggtatttatagcaatgctactccgaatctggtttatctgaagtttacgggtgaagtggtgcaggaaataaaggattatacgaagactcatcctttcgctatcggtaatatccgtatcgaccgggatgaatttgccttccccgatgtatatcgcggacagcaaccaactatgacgttcagcattgccaacctttccgaccgtccttatgaaccggtactgatgcatcttcctccttacctgaaaatggaggcggaacctaaagtgctgctcaaaggaaagaaaggaactgtcaaactgacgctggacgccagccaactgaatgattacggattgacacagacttccgtctatctctcccgttttgccggtgataaggtcagtgaggataatgaaattcccgtttcggctattctacttcccgatttctcgcggatgacggcgaaagattcgttggacgcaccggctatccgtatctcggaaacaaatatagacctcagtgtaccattgataaagaaaaagaaagccagctacaatatcttgattgctaatgccggaaagactccgttagtaatcagtaagttgcaggtgtttaattcttctgtgggcgttagtctgaaaaagaccgtgctgccgccggacggaatgacgaaactgaaagtgacgattcgtaaacgtgacgtcggtaataagaagcatcatttacgcattcttatgattacaaacgacccgttgaatcccaaagttgaaatcaatatcaaacgctaaattctatggctatggaacatcctgaaaatagtggagaatacaaagggcttgctgtcaacaaaggcatcgagcagccttcgtctgtaaatccttacctgaaacgtaagccgaaaaagcgtcagctttcggtggcggagtttgttgaggggattgtgaaaggcgacattactattttgagccaggctgtgacattagtggaaagtgtgaaaccggaacatcaggccgtagcacaagaggtgatagagaaatgcctgcctcattccggaaattctgtccgtataggtatcagcggagttcccggcgcgggaaagagtacttcgatagatgtattcggtttgcacgtgcttgaaaaaggaggaaagctggctgtgttggctatcgaccccagtagcgaacgtagtaaaggcagtatcttaggagataagacgcgtatggaacagctttccgtacatccgaagtcatttatccgccctagcccctcggcaggttcgttgggaggagtggcacgcaaaacgcgtgagacgattgtactctgcgaggctgccggattcgataagatttttgtggaaactgtcggggtgggacagagtgaaacggctgttcattctatggtagatttcttcctgctgattcagttggcaggtacaggagacgagttgcaaggcattaagcgcggtattatggaaatggccgacggcattgtgatcaacaaggccgacggggataatctggaacgtgcaaaactggctgctactcaatttcgtaacgctttgcatcttttccctgctcccgaatcgggatggactccccaagtgttgacctattccggtttttataatatcggagtgaaggagatatgggatatgatttatgaatatattgactttgtgaagaccaacggttattttgaatatcgtcgtaacgagcaaagtaaatactggatgtatgaaacgatcaacgaacaacttcgtgacagtttctatcataatccgaagattgaagccatgcttctggaaaaggaacagcaagtgttgcaaggaaatctgacatcatttatagccgcaaagagcctactcgatacttatttcgcagacctgaaacgggacgactagaaaaagaacgttaaaaagcggatgaaaaaataggggtggtatgctttctgattgtatttacattcagagaaccatgaatattggacacagaatattatttattgacttaaaataccttatgaacaaaaccttgttaacaggtcttctgtgctgcaccctcacagtacagagtttcgcagaccaacctttggaagggtttacctatgctaccttgaatgctccgacaggagcggagtgggaatctcccgaaaacttggcactcaataaggagcagccgcatgcttatttctttccgtttcaagacttggaaagtgctcgcaaagtattgcccgaaaacagtaagttctggcagtctctcaatggcgactggaagtttcattgggcacccgaccccgattcccgtccggcagatttctatcagacgaattatgatgtgacttcgtgggacgtaatccctgtaccgtcgagctggaatatctatggtattcagaaagacggaagcttgaagtatggaactcctatttatgtcaatcaaccggttatcttccaacatagcgtgaaggtagacgactggcgcggaggagtgatgcgtactccgcccgctaactggactacttataagcaccgtaatgaggttggttccttccgccgcgattttgagattcctcaggattgggacggcagggaagtattcatcagtttcgacggtgtggattctttcttctatctttggattaacggtaagtatgtggggttctccaagaactcgcgcaataccgctaatttcaatattaccccttatcttcagaaaggcaaaaatatcgtagcagccgaagtatatcgtagctcggatggttcatttctggaggcacaggatatgttccgtctgccgggtatcttccgtacggtagctttgtactcggttcccaaggttcatttccgtgacttggtggctattcccgatttggacgctacttatacggatggttctttgactatcaacgccgatatccgtaacttggataaaaaggcagccaaggattataaagtatattattctttgtatgccaataaactgtattctgatgaaaatacgttggtagacggcgtttcatctccggtaatagagaagatcgttccgaatgagattggtaaggttcaaactgtttttcaggtgaaggctcctaacaagtggtcggcggagtttccttatcgctatacgcttgttgctgaactgaaagataaaaagaacaggactattgaaacggtttctactatcgtaggtttcaggaaagtggaaatcaaagatacacctgcgtcagaagatgagttcgggcttgccggacgctattattatgtgaacggaaagaccgttaaactgaaaggggtgaaccgtcatgaatccaaccctgctgtgggacatgccattacccgtgagatgatggaaaaagaaattatgctgatgaagcgtgctaacatcaatcatgttcgtaactctcactatccggatgatccgtattggtacttcctgtgcaataaatatggtatctatctggaagatgaggctaacatcgaatcacacgaatattattatggtgccgcttcgctttctcatccggtggaatggaaaaatgctcatgtggctcgtgttatggaaatggtgcatgccaatgtcaacaatccttctatcgtgatttggtcgttaggtaatgaggccggtccgggtaagaattttgtggcggcttatgatgcgttgaagaagttcgatacttcccgtcccgtacaatatgaacgtaacaatgatattgttgatatgggttcgaatcagtatccgtctatcggttgggtacgtggtgctgtacaggggaaatatgatattaaatatccgttccatatctccgagtatgctcattcaatgggaaatgcttgcggtaatcttattgattattgggaagctatggagtctaccaacttcttctgtggcggtgctatatgggattgggtagaccagtccatgtataattacgatccgaaaacgggtacgcgttatctggcttatggaggtgacttcggcgatactcccaatgatgggcagtttgtaatgaacggaatcgtgttcggagatctggaaccgaaacctcaatattatgaagtgagaaaagtatatcagaatatcggagtgaaagctgtcgatgttgagaagggtgtctttgagatcttcaataagtattatttcaagaatctggcggacgactactatttgatgtggtccgtttatgaggacggcaaggctattcaggcaactctgaagaaagacattaatctggctccccgccagcggatgcaaatctctcttccctataatcgtgctgcgtttaaaaaagatgcggagtactttgtgaaagtgcagtttatattgaaagacaagatgccttgggctgataaagacttcgtaatggcggaagaacaggtactggtgaaggaagctacggatcgtccgttaatcagtgaagtggctgccgctactgcgggaagtctgaagagtcgtatgaacccgagtacagagagaatcgaaattaaaggggacggctttgaagcggaattcgatcagcagaccggaagtatttatagcttgaaatacggcgataaaacaattattgcggccggaaacggaccgaaacttgatgcacttcgtgcctttacaaacaatgataactggttctatactccttggtttgaatatggtttgcataacctgcaacataaaatgatagaggtaacagctcgtgagaaggatggtaaaatggtattgagttttaccgtagaatcgcaggcaccgaatgctgcaagcattaaaggggggaccagttccggtaagaatagtattgtggaactgacagaccggaaatttggagccaatgactttaagtttattaccaatcaggtgtggacggtttatccggacggctctatcgaattgcagtccagtattacttctactcgtcccagcctgactttgccacgtcttggctatgtgatgaaagttcctcaggaatatgctaactttacttattatggtcgtggaccgattgataactatgccgaccgtaagagtggccagttcatagagcaacatacgaatacggtagcgggtgagtttgtgaatttcccgaagccgcaggatatgggtaatcatgaagatgtacgttggtgtgcattgacgaatcaggcaggacaaggggcagtctttatagctaccgatcgcctgtcggtgtctgcacttcaatattctgctcttgatttgatcctggcttctcatccatatcaattgcctaaagcaggtgatacttatttgcatctggattgtgcagttaccggtttgggtggtaatagctgcggtcaaggtggccctcttgttcaagacagggtatttgccggtcatcataatatgggctttattatccgtccggttgttggtgcgaatttggcagctgttgctaatgttgctcctgccggagatattcctttgtctatcacacgtactcctgccgggatggtagaattgacgtcggcaaagaaagacgctgtattctgctatacgattgacggtagtaaaaaggtacaggaatatacagaacctattcctttgcgtaatggaggtactgtgaaagcatggtataaggacaataaggatattagtgccgttatgaagtttgaaaagatagaaagtatccagatgcaggtggtatatgccagcagccaggagtcaggcgatggagatgcagctaatctggttgacggtgatcctagtacgatatggcatacaatgtattcagtaacggttgccaaatatccgcattgggtggatcttgatgcaggtgaagtaaaagaaatcaaaggctttacctatctgccgcgtcagaatggaaataatggcaatatcaaggattactctattcaagtcagcatggatggtaaagaatggggtgatccggtcaagaaaggtacttttgctaataactcaaaggaaaagagggtgatgttcgacaagccggtaaaggcacgttatattcgctttactgctttgagttcgcagaacggacaagactttgcgtccggtgcagaagtgactatcctggctaactagaataaaactattcaggcacagattacacggacttcacagttttaatcaatcaaaggactgtgaaatttgtgtaatccgtgtctgataactaataatgattggtggttattacaattcccttcccgctttctcgaaatcagccttcgacttactttgcgttacaatatatacaccgagaaatacgagcgcaatggcaagtcctttctgccagccgaaacttccgattcccataataatggcagcaatcgtagccacaatcggctgcatataattatacatactgacaacggtaggacgaagcagtttttgtgccgtcataatgcagagataggctaggaaacttccccctaatactacatagagcacttgtatgatagcaacggtggaaatagaggcccactgaatcgttgagatgtcataataggagaaaggtatataacatatcgaggcgtaaacgaacatccatttattgattgttaccgctgaatactgctgagatagtcctttgaataccgtcagatagatagagaaactgatttgtgctaccagacagagcaagtcgccgataaggtttctgttaccgccacttgcagcctgactacttaaaataaggataagtgcccccatagcacctacaaaaattcccaataccttcttgtttgtaatcggttctttcagataaatggcagccacaatcatggttactatcggcaaagtagtagttacgatagaggcgtcgataggcgaagtcatggaaagtccgaaaataaagatcccctgattaaatactaaggcaaacagagaagcaaagaaaatctttagcatatccctgtggttgacgtgctcttgtttacagaatatagataacatccagaaagcagccgcagctcctatcatacggaatgtagtgacggaaagagcggaaaactcttgcagagccgatttaccaataggagccattaagccccacataacgtttgctgtcaacgcaaacagatgaccgtgtagattcttacttttgtccatgctgataatagtgatctaatataatcttataagaataacatctaattagaaaaaacggttggcaaaggtaacttttttattcttgtattttctcaatccggtaaataaactgacatactttgagaaaaaatggcaaggggaataattcttccctgcacagacaaaaacttaatcataataagcatttgataaatgataaagaaaggtgttgtggcagacattgcgatactatgtaatcatcttcccggcggactactgccagaccgcgtcctcgtccacaccggagatagaaatgaagttgtctcatttctgttgaaacagagaaaggagaagacgataaaacaaaatgtcccgtttgtgcatgaaaacgggacattttatttatatttgccttgattaaacttgaatattatggaacaacaagccaattatatccgtcgtatcgaaatccacggactatggggacgttttaatataagctgggatttacgtcccgacgtaaatatcctttccggcattaacggagtggggaagacaacgattctcaatcgttccgtcggctatcttgaagacctttccggcgagatgaaaagcgacgaaaaaaacggcgtgcgtcttttcttcgacaatcccgaggccacctatataccgtatgatgtgattcgcagttacgaccgccccctgattatgggcgactttacagcccgtatggcagataagaatgtgaagtccgaactggactggcagctctaccttctccaacgccgttatcttgattatcaggtcaacataggcaataaaatgatagaaatgctttcgagcaacgatgaagaagaacggcgaaaagccgcgaccctgtcgattgccaaacgtcgttttcaggatatgattgacgaactgttcagctatacccgtaagaagatagaccgtaaacggaacgacattgctttctatcaggatggcgaactgctgtttccctataaactgtcttccggtgaaaagcagatgttagtaattctgttgacggtactcgtgcaggacaacagccattgtgtgctgtttatggatgaaccggaggcttcccttcatatcgaatggcagcagagattaatttcaatgatacgggaactgaatccgaatgtgcagattatcctgactacccattcgcctgccgtcattatggaaggttggctggacgccgtgacggaagtgagcgatatatccacctcgttggaacatacgtttgaaaaaggatgttcccaaacgaaaccataatttgtataattagtaactatcaacatggcaacttcactaagagataacctgacttcttcttacttcaacgctgcccataaactctactcgaagaaggcgcgccggcgtatcattgcttatgtagaaagctatgatgatgtcgcattctggcgtacgttgctcgaagaatttgaagatgatgaacattatttccaggtgatgcttccttccgccacctccctggcaaaagggaagaaaatggtgttgatgaatacgctgaatacaaaggaactgggaagaagcctgattgcctgtgtcgacagtgactatgattttctgttgcaaggagctaccaatacctcccgtaagattaaccggaacaaatatattttccagacctacacttacgccattgaaaactaccattgttttgctgaaagtcttcatgaagtgtgtgtgcaggctacgttgaacgaccgttttattctcgatttcgatgcttacctgaaacgttactcggaaatcgtatatccgcttttcctgtggaatatctggttctaccgccagcgtgatacttatacctttccgatgtatgacttccatacatatacggctttgaaagagataagtttgaggcatcccgaacacagtctggaagctttacaacaccgtgtcagtcagaaactttcggaattgaaaaaacgttttccccgtattgtcaatcaggtgaacaacttacgtgatgaattgaaggaactgggattaatgcccgaaacgacttatttatatatgcagggacatcacgtaatggacaatgtcgtgatgaaactcctgattccggtctgtactgctctgaggcgtgaacgggagcaggagatcaaacgcctcgcagaacataatgaacaatttagaaacgaactgacctgttatcagaacagtcaggtgaatgtagagatcatgctgaaaaagaatgtagcctataaacggctctttcattacgaatggctccggcaggacattcaggaatacttggcgaaaggagaatgaaataaacaatagataaaagagaactaaaccaaaagagaaaaaatatttatgaaagaagtaattgatacggtgagtgtagcattagcgagtggggaagtggaagaattgggaggagcagtgatgcaggaagtcaaccgctcgttactatcggcaggagtgaacgaagaatgggctgacaagattgacaatctgatagtgctgctgtttattatcggaatcgctttactggctaacgtaatctgccgcaggatcatcttgcgggtagtggcaaaactggtgaagcaaactaaggcgacgtgggatgatatcgtattcgatcataaggtaatggtacatcttagcagaatggtggcaccgattctgatttatattgccattcctattgctttccccgaacacgctgattccgggttgctcgatttcttacgcaggctttgcatgatttatatccttgcagtattcctgcggtttgtcagttcgttgtttactgccatttatcaggtatacagccggaaagagcaatatagggacaagcctttgaagggacttttgcagacggcacaagtcatccttttctttataggggctattatcatcatcagtattctgattaatcaaagtccggtggtgttgttgacgggactcggagcttctgctgccgtcctgatgttggtattcaaagacagtatcatgggatttgtgtccggtattcagctttctgccaacaatatgctgaaagtgggcgattggattaccatgccaaagtacggtgcggatggtacggtgatagaagtaaccttgaacaccgtgaaagtgcgcaacttcgataataccataaccactattccgccttacctgctggttagtgactctttccagaactggcagggaatgcaggagtccggtggccgccgcgtgaaacgctctatcaatatagacatgagcagcgtgcgtttctgtactccggagatgttggcgaagtatcgaaagatacagttgttgaaagattacgtagaccggacggagaaagtagtggaagaatataacaaagaacataatattgacaattcagtactcgtaaacgggcgtcgtcagacaaatttgggcgtttttcgcgcttacctgactaattatctgaaaagccttcctaccgttaatcaggaactgacttgcatggtccgccagctccagccgacggaaaccggtatccctctggaactctatttcttttcggccaataaagtctgggttgcctatgaaggcatacaggcagacgtattcgatcatgtgcttgccattattcccgaatttgacttgcaagtattccagaatccttcgggtgccgacctgcgccggataggagtaaaaatagagaaataagtattagaacaataaaacactgttaactatccattgtcatgactacaccgttaccaaatcagataatccgcgaaatcactcctctatcagacaaggactgtttttatattgcagaacgttataagacagaatttacttatcctatccacaatcattccgagtttgaactgaactttaccgagaaggcggcgggagtgagaagggtagtcggagattcttccgaagtgataggcgactatgatttggtcttgataacaggtaaagacctggagcacgtctgggaacagaacgaatgtcgttcaaaagagatacgggagataacgatccagttttcttccgatcttttcttcaagagctttatcaataagaaccagtttgactctatccgccggatgttggataaggcgcagaaaggactttgtttcccgatgtccgccattcttaaaatatatccgttgctcgatacacttgcttctgagaaacagggattctatgcagtaatcaagtttatgacgattctctacgaactctccctttttgaagaagaagcccgcacattgtccagttcgtcttttgccaagatagatattcattcggacagccgccgtgtgcaaaaggtgcaggagtatatcaatgcccattatcaggaggagattcgcctggggcagttggcagctatggttggaatgacggatgtgtccttcagtcggttcttcaaactgcggactggtaagaatctctccgactatatcattgatatacgtcttggttttgcttcccgcctgttggtggattctaccatgtcaatagccgaaatctgctatgagtgcggattcaataatctttccaacttcaaccggatcttcaaaaagaagaaggcttgctctcctaaagaatttcgtgagaactaccggaaaaagaagaagctggtttaaggtccgtacatctcttccattagttgttcgcaagctttctggagatgttctgagtgggggcttgtgccaccggcttgtcacagttgtgccatcgtggtgtcacagttgtgccaagccgatgtcacagttgtgacaggccggtgtcatatcctggcactgagcttgtctgtcgtgtaataatcttgcaacctatctttcaaccaattgtatcttctccgtattactgttgtaacacccactccctacctttgcccacggatttaaaacgtagagcaaagttcgatgaaaaaactatttcttttaagattttccgttgcagcctttttttgtatgttgtgtgtactttcttcgctggctgctaatatcaaggtgaaaggagctgtgaaagacaaactttccaaggagcctttaatcggagcaacgattcgtctgataggcactcaggccggagccgtcactgatatggacggtaattttgagttaaatgccggtggtgtgttggaaggtatgtatgatattgaaataaaatatgtaggatacaagaccgaggttcgtcgcaaggtccgtgtggagaacggcaaactggtgatactgaatctggaactggaaacggatgcacaggaacttgccgatgtggtagtcgtagcaaagaagaatcgtgagaatgaaaatatgctgctgctcgaacagcagaaagccgtcattgcagtgcagtccgtaggggtgaaggaactttcgcgcaaaggtgtttccgatgcggaaggcgccgtaaccaaagtatcaggagtatccaaacaagacggagtgaagaacgtctttgtccgcggactgggcgaccgctataatgcaaccaccttcaacggcttctcccttccttccgaagaccctgaatataagaatatctctcttgactttttcggaacggacgtcatacagtccgtaggtgtcaacaaagccttcaacgcaggcggcagcagtgatgtcggcggcgcaacgatcgacatcgtctccaaagaactgataggtggcggaaacttcggtatcggcatttccggcggactgaacacgcaaaccttgacagccgatttcctcaaaatggacggggtggactttatgggttttgccaaccgcaccgaacctgccgacgaaaacacttggggatttaagaataaactcgaccctaccgaaaaacatctccagataaaccggagttacagcatttccggcggaaaacgtttctatataggtaaggacaagaatccgctttctttcttcctgaccgccggacatacaacagattatcagtatacggacgaagtgatacgcaataccactaccagcggcacaatctataaagatatgcagggaaaaaaatatgccgagaatatcagccaactgctactggccaacgtggactacgatatgaacaaccgtcaccacgtcagctataacttgatgatgatacacgccggcacgcagtcggtaggcgactacaccggcaagaattctatctttagcgatgattacgataacttgggattgacccgccgtcagcaatctaatgataaccttttaatcgtcaatcagttgttgaccaattggggactgaccaaatcattaagtctggatgccggtgcttcctacaatatggtgaaaggatacgagccggaccgccgcatcaacaatatcacgaaagcggaaaacggatacaccctgcttcggggaaactctcaacaacgctacttctccgcactggacgaagatgatattaatgtaaaagcaggcttggtctaccgcttgaaagacgatatggaagaaatctccaatatccgcctcggctatacaggcagatttgtagacgacagtttcaaggctacggaatacaacctgaccgtggaacatgcttccgacttcccttcgctggatggtttctcgcttgatgattactataatcgggacaacttatcttccggctggttcaagattcagaagaatgtggacaagtatactgtcaccaagaatatccattcggcatacgccgaagctacttatcagtttaccccgcgttggattgtaaacttggggttgaagtatgattatgtagatatcaatgtagattataatgtgaatagaggcggttccgaaggaagcaacaccatccggaaagactatttcctgcccagcctcaatctgaaatataatctgaatgagaaacattccctccgcttgggggcaagcaagacctatacgctgccgcaagctaaagaaatatctccttaccgctatgtaggcgtgaatttcaacagtcagggaaatccgaatctgaaaccctcggacaactataacttcgacctcaaatgggacttcaatcccagcccgacggaactcgtttcgctgacagctttctataaacatatcaaagatccgatctcccgcattgaagtggccagtgccggtggatatctctcatacgagaatatttcggatcgtgcaacagttgccggagtagaggtggaaatacgtaaaaatctgtttgtccgtccgttgagctgtgctgcgaacggcatgaacaaactctccttcggactgaacggttcctacatttacaccaatgcgaagatgcctttggcaaccgttaccaccggttcgcaattggaaggagctgccccgtggattgccaacttcgacctttctcaccatttcacccgagacgaacgcagttttgtcaatacgctggttcttaattatgtgagcgataagatttatacgattggaacgcaaggatatcaggacatcatggaacggggacttgtcacactcgacttcgtctcgcaggcccggttgaacaaatatctctccctcaacctgaaagctcgcaacctgctgaatccttcccataaattgagtcgcaaagccaatgagagtggcgaaaaggtagtgctcggcgattataaaaaaggaataaacatcagcctgggagtgtcgtgcacattctaagtcccggcaatagaaatagaataagataattgattacagaacttgattattaactgattactgaatagaattattaactaattattgaagcaaaatgaaaagattgtttgtgaactttatgacgtgtgccgctatggcaactgcacttacgttggctgcatgtagcagtgacagtgacggagaaggtaatggaaacggtaatggtggaaacggagaaggcacaggtagctctatcgtagtgggcgacaacatcctgtccggaacactgaccggcgaacagacgctggaatctaaagaatatatcctgaacggaacggtaatcgtagccgacggtggccgcctcaatatccctgccggaacaacgattaaagctcgtgaaggtttcagcagctatcttttagtagcacagggcggtaaactctacgctgatggtacggcagacaagccggtcatctttactgccaacaccacttcacccgtttccggctactggggtggtatcattatcaatggtaaggctcctatctccggtcagaacgccgataagagcgatacgggcttgacggaaatcgacaacagttttaaatatggaggcaatgtaggtgatgataactccggttcattgacttacgtgcagatctgttatgccggagcccgttccactgccgatatcgaacacaacggtctgacactgaatggtgtgggtagcggtacaaagatagaaaatatctatgtgctcgaaagtgccgatgacgcaatcgagttcttcggcggaacggtgaacgtaaccaatcttctggctgtaaatccggatgatgatatgttcgacttcacacaaggatatagcggtacgctgaaaaactgctatggcgtatgggaaaacggttataccagcacggaagcagatccgcgcggcattgaagcggacggtaatctcgacggcttgtatcctacccatctgcgtcagtctgatttccgcgtggaaaacatgacgattgtgaataatgcagctgataaggcagacaacgtagaccgtatgcaggatgtgataaagattcgtcgtggtgcgaaagctgctatcgtcaacgcattggtaaagggtacgggcggttcaatcgacctgattgatatgagcgatagcaagggtgcaggtaatgcagattccagtgtcagcattacaaactcactgaacctgacaggaaagaaactgaacggtacattgaatacctttgccgaaccggcaggcaacacaggtacggacgtttctctgttcacctggacgggatataatttctcctccctctgattcttgactgctcgaagtctgtttttcagaaagacatgagaggtgtgtcataacttaataaggttacgattgaggtacctttgagttatggcacatcttttttatatttggtttctccttgtcaattcctctgttattagcaattatttcgtatattatataatcggtctgattttctttttcgtatatttgttccttgttatcctatgataaataaaatatgcaaacagactacgagcggtatattaagatgtcttctctagcccaaattggatggtgggaagcggattttgcggcagggcattatttgtgttcggattttctatgtgaactcctcggattggagggggataccatttcttttcaagatttccaaaagttgatacgtgaagattatcgtgagcaaattattcaggaatttcgtgcaaatgcgaatattcatcggaacttttatgaacagacttttcccatccgttcccggtatggtgagatttggttgcatacccgcctggctcatcgtgagaaaggtacgggaaccaatggcggtgataaatccttcggtgtcattcaacgggtggaagcccctaaggagtcagaacaaagagatgctttgagaagggtgaacagtctgcttcgtcgtcagagttttatctcccagtctttgctccgtttccttcacgatgaagaagtagactcttgtgtcatggagatattgaacgacattctgaatctttactacggggaaggtcgtgtctatattttcgaatatgacgaaaatcacactcaccagagttgtatatacgaggtcgtttccgaaggggtatcgtcggaaaaaggcagtcagcagaatcttcctattgaccaggcaaaatggtggagcaagcagattctttccggtacgcctattctgttgaattcgttgaaccagttgccagaggaagcggaagacgaatatcgtttcctcaatgcacaaggcatcttgtcaatcatggtgactcctttaagggcgggcgaccatatttggggatatatgggcattgatctggttaagacttatcacgaatggagtaatgaagactatcaatggttttcttcacttgccaatattataagtatttgtattgagttgcgcaaagcaaaggataaggttatccgcgaacaggtctttctgaataatttgttccgtttcatgcctatggggtatttgcgcttgtcgataatccgtgatgagcagaatcggccttgcgattataaggtgacggacggaaatagtttagttgttaaatttttcggtagttcgataaaagaatatatgggatgtcctgcctcgaagatacatcctgactatgtttcgaaactggagcttctggtaggtgtaatgcaaggtaacacgtataaggaaggagatgattatgttgccaagacgggcatttatactcactggattgtctattcgccggaggaagatgaagtggttgctttgttcctcgacactacgcaggcagtgaaagccaatcgagcaatggaccgtagcgaaaaactgttccagaatatatttgccaatatcccggccggtgtagaaatctacgacaaggacggctatctggttgatatgaacaacatgaatctggaaatattcggagtggtaaataaatcggaagtaatcggagtgaacttttttgaaaatccgaatgtccctcagcaaatccgcgaccgtgtgcggaatgaagatttggtggatttccgtcttaactactctttccggcgtgccgaaggatattatctgacgaaccgttcggatataatagagctgtatacgaaagttactaaattatatgacaatgaagggaacttcagcggatatatattgattaacattgataataccgaacgtattgatgccataaaccgcatccgcgacttcgagaatttcttcctgttgatttccgattatgccaaagtggggtatgccaagctgaaccttatgagtcggaaaggatatgccattaaacaatggtataagaatgtgggagaggaggaagatacgccgttgagcgaagttgttggtatctaccgccacgtgcatccggatgatcgccgatatattctcgacttctatgaggaagtgaagaagggcaacagacgccattttcagaaagaaatgcgtgttcgtcgcgtgggaaccatagaccagtggaactgggtgcgttctaatattatggtgactaattacaggcccgaggagaatgaaattgaaatcataggtatcaactacgacatcacggaactgaaagagacggaagcggaactgattctggcacgtgacagggcagaaatggcaggccgtctgaaaagtgctttcctcgctaatatgagccatgaaatccgtactccgctgaatgccattgtcggcttctcggatttgttggttgaggcggaagatattgaggaacggaaggaatatgtcaagattgtccgtaacaacaatgaactgttgttgcaactaattacggacatactggatctctcgaaaattgaagccggtacgtttgattttacttacggagatgtaaatgtgaatttgctgtgcgagaatattgtccgttctatggaaatgaaagtgagcgaaggagtagcgttggtgttcgattctaatcttccgcaataccatctcattagcgaccgtaatcgtctgcatcaggtaatctctaactttgtaaacaatgcgattaagtttacttcgcagggaagtatccgtgtaggctatcagatgaagggggaagaactggaattctatgtgcaggatacgggaatagggattgataaggaacagcagttgcatatctttgaacgtttcgtcaaactcaactcttttgtgcccggcacgggattgggacttgctatctgccaaagtatcatagaacaacttggcgggcggataggagttgattccgaaccgggcaaaggctcacggttctggttcagactgccgggggtgattgtggcggaatgagtgtacaccctctaataatttttatccccgtctctattgtcacaataaatacagactggagacggggataacttttttcttttcaattatattccgaacgagaatttatcaatagactgatatacgatgcttgctatacccagtccgataatgcccaacgtacaaagcgccagtccccatttggtacaacggtcgctgcggaaagtaggaatcggattatcggaaggagtgatatacattgctttcacaatcagcaggtagtaatacagtgagataactgtattcaccagtgcaatgaataccagcaagtggaaacctgcatcgaaggcagccatgaagataaagaacttcgagaagaatccggcaaatggcgggatacctgccaatgagaataaggacaaggtcattaggagcgctatcttcggattcgtcttataaagtcctgcgtaatcttcgagtgtaaacttctggctgcgcagtgctacgatagtaataacggcaaacacaccaaggttggcggctgcatataccagtacgtaatataccaatgctgtcattccctgtgctgtgcctccgatgacgcccaacatgatatatccggcttgtgagatactggagaatgccatgaggcgtttcagattctgctggcggatagcgaatatgttggcaatcgtgatagaagcgatagttacccaataaagtacctcttgccaatcatcgatcatcggggcgaatactttaatcaggatagccaataacacgaatgctgccgagccttttgaaataacactcagataagctgtaaccgtgcttggagcgccttcgtaaacgtccgctgtccagaggtggaacggaacgagggacagtttgaacgccatacccgtaaagaagaatacgaatgccatgatttgcaggggatttccgtcgatgtgtgcgggaagatcatcgaagtacaatgttccggcagaaccgtaaatcattgacaggccgaacaacagcaacgcactggagaaaagtgccgtaaggatatacttggcaccggcttcggaagaattgtggcggtatttgtcgaaagcaatcagggcagccataggaatagaagctgtttccagtccgataaagaacatcaggaaatgtccggcggaaatcatgagatacataccaaacaaggtggagagtgtcaatacatagaattctccttgtttaaaggcggtgtcttcacgtttcatccattcgtgtgccatcagaaagacaatcaacgtacctatattcaggattgacttgacaaccgtatgcatggggacatagtgatacataccaccgaatacgtcggcggcagttcccggaatcaggttgatagctgtatggaccgccatcagaatgacaggtagcattgtgttcagtcgtgctttcccatcatttttgtgtgcgtccgggctcatgaagaggtcggccaaaaacagtagtagcaggacaactacgagcgacagctcttctcgcatatgtagaaattgtgaataatccatattgttaattacaaattactagttattaattacagattccggcttatgggattagttgtgagacaaccggcaatacactttcaccaatcatgtggcttatccagaaaggagccatacccaatcccgctacacaggcgatgaggcagataacggctacacgctcgtcccacgtcgcatcagtcagtgtgaggtgatgtttattggtacaggtaccgtatagaatcttacctaccagacgcaggatatagactgctgtaatcacaatcgaggagcaggcaatgatagtcaatgtacggtggaatacatcgttgttctggaatgaaccgacgaagattgtcatttcggcaatgaaaccactcaagcccggcagaccgagattggcaagaccggcaatcacataacatacgctcaggaacggcataatcttcatcaaaccggcaagctcgcgaacgtcacgtgtgtgtgtacgtccgtaaatcataccgataagggcgaagaacaaggctgtcattaatccgtgggaaagcatctggaggatagctcccgttgcggctgtctgattcagtatcaggatagcaaagagaaccaatccgcagtgggatacggaagaataggcgttgatgtatttcaaatccgtttgtacgcaagcggagaatgctccgtaaacaacagagataccggttaatatcaggaatatccatgaaagttcgttggctgcctccggcatgaggtacatggcgatacggaaacatccgtagcccccgagtttcatcaatacaccggcatggagcatggataccgccgtcggcgcggaagcgtgaccgtccggactccatgtgtggaacgggaaaagggcacccagtacaccaaaaccgaggaatgtcagcgggaaccagatgcattgctgtgcgaaaggtatattatgtaactgtgcgatttcgagaaggttcatcgtcgttgctcccgagccgaaatagattccgagaataccgatcagcaggaaggcggaaccacccattaacatgagtgtcagtttcatggctgcgtattctttgcgtcccgaaccccatacaccaatcagcaagtacatcggaatcagtgcgatttcgtagaacatgaacatggtgaacaagtcgatggatataaagaatccgaacactcccatagagagcagggtgaaccaaaggaaatattctttggttaaaggttgcagacgccatgaggcgaatgtcccggtgaatacgataatggcagacagtaacagcatggctactgagatcccatcgacacctaccgagtaggagatgtgaagcggagcataccatagggtatctgcgcgaaataacatttctgccgtgttgccggcactacgttctcccaagtacataaaggtcagtacgatggaggcaatcaaaagtgcagatgcgccggtaaccataacccctcggatggctttgattccttgggctgcccaaagaccggccagcattagtaaggggatgagtacgaatattgataagaaattcatatcgttctgtgctttataagattaatagtaggataagtgccagtgcaccacaaaggaacacatacgcatattgctgtacctgaccgctctgcaaaccacgaatttcgtcactagtggtattggtagcccatgccaggaagttaaagaatccgtccactacatgacggtcccaccatgcaataggagtagagatgcaacggaagataatcttatgtgtaatgaactggtatatatcatcaatatagaaacgattgtaggcagctttgtgcagacctttgaactgttttgccagagaatcggcaacaggctgtttggcattcttatacatccatgtagcgattgcaatagaaatgatagcaataacgacacttgtgatagctaccgacggatcgagatgaatagaataggattctccatttgaactgatgaaatgtccgaaaggaataaatccggctccacaagttaccgcagccaggaacatcagagggaatgtcatagctaacggactttcatgcgggtggcaaggtgccgcttccaagttcttatctgaatgggaacttgcccgggatggtttgctcccccagaagataccatagtagagacggaacatatagaaagcagtcattgcagcaattactgtcatcacccaacccataacagaactgtattggaagcaagcggccaaaatctcatcttttgagaagaaaccggagaacgggggaatacctgcaatggcaagacaagcaatcaggaatgtccagtgtgtgataggcatatatttacgtaatcctcccattgccgacatttcgttggagtgtaccgcatggataatgctacctgcaccgaggaataacagcgctttaaacatagcgtgtgtgaaaaggtggaacatggatgccatgtatcccaatccgccttcgtgcgggttcatggaagtacaaacccccaaagctaccatcataaaaccaatctgcgagatagtagagaaagcgagcacacgtttgatatccgattgtacacaagctacgcttgctgcatagaaagcagtaaatgcaccaacccaggctaccatatgcaaggtatccggtgcgtaagcaatgaaaagcgggaacatacgggctaccagataaacaccggcaaccaccattgtagccgcatgaatcaaagcgctgacaggagtcggaccttccattgcatccggcaaccagatatgtaatgggaacattgcactcttgccggcaccacccacaaacatcagtccgagagctaacggaagcatagaagcaccaccgctaatcaatgatactgtatccggagtgaaaccgaacgtcccgccataatatccgtaaatcaggataccgatcaggaaacctaagtcagcaaaacgagtgacaataaatgcttttttggaagcagagattgcagccggtttggtgtagtagaatccgattaataagtatgaacttacacctaccagctcccaaaagagatacatctggaagatatttgttgcaacgaccaatcccagcattgacattgtaaacagggacaggaaagcgtaataacgttggaaaccgacttcgcctttcatgtaaccgaaggagtagatatgtaccattagtgatacggtagatatgacaatcaacatcattacggatatgggatcgagtaggatacccaggtcgaagtgtaaagtttctgtaaaaggaagccacgtgaagttgtaaggtatcagtgtggcaaaagttccgtcttccagtcgcggagcggagaaatattggaaagccgtaacgtatgatagcactgctactgctcccagtaccagcgtaccgattgtacccgctgtccgatgagacatccatttacctccgattcccaataggagaaaggagaggaaaggaagaaggagtattagaattgttagttccatacagttttatttaattacttgttttattgttacttatactataatatcttgcggaatcatccgaatggaaaccgggaagtggcatcttgccaccgccttggtactaccattttagttcgtcaaggttgcggacttggatgcttcggatgttacggtagatgtttatcataatggctattgctattgcggtttcagcagccgaaatggcgatagagaatagtgcaaagaaatagccttccattcctcccggaaagagaaaacggttgaacacggcgaagttgatgtccgtggcgttcagcattagctccacagaaatcaggatagccagtgtattccggcgggtaaagaatccatagattcctgcaaacatcatgatagtagaaactaccagataatattccatgtgtatcataatggtatacttttaatttctaatctttaattttaattctccttatctcttacgtgcaatcataataccaccgataatacatgccagtaacaagatactgactgcttcgaaaggcaatatataaccgtatttgtcgctacttagcagggcatgaccgatagagtggatgtttatctcctgtggagccagattgttggtttgcaggaagttatgctttagcgtgataaacaggataattgctgcgccggcaaccattgtaaagaggcccgcgaagaacctgcttcgtttcagtttctctgcgcggtcaccctctccactggtcagcagaatggagaatacataaagaacgacgataccaccggcataaaccataatttggacagaacccaagaaagtgtaacccagcaggaaataaatgccggccgtaccgaaaagcacgaacaacagataagtagctgagcggacgatacgttgggtggtcaccgtcataatggacatagcaataataaatgctgccaaaaagtagaatactactgtttcaagtgttgatcccatatcttaaacttcttttttcttttctattactttactaccgtcgtgattcaacttcaatacaagcttcgtcctgtcgaataccgcatgttcgaagttctggtcgaacgtgatagcatcgtgcggacaagcattgacacaaagttgacagaacatacaagcacccaggtcatattcatatcttgccaggattttcttcttcttgccgtcctctgtctcgatggtttcgctgataaccttgatggtgtcattcggacaggccatttgacacaaaccgcaggctacacagcgatgttcgttattctcattatggggcatgttcagtgtgccgcggaaccggtcgaacattttcagctctttccggttttcgggatattgctcggttactttcttacgaaaatacaccttgatactggtcttcatacccgttgccagtgtactgatgccgtgcaccagaccacctaagtacgtatattttttatctttatattccataatctaatctgctagaaatgaaagccgaaggctacacaacatgccattattaataagtttaccatagaaataggaaccagatatttccattccagattcagaatctgatcaatacgcagacgggggaaagtccatttaatccacatcaatagaaataccacaaagaatgctttgccgaaaaaccagataaatccgggaatatagtccattacggcattaaatccgtccagccctacgatatgcaacggcatccaaccacccagaaaaatagtagcagcaacgctggctacaataaacagattcagatattccgccagatagaaaaaaccgaaacccatccccgaatattctgtatgatatccggcggtcaactcactttccgcttcgggaaggtcgaacggaccacggttacattcggcgtttccggcaatcagatagataatgaaggcaatcaccgcgggaatgtgtcctttgaagataaaccagccattagcttgtccctctacaatttcggagaattgcatggttcccataagcactaccatagtcatgatactcatacctacggaaagctcataactgataatctgtgcaccacttcgcatcgcaccaatcagcgagaatttattattactgccccagcctgcaagcagaataccgacaactccgatactggaagctgccaacaggaagaatacgcctacgttgaagttcagaatctccgcacctttattaaaaggaatacaagcgaaagtaaggaacgaagcgataatcaccataaacggagccagattgtagaggaaatggtcggcgcccttcggcatgaagatttccttagtcatcattttaagcacgtcgcagatcacctggatagaaccccatttaccgacacggttcggaccgagacggcattggaagaatccgcagactttgcgctccatgtaaatcaatatgatagccagtatggcatataatgcaacgatgcacacaccgatagccacacattctataaatacggctactccttccggcataatggagagaagcagctcatgtatccagtttgttactatactaaagtcgaacatataatttaaaatacttgatacttattacttgtttatctatcaatatccgggaccacataatccaacgttccgccaatagcaatcaagtcggcaatcttcgctccacggcagattgtgtcaattgcagcaacaagcggtagtcccgtggcgcggtagtgcaggcgataaggcatcttgtcaccctggctttcgaggaaaacaccgaactcaccacggcttccttccacggcagcataataactaccttcgggaacacggatgatcggtttcattttctcctggtggggaccttcgggaatattgtcgattaattgttcgatgatgttcagactctccattatttcgtccatacgtaccaggtaacgggcgaaacagtcaccttccgtataaataatttctttgaaatctactttgtcatatacaccatacggtatccgtttgcgcacgtcgcaagcccaacccgaagcacgtcctgtacctcctgtacagccgaaagagatagcatcttcacgactcagcactcctacacctttcatacggctttgggcaatgacattacctgtaaatatgtcgtggtattcgtgaatgattcctctcatatacgggataaattctttcacccgtttgacaaaattcgggtgaaggtcagcttgcacaccgccaatcgtgttgtaattcataatcaggcgtccgccgcaagtttcctcaaaaatatcgagaatcttttcacggtcacggaatccgtagaagaaagctgtcagcgctccgaggtccatggcaagggcggaaaagaacaataagtgggagtcgatacgttgtagctcatccataatcgtacggatatattgtacgcgttcgctaacttcgacacccattgccttctcaatacacatgcatagtgcatgacgattctgatgggcacccaggtaatcaagacggtctgtcagagccaatgtctgcggataagtaagactttcgttcattttctcgatgccccgatggatatagccacagtttgcatcaatcttacgaataatttcaccctccaaagaaacacggaagcgcatgacaccatgggttgcaggatgttgaggaccaatgttgactacatattcttcttcgccgaagagtttggtttctttgtctttgattgtcccgtccgggttcagctctatttcccgggtcgtgtcaaacgtctcttcgtttgtcatacaaagcggattatctttctccgggtcattgtctttccgcatcggataacctatccagtcattgcgcagataaagacggcgcatatcaggatgaccgatgaaagtgataccataatagtcgaagacttcacgttcgtagaagtcggctatcttccatatatcgctgacagacgggatttccggtaattcacggttggttgtagctgtttttactgctatccgttcgcctgtgacagtagattccagatgatagactacgcctaacccacgaagtttttccggagtatctttctcatctgctgctccccagtccatgccggtgaggctctcgaggaagtccatctgtttttcattccgcaagcgcagcatctcgtcgtgtaatgctacgggggctataaattgtatttcttgcataaatcctttaaattaagaatgtaagattactcttcgttctttatataatccggtttcttctcttttctattcactccaccaaagaacttttctatttttaccttgcgttgcaactgcatcatgccataatagaaagcctcgggacgcggcggacatccggggatatatacatctaccggaagaatcttgtctactccgttcactacgtggtaagactttttgaaagggcctccgctgactgcgcatccccccacggccaccacatacttcggatcgggcatttggtcatacagacgtttcaataccggagccattttattcgtgattgttccgcataccataatcatatcagcttgacgcggactggcacgtgctacttcgaacccgaagcgggccatgtcataacgagcggcacccaatgccataaattcgataccgcaacaactggttgcgaaagtaagcggccacagtgaattgctgcgtccccagttgatgaaatcgtcaaggactccgagagcgacatttgcccctccggcattaagctccctgaccaacttttccaatgactcattgtcaatgaactcctcataaggtattgattttatttttggctttttggttatttccattccaatgctcctttcctccaggcgtatgcaagacccagaactaaaataataaagaagaagagaatactaataagtccttgtggtcccatgtcacgcattactactgcccacggaaacagaaaagctgtttctacatcgaacattaggaacagaatagcaaacaagtagtagcccacacggaactgcatccatgatttaccacgtgtcggtataccacattcgtatgcctcgaacttttgctcattgtatgagcggggggaaatagctcgcgaaagagctatcacaacaccgacaaaagcaagcgctgtcagtaaaacaacaactaaaaatgtaaaattcataattcaatagctgtttagattgaatattatagaaatgaacaacaaacccttcacccactggagaagaggttgattgcctgaaataaatcgaataaaaaatagtgccctggcttgtctaaatgacaatcttccttaaaccatatatataatgggtaacaggatcataaaggtagttgggagtgtgaagcgaaaatgagtaaggcggactttgcaatttgtaatgttcgcagaaataggcgatcagtaataacatgctcttgtctgtcggaacatgggcgacgtccgtatggctcatatcgcacgattgggtggagtatagattataaagacgctcaatcgcattatgaatcggacggtcttgggatacgtagcacttctcctgccgataagtcggggaggtaactttgcaaatatcttccattgttccattagcgacgcaatgaattagcaaagccagtaccaaaagtaatccgaattttaagctttgtttcatctttctcttataacggctgcaaatataggatttatatttatactttttgcaaactctaagtagcaaaaaaggtttttttagcactccaattgatctatgtcaatactcgtttagttctttttccagaaatcggaactgaagagcagtaataccgtaaataattccaaacgtccgaggagcataaggaaagaaagtagccattttgcagcgtcgggtaactcactccacgaataggccgggccacaggtaccgaggcccggtcccatattacccatacttgaaacaacggttccgattgactcgagaaatcctactccgaaacccaacataatgagtatgctgataatggcgataactgcatacagaaatgtgaatgccagtaccgttgattgaatcgaaggagagattacctgtttattaacccgtaccggtagtacggcgttaggatgcaggatatgtttgaactcattctttgctactttaaagagaatcaccatacgaatacatttgatacctcctgtcgtgctgcccgcacaagctcctatcaacataaccacaatcaggcacccccaaagaatggagggccaaagcatataatccgctgtggcaaaaccggtagaagtctgtaatgaaatcacttgaaacaatgatttacggaaagcttcctctactcccatatcacaggttcgatagagccagaaggcaatgaatattgtgaaaaaagatacacagataaaataaaacttcagctctgcgtcatggatgaatttcttgatctttccgttgaacatcaacaacaataaagtgaagttgatacctgaaagaaacatgaaaatggatattacgtaatctatataaggagagtggtaatattcaatgctagcttgtttggtcgagaatcctccggtactggtcgtcgtgaaagcatgacaaatactgtcaaatacactcatgccgccgaatacgagcaatacaatcagcgttcctgtcattccggcatagataccccatatccatttggcggtaacgccgatacggggatgtactttgtcatgagtaggaccgctggcttcggcagcgaatacctgaatgcctcccattccgaaaatcggcagaacggcaattgtgaaaaatacaattcccaaacctcctatccattgtgtcattgcccgccagaaaaggattccgtgtggcattgattcaatgttgttcataatggtagcccccgtactactgaatccggacatcgtttcgaaaaaagcgtccgtaatactcgggatatatccacctatataataaggtaacattccgaaaagcgagaatgcaatccaggcagtactgacaatgacatatccgtcacgacggttgagcgacttttccgcacctttgccaattgcaagcatcaatataccgacgcctgtggtgatagcggatgaaatcaggaaactctgcaaatcgttttctttgtagaaaagagagacagctccacaacatagcagcatagctgtttctatcagaagcaggaatcctatgatgcggtatatcatctttgaattaatcataaacaagctgcggttaatacttaaaacctaatacttaattaaagaatttctcaatctttttaatcatcatactcaggcagaacacaacgacatggtcgcccggttgtatcagcgtgtcaccggttacaagtactccttcaccattacgaatcatacctccgatagtggttcctttcggaaggccaaggtctttgataaaatgtttggtaatcttggcacctgccggcacggtgaattccgctacatctgcattggcaaaagtcaggcatttcacattggatacatccgcatccaacatcatttggtaaatatggctggcggcaatcatctttttgttaataaccgtaccgatgtcaaggctttcggccatgccgatataatcaatgttttctacttctgccaccgtcttttccacgcccatacgtttagcggcaagacaggcaagaatgttggtttcggaatttccggtcagggcgacgaaggcttctgtattcttcaacccttcttcaatcagaagatccatgtcacggccgtctccgttgataatcatagtcttgtcatccaataactcagtcaggcggttgcaacggttgatatcgttatctacgattttcacctgcatatagtccggtacgtattgtgcagtacggacagcaatgcggcttccgcccataatcatcacattacgcacatcggcgtaatcttctttaccggcaattttccggatataagggatatatttgcgggtggtcgtaaaataaacaatatcatgcaatttgataacgtcatctccacgcgggataattgtttctgttccacgcttaatggctaccacatggtaggggatattcgggccacctaattcatagagtggaatattcagaatctccgctttttcacgcatcttggtacctattaagatcagagcacctccacagaactcccaccattggcgtacccagctcatgcgcatggaagatacgatttctttagcggcaagcatttccggataaatcagggagtctacgcccagtttctgaaagaattctttatttttgggcagaagatattcgtagttgtcgatgcgggcaacggtctttttggctcctaagttggtagccagcatacaagcggtcatgttcctgctctcgtccggggtgacggcaatgaacaagtcggcttctttcacacctacttcctttaaaccggaaatagaagaaggggaggcggtgaccgtcagcaaatcgaagttggaactaagtgcggttagtttttcctcgtcatcgtccattaggatgatatcctgtttttcccgggacaataatttagccaggtgggtgcctacgttaccggcccctgcaataataatcttcattttcagttggttaattctttaactccactcatgcttagctgaagtgcgcattgctttaaaagttctttagtgatgctgtcttcatccattccgcagagttggtatagttgtgctattgtaccatgttgaacgaatttatccgggattccgatacgtttcacggtcggagtatattcatggtcggccataaattcgagtacggcacttcccattcctccctgaatcactccatcttctatggtaacgatgtggcggaacttccggcctacctcgtgcagcagtccttcatccagtggtttgaggaatcttaaatcgtaatgtgcaatgcttttgcccgattcggtttcggcacgggcaatggcagtagccgctttatttccgataggacctatgctgataactgcgaggtctttaccgtccttcaatttccgtcccttacctacgggaatttcttcgagcggacatttccagtcgactaatactccgcgacctctgggataacgtatggcaaacggacctttgtctggcagttgggctgtgtacatcagacggcgtaattcatgttcatccataggcgatacaatcgtcaggttaggtatcggacgcagataagccatgtcaaaaactccgtgatgagtaggcccgtcttcgcctactagtccggcacggtcgagacaaaagacaacaggcaagttctggatagctacatcgtggatgatattatcataagcccgctgcatgaacgaagaatagatgttgcagaaaggttgcaaaccgtcttttgccatacctccggagaaggtgacggcgtgtccttcggcaattcctacatcgaaagcccgtttaggcattttagacatcagtatgttcatcgaacagccactgggcatggccggggtaacgcctacaattttaggattggcttcggccagttccacaagcgtatttccgaaaacatcctgaaagagaggaggcattccttccgtattggcaataaaacgctcgccggtgacaggatcgaacttaccgggcgcatgccattcggtagcgtgcatctctgccggggcgaatccttttccttttatggtatgtaagtgcaggattttaggtccttgcaggtcttttatatctcgtaatatgcgggcgaggttcttcacatcgtgtccgtcgataggaccgaagtagcggatgttcattccctcgaagatgttttgttgttgtgcagccattgatttcaggctgttgccgaaacgtataagggctttgcggcgttcttcgtttaaaataccgagtttgaacagcattcgtgacaacttgaaacgtagctggttgtagcggttggaagttgtcatgttgaaaagatactgtttcataccgccaacactacggtcgattgccatgtcgttatcattcaagataatgagcaggttgttcgaggtggttgatgaattgttcagtccctcgaaagccagtccgccactcatcgaaccatcaccgatgacagctatgacatgacggttggaatctccgttctgagcagcggcaactgccatgccgagagcagcagaaatagaattggatgcatgtccgcaggtgaaagtatcgtattcactctcctccggtgaaggaaaaggacggattcctcccaacttccggttggtggagaaagcttcccgtcgtcctgtaagaatcttgtgtccgtatgcctgatgacccacatcccacacaatacggtcataaggcgtattgtagacgtagtgtaaggctacggtcaattccactgtccccaaactcgcagcgaaatgtcccggattgcagcatagctctttaataatgtcttgcctcagttcattgcatacttccggtagttgttctacgtttagtttccgtagatcttcggggtaatcaatagtgtttagcaagttatatatcggttcattattcatgattctaggaaatttagtgcaaaaatacgaaaagaatgtggaacctgaaatggaatacacatctttattgtacttttgcttcgtgaaaaggaattaataaggagaaaaaatatatggattttcgaacgaaggttgaactgcccgcaagcttgccgcctgttactcatgccggacaaatacttctgctgggctcctgttttgcagaaaacatgggtaggcaactggcggaaaacaaattcagggtagatgtgaatccttttggtattctctacaatcccttttctgtttcaacagccttagttgaaatattaaaagggaaggtgtatcaggaggaagatttatttgcttataaggagtgttggcatagcccgatgcatcatggttcattctccgcagctacggcgggcgaggtcatccggaatataaatcatcgtttgcagcaggcctataagacggttcatcaactggattggttgatgttgactttcggcaccgcctacgtctatgaacagaaagaaacggggagggtagtgtccaactgccacaagctgccggaaagcaattttaaccgccggctcctgtcggtcgatgagattgtgaacgaatacacttcattgattgccggtatgacggcacgtaatccgaatctgaagattctctttacagtcagcccgatccggcatattcgtgacggaatgcatgccaatcaacttagtaaatcgaccctgttgcttacaatcgaccgcttgcagcaattgtttccgaagcaggttttctactttcctgcttacgagatagtacttgacgaattgcgcgattaccggttttatgccgatgatatgttgcatccgtctccattggccgtgaactacctgtggaaatgcttttctgattcctttttttctgctgaaacaaagcaggttatgacagaagtggaggatatccgcaaagatatggcgcataaaccctttcatcccgaatcggaagcgtatcaacgctttttaggacaaatagtgttaaaaatagaacgacttatcggaaaatacccgtacttagattttcaaaaagaaacagaactatgtcatatacgattgaatccatagccgaatgtatcggtgcccgccgtgtgggcgaatgcgaagcgacgattgattggctactgacagacagccgctctcttagtttcccggaagaaactcttttctttgccctgactacgaaacgtaacagtggagcccgctatatccccgatttatatgaccggggagtgcgtaactttgtggttactgaagaagactttgagaaaattaagaatggagaactaggaaagctctccaccctcaatttcctcatcgttaccaatccgttaaaggctttgcagaagctggctgaaatacatcgggaggagtttaaaattccgattatcggtataacagggagcaatggaaagacgattgtgaaagagtggttacaccagttactgagtcccgaccgtcgtattgtccgttcgccgcgtagctataattcacagattggtgtacctttatcggtctggcaactgaatgaagaagcagaactgggcatattcgaagccggtatttctgaaatgggagagatgaatgctttgaagcggatgataaagccgactattggcattctgactaatattggcggtgctcatcaggaaaacttcttctcattacaggagaagtgcatggagaaactgactctttttaaagattgtgatgtcgtaatttataacggagataacgagcttatcagcaattgtgtagcaaagtcgatgttgacagctcgtgaaatagcatggagccgtaaggatattgaacgtccgttatatattagccgggtgactaagaaagaagatcatactgttatttcctaccgttatctggatatggataatactttctgcatcccgtttattgatgacgcttccatagagaatgtactgaactgtctggcagcctgcctctatttaatgacccccgccgatcagataacagagcgtatggcacgtcttgaaccgattgccatgcgtttggaagtaaaagaaggaaagaacaattgtgtattgattaatgatagttataactcggacttggcttcattggatatcgctcttgattttttggtacgtcgttcggagaagaaaggattgaaacgtacattaatcttgtcggatattttagaaacaggacaaagtaccgctacactttatcgtcgtgtggcacagttggtacggagtcgtggaatagacaaactgattggcgtaggagcagagatttcttcctgtaccgctcgttttgacgatgcgttggaacgttatttcttcccgaatacagaagctcttctggcttcgaatctgctgaaatcacttcattcggaagtaattctgattaaaggttcccgtgtgttcaactttgatctgctgtccgaagaactggaactgaaagtgcatgaaacgattctggaagtaaatctcggtgcaatggtggagaacctgaatcattatcgtgcgatgcttcgtcatcccgaaacgaaagtgatctgcatggtaaaggcttccgcttatggagccggttcgtatgaaatagccaagacattacaggaacatcatgtcgattatctggctgtagccgtagccgatgaaggttctgaacttcgtaaagcaggtattacttcttctatcatcataatggaccctgagctcacagcattcaagactatgttcgactataaactggagccggaagtttataatttccacctgctcgatgctttgattaaagcagccgagaaagaaggaatcaccaactttccgattcatgtaaaattggatacgggtatgcatcggctgggttttggcattgatgagattcccttgctgattcgtcgcttgaaagctcagaacgctgtgattgcccgttcggtgttctctcattttgtaggtagtgattcgcctcaattcgattcttttacacgtcagcagatagaattatttgagaaaggttcgcaggagttgcaagccgctttctcacataagattctgcgtcatatctgtaatacggcaggaatcgaacgtttccccggtgcacagtttgatatggtacgtttgggaatcggactttatggagtgagtccgatagataattcgattatacacaatgtaagtactctcaagacaacgattcttcagattcgggacgtgcctgcagaagatacggtaggatatagccgaaagggacatttggaacgtccttcacgcattgctgctattcctatcggctatgcggacggattaaaccgccatttgggacgtggaaacgcttactgtctggtgaatggaaaaaaagcgccttatgtcggcaatatctgtatggatgtttgtatgattgatgtaacggacatcgactgccgtgagggtgaccaggcgattatcttcggtgatgatcttccgattactgtcctttctgataaactggatacgattccttacgaagtgttgactagtatatccactcgggtaaagcgggtttattatcaggattagttcataacagagcaacactgagtttcacagggtgggcaaaataataaaaaactccgtggaactctgtgctactctgtggcgaaaatgttatatttgcaccaactagtagaaacctcttatcaaataaacttatgacaaacttattattgttaggctttttgcccagcggttccgaatggattattattgctttggttattcttcttcttttcggtggaaagaaaattcctgaactgatgcgtggcttgggtaaaggggtcaagagcttcaaggacggagtaaatgaagcgaaagatgaaataaataaggcgaaagacgaaattgacaaaccggcagattcagctaagtaaagaagaaagttcgaatggcagaaatgaccttttgggatcatttggatgaactgcgtaaggtactctttcgggtgattgggatttggttcgtgttggcgataggctattttatagctatgccctatcttttcgatcatgtgatactggcaccttgccacaatgatttcatattctacgatttattacgatacatcggacagaaattcgatctgactgatgatttttttacgcaagattttcatgtgaagttagtcaatattaacttggctgctcctttttttatccatctgtcaacggcttttatgttgtcggtagtgactgccataccctatctcttttttgaaatatggcgtttcattagtcctgccctttatcccaatgaacgtaaaggagtacggaaagccctgacaataggtacattcatgttctttatcggtgttttgttggggtattttatggtctacccgttgacacttcgcttcctttctacttaccaattaagttcagaagtagaaaacattctctcgctcaattcatacattgacaattttatgatgttgattctctgtatgggacttgcttttgaacttccgctggtgacttggttactctctttgttgggaatagtcaacaagtctttcttgcggaaatatcgtcgtcacgctgttgttgtcatcgtgatagccgctgctataatcactcctacgggcgatccctttacgttgagtgtggtagctattcctctttatctgttgtatgaaatgagtattttgatgataaaagacaagaaggaagaagatataacagaagaagtttaaacatcgttgggtatttgaaggcactcatttgcataagaattaagatttatcacgtacctttgttttatggaagcaaatgaaggaatagaatcttatgaactactgctggctgtttgccgggagaaaggtgtggaattggttgttggctataaacaaatgcgtgatttgttggaacgtatttgtcgttcggagatgcagaatgagagtctgcaaatgaccgacctttccgccagaatcagttttgtaggtgccaaaaccggacttacttatgcagagcagaatcgtttgcatacattccgtctgacttccaatcgggttttgaatcaccagcttgttcctacccgggagaatcttttgcgagacgtcaagacattggcttttcttatccgtaaattgtccggtgaagatgttcctgttgaattataccgtttgctaccccgtaccgatgcaacttatctggttgcacctcctgcccttgaacgtgtgcaacggatgcgcgtctgctttcagtatgccgatgaacaatatttatatgtaactccgttggatgaagtatcggagaaaccttatttggttcgctataacattcctcagataaacgaagaatttgctgaaacctgccggctgctatggcaatatgcccaaataaatctattagacgttgcggtggatgaagcgggcgtattgaccccttcatttatcgttctcgaaccggattacctgcttgacatcagttcccttgccgaatgtttccgcgactacgggcatcatccggcaaactatgttctttcccgccttcagtcgattgagaatgcacgccctttgttgctgggaaacattgccaacctttttctggatgaatggattcatgcacaggaagaagaaattgattaccgtgcgtgtatgcagaaagctttccggcgctatcctatcgaattggcagcctgtcccgatttgcgtgacaaggaaaaggaacgccggttcttcgatgactgtaaacttcactttgagcatatccgtgaaacggtaaacgatactttccatgctgccggatacgaactggataagacggatgctgtgctcgaaccgtcttatatttgcgaagcactcggactgcaagggcgtctcgactatatgcaacgggatatgtcctcctttatcgaaatgaaatcgggtaaggctgacgaatatgctatccgtggcaaagtggagccgaaagagaataataaagtgcaaatgttgctttatcaggcagtcctgcaatattctatgggaatggaccaccggaaagtgaaagcttatctgctatacacccgctatccgttgctttatccttcccgtccttcctgggcactggtgcgtcgggtgatcgacttgcgcaaccgcattgttgctgatgaatatggaattcagttacggaatagtctggagtataccgcgcagaaactagaaggcatcaattccttcaccttgaacgagcgaggtttgaaagggcatttttgggaaacctacctgcgtccttccattgacaatttccagtcgaaattgaaagcactctctcctttggagaaaaaatatttctatgcaatatataactttataacaaaagaactttatacctccaaatccggagatgtggattatgagggacgcaccggagccgcttccttgtggctttccactttggcggagaaatgcgaagcaggagagattctttatgatttgagaattaaggagaatcatgcagccgatgaacataaagccggtcttacgttggccttccctccggaagagaaggtgggaggagaaagaacttttctccctaatttccgtcaaggcgatgccataattctttacgaacggaactctgatacagataatgttaccaataaaatggtattcaaagggaatattgaatatctgacggatcatgaagtcggaatccgtttacgtgctacacagcaaaatccttccgtacttcctgcccggagtctttatgcgatagagcacgatacgatggataccactttccgttcgatgtatcaaggattatatgcttatctgtctgctacgcaggaacggcgcgatttattgctctctcagcgcccgccggagtttgacgaatcattggatatactcatagctcaagcggaagacgacttcacccgcgttgcattgaaagcgaaagctgcaaaagattacttcctgttagtcggtcctccggggacgggtaagacctcctgtgccctgaagaaaatggtggagactttccatgccgataaagactcacaaattcttctactttcgtataccaatcgtgctgttgatgaaatatgcaagtcgcttgcttcgattcgtcctgctgtcgactttatccgtgtagggagcgaattatcctgtgatgaagcatatcgcggacatctgatcgaaaacgagttggcatcctgtacacgccgtgccgatgtttatgaacgtatacgtaattgccgtatcatggtaggaactgtggccgccatttcgggaaagcccgaactctttcggttgaagcactttgatgtagctatcgtcgatgaggctactcagatattagaaccgcaattgttaggtattctttgtgcacacggcgaaggcgacaggaatgcgatagataagtttatcctgatcggtgatcataaacaacttcctgccgttgtcctgcaaaaagcggagcaatctgctatctatgacgaaacattgttggctatcgggctgactaacctgaaagactctttgtttgaacgtctttatcggaattgccctgccgttcaccgttcacacgatatgctctgtcgtcagggacgtatgcatcccaaagtcgccttgtttgccaaccgggctttctatggcggacatctgataccggtaggcctgccgcatcagacagagtcatccgaacacatttcccgtcttgctttttatccttcacagccggagaaggcaggagggtcggccaagataaattattccgaagcccgtattgtcgcaggtctggcagctcaaatctatgaatctcaccggacagactttgacgattcccgtactttgggagttatcaccccttatcgcagtcagatagcacttataaaaaaagaaatagaagcgttaggtatcccggcgctcaatcggatattggttgatactgtcgaacgttttcaaggtagcgagcgggatgtgattatttattcctgttgtattaatagttattatcagttaaaatttgtgtcgaatttaacagaagagaatggagtgctgatagaccggaaattgaacgtagcccttactcgtgcaaggaaacagatgtttgtgacaggagtcccgaaatacctgaaatccaacccgctttatgaaagtttattaaatttaatagagactcaggggtaattcgctaatttttgcagatgttagtttttattctctctttatgcaattcattaacacctcaataatgaacaaacgcctatatttgcaacacgtttttttcatagagatttagatttaaggttagaagaattgtggaagtcgtgagacttccctttttttcatcttaacgattactatcctccattattagaatgcttctttttcattttaaaagcaggaagtaatgtagaataagtaatcctaaaaagccttcttcgtgagaagaggcttttttgttttactagaatattttgttttacgaaaaacaggaaggtattattaattggataccttcctgtttcattttatatcagatgatagattaatccaatacgataggtttgtacttcggtactaatgccttcataatcacccagcctaccaggtaagctaccgcacagatacagaacataatgaaatatccggcaggcttgccttcgaatcccataaatgtcatgtgcgtttcgtcggcatgaacaaacagcagacctgcaccgaactgcatcaacatggaacccacaccaccggccatgccaccgatacctgtaatacttgcaatagcggttttcgggaacatatcacctacagtagagaagatgttagccgaccaagattggtgggcagcaccgccgataccgataaggataaccgggaaccacggagagaatgtacccaatggctgtgccagcaataccaccaacgggaagaaagcaaaaatcaacattgccttcatacgggcagcataaggattcatacctgtcttattaataaagatagtcgggagcttaccgccatagatagacaacattgttacggcataaagggtgaaaatcaaagccattcccagtccatcggaagtcttgatgtcaaattgagtattcaggtaagacggagtccagaacaagaagaaccaccacacaccgtcggtcataaacttgccggcagcgaaagcccatgtctgcttgtaagtgaaacattgaaggaaagacatcttcttttcttctttcacctcttcaatcacaggggcggcgccttcttcatatttatcctgttcgatataatcaagttcggctttgttgacgtgtttactctttgaaggagcatcatacatgaatacccacatacccatccagacaaaaccaagcgcaccgattacgataaatgccatttcccagccccatgcttttgcgatcaacggaatggaaacgggagcgatcaaggcaccgatagaggcaccggcgttaaagatagaagtagcgtaagcgcggtcctttttagggaagtattcagccgttactttgatagcagccgggaagttgcccgcttcaccgagtgcgaggatacagcgagcggcaaggaagcagtacatactgacggtagccagtacaacaactacgtcaccggtagcagccattagttcggctgcgctgtgcaaacctacatattgttcggtcacaattccgcagagtgcgtgcatacaagcacctgccgaccatacaccgattgcccagagatacccttttttggtgcccatccagtcgatgaagcgaccggcaaacagcatacatattgcatatacaatagagaatacggaagtgatagtaccgtagtgtacttcattccaatggaattccggtttgataaattcgtcccaggtcagcgatagcacctggcggtcgagataattaactgttgttgcaaaaaatagcatagcacagatagtccatctgtagtttgtcattttttcgcctgttttttgaaatgcattcatgataatggatttaatagattttgatttgctgacaaaggtcggtatttcgaatgaaagttatttgtaataattggtcaaaatcatgtataattcgttgcattataggatgattttgttgcatagtatatgtcaggtgttacatttgtattctttgggagaagaatatgataaatccggaaaacttcattctttccttatacagaggaatgaatgaagtttctcggattgtttatatggttgcagagatgcgcaatgattagcgcatttctgtatatttaatcttatccatatctccgtagtcgaggttttcaccagccatgccccagatgaacatatagttgcttgttccggcagcagcgtggatagaccattccggtgacatgatagcctgttcgttctgcatccatacgatgcgttcttcctgaggctcgcccatgaagtggcagatagagttgccggtcggtacattgaagtagaagtatgcctcgatgcggcggctgtgagtatgtgcaggcatcgtgttccatacgctacccggtttcagttccgtcaatcccatttgcagttggcaaggaccttcttcaagtacattgtttacaatcaactggttgataacgcggtcgttgctttcttccaattttccggcagggaaagagttggctttcagagagcctttacgtccgtcaatcgtaattaactgcgttttgtattctttgtgagcagtagcagagttgatgtagaacttggcaggattgcttgagtctttgctcttgaaagtcactttctgcttgcctctaccaacgtacagtgcatctttgaacttcaatgtatattctttgccgtctacggtcacgattccttcgccacctacgttgataacccccagttcgcggcgttcaaggaaaaacttagctttcagcggatcgattgtttccagtaccagttcttttgttgtaggcacggcaccaccgaagataaaacggtcgtacatagaataagtaacgttgatttcgttcggaaccattactttttccataaggaagctactacgcaggcggtttgtatcatacgttttcacgtcttgcggattgcaagccacttgcatcttgtaatttacctgggcagaagcagacatcgctgcgatacccaacatcattgcaattgctaattttttcatctttcgaatctttatttgaattatatattatgtactacttgttgttcaatgcttcttttgcatcatttctcgtcatgcggatacggttgtagatagccattccgagtgcgagtaccacgaggattgccgggccgataatcttcaggctgtaagtcaggtggaagataccccagcagaaaagactggaagcaaagtcgagtgcgccgccttcaaagcctgcggggatattcactgtcgggtcgcccgtagcagcatatacgtcttttgcggccagggtgaagaaacctgccagttccgttacgaaatacaaacctacgattaatgctaccagtccgataataaacgatttcactacattacctttcgtgataggcagaatcatcgggaacaggtagaacatacccgccagagatgccagcggaaggaaccggttacccggcagaatgactgcaaggaatatagttacgggaatcaaaagcagggataccaccagtgtcgtcgggtgtccgataaccaaagcggggctcataccgatactcagtccggcactgttcttatatttttttgcgatcagttcgcgagtagcgtcggagatcggtttcagaccttcgataaagaggctggtgatacgtggaatcaactccattaccgcgcccattttgatacccagacccaatatgctcggaatgctgtctaccacttctttccagcttccgcaacccagtgcgccgataccgcaaccaattacgatacccagaaataagggttcacccattaagccgaatttctttttcaatccttcagagtcgatattcagtttgtcgaatcccggaattttatccaatagtttgttgattacgatagcaaacggaacgaaactttggcagaaaggttgcgggatagagattccgtccattttatcatagaacttctgaaaagcaggagcggtaaggtctgccattaccagcgtgatgatgtagcagatgatagctgcaaagaatccccaatagatattgtcggaagcaaagtatacgatagcgccgataaatgcaaagtgccagtagttccaaaggtcgatattgacggtacgggttgttttagtcagcaacattaataagttaattcccagacaaacagggatgatgaaagcaccgactgaggtattgtaagctaccgccgcagcagaaggccaccccatgtcgaaaattcctaattccaatccgtagatttcaaccattttacttaatgccggacccagactgctggttagcaatgccgtcactactgataaaccaacgaaaccgacaccaaccaacaaaccgctcttgagcgctttgggaagtttaataccgatacatactcctaaaatcgtgaaaatgatcggcatcattactgccgctccaagaccgataatgtacttaaatacttcttccattctgttctatttttctctgttttaatgataatttactgtgtttccccagagggcattagttttaaaccgtgccaaaagtaagaccttttttgctttcttccaaaacgaaactcttaatttatcagatattgcatcaaaaatggacatttttgacgtttgcgtgcacaaaaatagtcgtttccgtacacgaaaaacaaaaaatgcacctagttgattaaaaattcctatccggtttggaagaaatacactactttcgtagcgtgaaaaacgagtatgttgaatccttaaaataacaaaccatgagacgaacccttgcatctgttctttttatattgcttacactggctgcaatcattctcccgatgtcggcgcagcaggtagataagaaactcccctggtctgtacgaatgactcaatcagaaatgatccgttggccggaatcctggcaactcgactttcagcccaagctaaagtgggattattgtcacggtcttgaattgggagccatgcttgatgtctatgatacgtatggtgacaagaaaatccgcgactacgccattgcatacgcagatacaatggtgcacgccgacggaacgattactgcctataaattaaccgattacagtctggatcgcatcaattccgggaaaattcttttccgtatttatgagcaaaccaaagatccgaaatacaagaaagcgctcgatctgctttacagccagtttgaaggacagccccgtaatgatgatggcggtttctggcacaagaaaatttatccgcatcagatgtggctggacggactttacatgggagctcctttttatgcagaatatgcattccgcaacaaccttccgaaagactatgcggatataattaaccagtttgtcacttgcgcccgccatacttacgacccgaaaaacggactttaccgtcatgcgtgtgatgtcagtcgcaccgaacgttgggcggatccggtcaccgggcagtcgaagcactgctggggacgtgctatggggtggtatgccatggcgttggtagatgcgctggattttattccgaagcacgaaacagggagggattcgctgcttgctattctgaataatattgctgtgcaggtaaagaaactgcaagacccgaaaaccggaggctggtatcaggtcatggatagaagcggagatcaaggaaattatgtcgaatcgtcctgttccgccatgtttatctactccttgtttaaggctgtccgcaagggatatattgataaatcttatctggatgtagcgttgaagggctataaaggtttccttgataattttatcgaagtggataggaacggcctggtaaccataaccaaggcttgtgcagtagccgggttgggaggaaaagtatatcgttccggtgattacgactattatattaatgaaacaatccgtaataacgaccccaaagttgtggggccatttatcatggctagcttggaatatgaacgtttacaaaagtaatttatgccgatgaaagggactatttttaaagggatattgctaattctctttcttggtgtaggagagacggcagtttattcgcaacaacagcagcgcaaagatacgttggtcgtcacacgcgacgggacaggagattaccgcaatattcaggaagcagtggaagcggtccgcgcttttatggattacacggtgacaatttatatcaagaacggcacgtataaagagaagctggtaattccctcttgggtcaagaacgttcagttggtaggcgaaagcgccgaaaatacgattatcacctacgacgaccatgccaatattaacaaaatgggaacattccgtacgtacaccgtcaaggtatcgggcaacgatattactttcaaggacttaacgattgaaaataatgcggctcctttgggacaggccgtggcacttcataccgagggtgaccggctgatgttcataaactgccgttttctgggaaatcaggacactatctataccggttcggaaggggcacggctcttatttaccaactgttacatcgaaggtactaccgactttatcttcggaccttccactgcacttttcgaatactgtgagctgcatagcaaacgtgattcgtatatcactgccgcttctactcctcaaaatatagaatttggctatgtcttcaagaattgcaagctgactgctgctccgggagtgaaaaaggtctatctgggccgtccgtggcgtccgtatgcagcgacagcttttattaactgtgagtttggaaaccatatccgtcccgaaggttggcacaactggaagaatccggagaatgaaaaaacagcccgttatgccgaatttggcaatacgggcgaaggcgcaaagactgaaggacgtgtggcatgggccgaacagcttacaaagaaagaagtattgaagtatacaccggagaatatctttaaagaagatagcaattggtatccttataaataggaacagataagatgtccgatcggtcggggagcttgaaacttttgtttcctaagctcgaaatccaggttccgaggcggggaaactgtagtttctctatgtgggaactggagtttctgcgtgtggaaactagagtttctaacgcttgaaactaaagtttcagagccttgaaactgaacttgttcaggtgcaagacaaaatgttgcaggtggcagataaaacgaagaagaactaaaagagcgtgaagaatatgaaaacactaggggctaaaatgataggattactggtagcagcctttatcctctgttccgcatttcgtgtggataaaccggtcgtaactgtctttatgataggagattctactatggccaataagaaactggacggaggaaatcccgaacgtggctggggaatggtacttcccggattcttctccgaggatatcaggatagataatcatgctgccaatggtcgaagttccagaagttttatcagtgaaggccgctgggaaaaagtcatttctaaggtgaaaaagggagattatgtctttatccagttcgggcacaatgatgaaaaagctgatcccacccgccataccgatcccggaaccaccttcgatgatcatctccgtcgctacgtgaacgagactcgagccaaagggggaatccccgtattgttcaattccattgtccgccgtaactttgttcagcctaaggacacttccatttcaaaagatgtccgccggacaccgggggaaagtgaaccgcccaaagaaggaaccgttttattcgatactcacggagcttatctggattctccgcgtaatgtggcgaaagaactcagagttgcatttattgatatgaataagataacacacgacttggtggaaggactcggtccggtagagtcaaagaaactgttcatgttcgtcgaaccggatcaggttcccgccttcccgaaaggccgcgaagacaatactcatctgaatgtatatggtgcacgtgtgattgccgggttggcagtagaggcaatcggcaaagcagttccggaactggcaccatatatccgccactatgattacgtggtggcacaagacggaagcggtgatttcttcaccgttcaggaagcgattaatgcggttcccgatttccgtaagaacatccgcaccacgattctgatacgtaaaggtacttataaagaaaagattatcatccccgaaagcaagattaatgtctccttgatcggagaagaaggcgcgacgttgaccaatgacgacttcgccaacaagaaaaatgtatttggcgagaacatgggaacttccggttcatcgagctgctatatttatgcaccggacttttatgcagagaatatcacttttgagaactccgccggtcccgtcgggcaggcagttgcctgctttgtctccgccgaccgtgccttcttcaagaactgccgctttttaggttttcaggataccctctatacttacggcaagcaaagtcgccaatattatgaggactgttacatcgaaggaacagttgatttcattttcggttggtctacggctgtctttaaccgttgccacattcacagcaaacgggacggctatgtgaccgcaccttctaccgaccaagggaaaaagtatggctacgtcttctatgattgtaagctcaccgcatcacctgaagcgaagaaagtatatctctcccgtccctggcgtccgtatgcccaagccgtatttgtccgttgcgaactgggacagcacgtccttcccgaaggctggaacaactgggggaagaaggaaaacgagaaaactgctttttatgcagagtatgacagtcgtggcgaaggtgccaatccgaaggcacgtgcctctttctcccatcagttgaaaattcttaaaggatatgagatagaaacagtgctggccggtgatgacgggtggaatccggtaaaaaacggaaatcatctgttagatgtaaaacgttgaactcttatgcctgaaactgaaaacttgttttattgaataacctgtttctgctaaatagctggtaaagatagtattaaaatcctgttatttttctatctttacgccacagaaccgagtgatatgatgaagaaaactttactttcagtgattctcctgctagctattgtgttcacggcacatacacagcagcattgctttttcacccattactctactgaggacggactgtcgcaaaatacagtcatgagcattcttcaggaccataaagacaatctttggtttgccacctgggatggtattaaccgttttaatgggtacactttcaaaacttacaaggcacgacagggaaattacatcagtctgaccaataatcgggcggaccgtatgtatgaagaccgttacggttttctctggctgttgacctatgacaaccgcgttcatcgctttgatccgaaaacggaaactttcgagcaagtgcccgcagccggtgaggaggggagtgcattcaatgtacataccattgaagtaatgccgaacggaactgtctggctgctgactgaaaacgacggtgcgattcgcattctgactcatcccgacgagaatcatcggctgacatgggatatttattccaataagacggaattgtttccctctttacacgtgtttaaagtacatcaggacaaagccggtaatgactggctgctgacagacaacgggttgggcatgattcgtccaggagacaaagaacctgtttcttattttacggaaaccaaaggaaagcttagcggaatgaaccaggctttttatgccgtgcaggaacgtgatgaggatatttgctttgcttcggaccacggacgtgtctgggtatatcagaaaggaagcggagaatttgtattgctcgaacttccgaccaaagggcggatcacctccattcatacggttgcaccggatatgtcggtcatcactacggattcggacggtttctttacctgtaatctgaaaacgaaagcatcggtacactattcatttctgacttgcaaggagttacctgccaaacccattctatcggcttatgtagaccgttcttcggaagtctggttcgaacaggaagaaccgggtgtggtagctcatttcaatccgtttaccggagtagtgacgcgtgagcagattcttattgaatatagtaatcctgaacgttcacgtcctgcttttcatatccatgaggatgtgaacggctatctgtgggtacacccgtatggaggtggtttctcatattttgatcctcagaagaagcggctggttcctttttataacggactgggcagccgtgactggcgtttctccaataagattcactcggctttctccgacaaacaagggaatttgtggatgtgtacccattccaagggattggaaaaggtgacttaccgtaatgttcctttttcgatgatgactcccgtaccgcaggaatatgaatcactgcataatgagatacgtgccctctgtgaagacaaacaggggaatctctgggtcggtgtgaaggacggtatacttcgtatatatgacgccgatcgaacttataagggatatctgacggaaaacggcataatttccactgtcggcactcccgtgaagggaacagcctattttatcattcaggattcgaaaggagtgatctggattgcgacaaaaggtgacgggctgatccgtgccgaggcaacctctccttcgggaatgtcgtacaagctgacccgttatcttcaccaagaggatgatatgtatagcttgagcgataacaatgtgtattgtgtgtacgaagatcataacgggagaatctgggcggctacctttgccggtggtatcaattatctcacggagaatgaggacggaaaggttttgtttatcaatcaccgtaaccatttgaaaggttatcctattgatccctgctacaaggctcgttttatcacttccgacaataacggccgtttgtgggtgggaacgacgacgggtgccgtagcctttgacgagaatttcgagaaaccggaagatgtacagttctatcacttctcccgtatgccgaacgatacacaaagtttgagtaacaatgatgtgcactggattatccccactacggataaggaactttatctggctacctttggtggcggactcaacaaactgatctctatcagtgaagacggacatggggcgtttaagtcttactcggtgcaggacgggcttccttcggatgtactgctttccattcgcgaggacgataaacagaacttatggattagtacggagaatggaatctgtaaattcatcccctccgaagaacggtttgaaagttatgatgagcgtagtataactttcccggtacgttttagtgaggcggcttccacattgaccgcgaaaggcaatatgctgttcggtgccagtggaggggtttttatcttcaacccggattctatccgtaagagtagttatgtgcctccgatcgtgttttctaaattaacagtagccaatgaggatgttgtgcccggggaacaatcgttgttgcaggcagatattgatgatacggagcagctggtgctttcgcacgatgagaatatcttctctgtacagtttgcagcgctcgattataccaatccgcagaatgtgcagtatgcctacattttggacggatttgaaaaacaatggacctttgccgacaagcaacgtagtgtgacttatacgaatcttccgaaaggggagtatgtgcttcgtgtccgttctacaaacagtgatggtgtgtgggtagagaatgaacgtgtgctggatattgtcattcttccctcgttttgggaaactccggtggcatacgtactctatgtgctgttgattctagttatcattcttgtggcagtttatatcctgtttactatttatcggttgaagcatgaggtatccatagaacagcagatttcggatataaagctgcgtttctttactaatatttcccatgaacttcgtacgccgctgacgctgattgcgggtcccgttgaacaagtcttgaagaatgataagttaccggaggacgtccgtgaacagttggtggtggtagagaggaatactaaccgtatgcttcgtcttgtcaatcagattctggacttccgcaagattcagaacaagaagatgaagatgcaggtgcaacgtgtggatgtcgtgtcctttgtccgtaaggtcatggataatttcgaagccgtagccgaggaacatcggattgatttcctgtttgagacggagaaacagcatttgtttctttgggtggatgtggataagttggaaaagattgtgtttaacctgctttccaatgctttcaaatatacgccgaacggcaagatgattacgatttttattcgtgaagatgagaataccgtttcgatcggtgtacaggaccagggaatcggtattgcggaaaacaagaagaagtcgttgtttgtccgcttcgagaatctggtggataagaatcttttcaatcaggctagtacgggcatcgggctttcgttggtaaaggaacttgtggagatgcataaggctacaatttccgttgacagccgtttgggagaagggagttgtttcaaggttgagttcctgaaagggaaagaacattatgacgaagaagtcgaatttatccttgacgatgcggaagctccggtaagaatggggcaggtggtggacattgccaatgcatcgcttcaatctgaaactcttgtaacggcagctggtccggagtttgagaaatcgtcttcggaggaagaaccgttagcggaagatacttctaaagagttaatgttgttagtcgaagataatcaggagttgcgtgagtttctgcgcagcatctttactccggtatacagggtggtggaggcggccgacggaatggaaggctggagtaaagcgttgaagtatttgccggatattattatcagtgatgtgatgatgcctgaaaaggatggtatcgaaatgacacgtgaactgcgtgcggatatgatgaccagccatatacctattattctgcttactgccaagactactatcgaaagcaaattagaaggactggagtacggtgcagatgactatatcacgaaacctttcagtgccacctatctgcaagcccgtgtagaaaacttgttgatacagcgcaagaaactgcaaagtttctatcgcgatagcctgatgcatatcaacatggctgctgttcctgaagatctgcctgtatcggcagagggggaatcaagagaagaaaacaggactgaaccggagcaggaagcacaacctgctgttcccgatatgtctcccaacgatcgtaagtttatggataaattggtggaactaatggagcagaacatggataatggcgagttggtggtggatgatttggtacgcgaactggctgtcagtcgttcggtattcttcaagaaactgaaaatgcttaccggattagcgcctatcgagtttatcaaagaaatccgtattaaacgtgctacacaattgattgaaaccggagagtttaatatgacacagatttcatacatggtcgggatcaatgacccgcgttatttcagcaaatgtttcaaggcgcaggtggggatgacgccgacggagtataaagagaaagtggggagataatacgagtttaggcacagagttcttccttcatgtgaagatactaaaaagagaggtcacttcatcggaatgaagtgacctctctttttagtatctatgttgttcgtggtttatggcagccagcgcgggtcaccaaaaccataactctgataaagttcatcagtgatagtgaaatcagccttgtccgggttggcgaacggattgttctcaagaacatttccttctgtgtcgaagcacgttactgttgtgtccgtattgccttcagccaatgagatcaagttcttacagttgtagtaataattgttcgagtaggttggctttcctacggcacttgagttggcaaagccgcgtttgttgttgaagttggcaattacgttgttggtaaacgtgttggtgttacccttgaatcgcagatagaagaagcgatagttggcttcaccgttacctacattatagaatgtacatttatcaatcgaagttaccatgtttgcagttacgctgtttgatgcgtcatcggcacgtagtacgtcccgcttggaggcggagttatagattgtggaacttgaaatggtgagattgttccaaccacctttacggctatcaataaagtcaccaccgtcacacacgatatcatgaatgagggagttttctatcttgatagtatttggtactgctgcaacattgatgtaaataagtcctttaatatagtttcttatttcacacccgttaatggtaaggtcaccgaatcctccttcctttttgtattcaatagcctgactgccatcagtattcgttccatctaacacaacctgatagagatagagtgaagcgccgttatagatatggatacaagtgttgattaccggtggctcggcagaattcttagcagcaatgactacattattattaatttgtaatttggctgctgtcagcacatattcaccgggtgtaagagcaaatttactgcctggtgttgcatcttgaatagcagaaacccaatcgtcagcaggagtaagttcgatagcatcactcaaatccagattagtggtgaaagtagaataaccacgagtcttttcacctaacttcaatgtagctctgtaattggtttccggtgtaagacctgtgatagtggcggagccggaagatatgtcggttgaattcagcgtatacgtcacagtattggcactggagtttgcggtagtaggagcacagatgacagcatcgacctcaatacccggtgtccatgttacttttacagaagtgctctgaatgtcgccggcttttacctttttcatgttctgttcggggttggttgtacgcttgatgtcaacccatttggatgtgcgggaagaattgttttcatcaatggctcttacgcggatgtaataatcagtctctccgataagattggttaaagtcttttcggttaaagttgtggtatatgaggcatccggtgtacgttggtcatagtcgggactgtccgcataaacttcaagttcgtaagaggtagctcctgacatttcattccaactgacaatgatgtttacttcctgtgaaatacgtgcagtgatgccggttggcgacaagacacgattaagaactaaatcattgatatcatctggttcactacatgatgtcactgcaacactacccaggcaaacggcagctaatgtacaaattgatagtatatattttttcattgttgtttaatcatttagttagttaataccactcgtaattagaaagattaggattatcattcaagttgacgttaaagataggccagtattgatatttgtctgggtcgcgaacatagagatagtcaataacatcttccagggcattatctttgatccaagtggatgcttcgcccttactgtctgaaaattcggtatagccttccggattaatatccatttcaccatagttcagaccgtaaaggttcagttttgcatccttttcggtagtctctataccattacgagtccaggtatatgcgctcattttataatatgcatggcctgatagctggctgtaaggatgtttagaatcataatcggtcaaactcacaatagctttcatcttgttttttgtctcgtccattttacttttcaacattccccaacggataagg

SEQ ID NO: 2982 - DNA, 9252 bp, Unknown
  gut microbiota DNA sequence
ccgaggcgatttctgatatgaaaataactaattatcattatcctaaccgctttaaaattcctaaatataatgctatccatttgttgaatcaagttttgaagtgtaaaatggatttgaatcgtggtatgtgcgagtcagcaaagtagtaatacaagttattgtaatagaaaatataatgaatgtatggaggggaaagaacatagtggactaaattctggtggttgggggtattccgaatgtaggcgctgtcatgaatactgtttagcccaaggaggaatatgggattgtcctcgtcctcactaaaaaaaattatgataggatttgaaataagaattaataaccgggagcctgtgattattacatcctatgatgtagcgtttgtaatggtgaactgtaactattcatttgacgataacatttatataggagggacagacactttgagcaggcttgtttgggtcgatgagaacttaaaaataggcgataaggttgtaataaaagtagttgaaatatcaaaagtgtctcctcctatgaaagtaatctatgataaagataaaatgaaaataaaatatgaacaactaaaagttgaacttaaagtaaaagggcttatataatttgtatgaaaggacttattgtaaaatctaaagataaaacatgcaaggcgggcattcctcagtgtggagtagggatcgttgctaatattacttggcatagtggtctgacttggactcttagtggtttaaaaatgcctgaagaaatacatttggtatggaacggaggtatgttggaaataggagatgtagtagaagtggaaattgcagagtttgatgaagcctcaactcctgttgcggaagataaacactgttgcttaatggaagaacaatcagatagtgtagatgaatcgaaagatttagaacataaattaaatctttattatcggttgaaaaaaatattggaggatgagaatttgatagaagtggttgatgattgattttgatcgtttttggtcaaaaggtgatagaagcgtttgtaaaatacaaagatgatcttttagaataatttgtttttgtagctgagttacacatcgtttgattcagctacattacatactataaaacctttgaaatatgaaattatattttattcttttgtcattcctttttgtaggtgtttgtcatgctcaaaaggtaactcgtattaatagtaataagattgccgtagaaggcgacacgattatatattttgatgcagagcaaagacctataacagaacaggcgcattccgactctttagaaacgggtaaatacatcatttctatcaagggaacggatgaaataacggaaattcacttaacttataagcatcctaaacttgagactttaattggtaagatgcttcctcagatcaaattaactgatatgagtagaaaatctgttaaaatggatgaatccgatattacagttatatgtttttggaataggcattgtcgtccttgtatacgggaacttacagctttaaatatactagccgaggattatccgaatattcggtttatagcgctaacgcctgattctaatggagaagtgaagagattaatgggtagattacacctgaagtgggaaaacataactgttgttcccgattacagagacgaatttgatgatacattacatatttatgtgtatccatcaaatgttattattgataaaaacagagttattcaaggggcaactgttggcggggatacacggcaattgttgcggtcattggaaagattgagtggaacttttaaaaaatgattgttgggaataggtaaaatgataagaacatctcattatttgtttgctgcattgtgcttaggtagtctttttgcctgttcacgacaatttacggactcgtacattgttcctaaatggtgctttgctgtgttcatgctatttatagtattagcatatgaagctgtaaacatattattttacaggcagaatgaacagaaagatacgaggatatctgtatatggttttatcattgttatttcttgctttttgcaggcaatgttcggggtagttcagtttttcggtttctttcagatatctactactttgtgggttacggggagttttgacaatcctgcaggctttgcggcatgtctctgtgctggttttccttttgtaggattcttattgtcagatagtaataaatatatccggtatgtaggaggattgataggatttgtaattgtaatagctgtgattttatcccaatcaagagctggcattatgagtattgctttcatttgtttcattcttctgaatatgaagttctttcataagaggtgggtaaagtatctttctctattatgtttcgctttattattgtcaggatgttactggatgaaaaaagattccgctgatggtaggttacttatttggcgatgcagtgtaagtatggtaaaagatgcaccgtggttgggacatgggataggtagttttgaggctcgctatatggattatcaagctgattatttccgacaatatggactgaatcgttattccatgttagctgataatgtgaaacatccttttaatgaatatttgggagttctcttgaattttggatttgtcggtttgttgatgatacttgcgctgataactttgttaatatactgttataaaaaacatccttgtgcggagaaacgaatagctttttattcccttatatcaataggggtattttcatttttctcctatacgtttacttatccttttacatggattgttacgtttttgtgcatcataattcttacaaaggaatatatagcaaaggtttttacctgtccaataataaagaatactgtatgtatctttattcttctttgttcattttgggggatctataatttagtgaaacgtgtaatggcagaaaaggaatggggaaatacatccaggcttgcactttgtggggcatccggcaaaactcttccggcttatgcagagttagagaagaagtttgaaaataatccttattttctttataactatgcagccatacttttggaaaataaacaatatgaggagagtttgacagtagcactgcaatgtcgtaagtattgggcggactatgacttggaacttatgattggtgagaactatcaggaattggataagtatgagttggcggagaggtattatgataatgcgtctatgatgtgtccttcccggttcctgcctctttataagttatttcatttatataaaaatatgggtaatcggaaatgtatgctgagagttgccgagtcagttatagataagcccatgaaaattaaaacttctgctatcaggatgatgaagagggaaatgaagagtgaacaagcgcaattattgattgaagagaataataattgatatcccccctatataaataaaattgaatatgagaaagaatagccttattattgttttttttctgtttctgctattaggctgtacaagtgagatggacaagcgtgttgaaactgtcctttcaatttccgggtcaaataggacggaactggaagctgttttggatcattataagcatgaacctcagaaattgaaagctgcaaagttcttgattgcgaatatgcggtatcatcatttgttttattctctcaggaatccccgacaacatccattattggactcattgacaagagttgcggactctcttttctatcattcagtgtatgtggctactgatagttttcataatggaaatatacaaaaattgatagatagtgttcgcactggattcagaaaacagaatgatgtcagagtatcagagcaatctgtcaaaacgttttggaaagaagattatgattttaattggatcacagccaagcaattaatcaatcatatagatcatgtttttgagtggaggaaacaaatagacggcatacggcggttatccgttgaagacttttacgagtatatccttccttatcggagtatacccgattattccctaattgacttctcagatgtccattctgcatttatgggtaaatatctgacagatattaataaggattctgtacaagaagcgattcggcgatacaactttgtaatatatcagttacgcaagtttttcccgttgtatccttatggagaagaagtcggttatcaggaacttttctttaatggttttcatgactgtatcccgattgcaagttatggtgtgtctatattgagggcttgtggcatacctactgctgttgaatttaatgcatgttatagacagtttcagggaaggcattatcatggagtggtattagataaaaatgggaattggctagcgtttaatccggaatcatcaataccgactagtgacaatagttcttttgaaacgaaagacatactgaatatttatcgttttatgttttcagaacaaaaagacacgcctttctttttggaaaagaatggtgagtatattcctgaactctttgattctccatttctgaaggatgtaacttcacatttattgaagaccgttcctttgactctttcttatcaggaaactggaaataacaatcttgcatatcttgccgcttttaatagcgggatgtcatccggtatcattcccgtaacttgggggaaaataaaccgtatggagcacaatgtcactttctcatccgtaattcctgacaggttttatttccctgtttattattcaccatttggcaaatcattttcttttggagaacctttctatttaaacaaggaagggaaaatagagaagcctcatacaggaagaaaaattaatgatgtgacattacttcgtaaatttcccatgaagcaagggttggtgaataaagcgataaaattgattgggacagtcgttttggcgagcaataaaccagggtttaacccttgtgatactgttggggtaataactgatacgctgtacccttattttcaggacatcaagcttggcatgaacaaaggtccctatcaatattatcagataaagactacaaatgagtatccccatgctgctttgtcggaactggaatttataaccgatattcgatatggatataaaaataccattcctgcctcttctttgcctatattttcgcctgcggatactttggttggaaataagtttgaagttcgactaatggatgaacctttggagcaaattaagtggaaggctgaatatgatggtaatccacaaacatctccagagccttacccaactatacattttatgttgagggaacctcagtttgttacaaaagtaagaatgatgccactgaatgctgacaatggcattgttgtaggtaatcaatatgaattgttatattgggacaatggtgaatggaaaaaaatcctgagtcaacaggctaagtgtaattatattacggtcggcgttccgttcggttcgcttttatggctcaggaatctaacgaaaggcaaagaggaacttccattctatgtagatgataacggacagcagaggtttatctatatgttgtaatagcaggagaaattaatggaaactatataacatttccttgcgtaataattaaatattgcatatctttataagaaatattctttttaggatcgtttggcggatattgttggttattaaaattgcatactaatgaaatatgaagcgtatttaattattctggtggtatgattctaaagaaactcatgatacgactggactaagaatagaaaatatgataatatgtttagaacatttgtctaataaagaaaatttgatgcttatgaaaaacttatttccttcccgagtaattgtgtgtgtaattacactgcttactctaacttttccggtctttgcacaaaccacgaatgcgacagatgaatatgaagagacattaaagaagatgatgaagctttccggtgcttcggctgctacggacgatctttatccgaaaatgctttctgtgatgaaacttaatgcaccgggaaaagatgatgcctactggaacgattttgctaaagactggaaagaaaaaatagaaaatagggtgattgaactgtgtatgcctgcttataagaaacatttgacattggaagatttgaaagcaattgccgcgttttatgaatctcctgccggcaggaaatataaagaaagttcattggctgtgatgcgtgaagcaatgccattgttggtacaggaactccaaacagagatgtttagagaggtgagatcgggaatggataaacaaatggttgagcacgaacaagcaatgaaagaatatgagcaaaaaaagaaacgtgatagagagttgtgtgcacaagcttatttgcttccgaaagacagtatcgctgtagttcctggaaaagtttatgagaacggaatgtctacaactccttcattatattcgattgaaagaagaaaaaaggatacaaaagtgacattcgtgcaacctgtttattgggattcacaatggctgtattatagtccgggattcaagattatagataaagaaagtggcgatgaatataatgtgagaggatatgatggcggagcatctatggataggctgttaaccgttgaaggatttaatcataaatacatttatatcagtcttttatttccaaaattgaagaaaaatgtgaaggaaattgatatccttgaattgccacatgcaaaggataaggaactattgccttctaatgatgatggaaaggctaaatcatattttaatataagagtgaaggattatcaagtttcttccgggaagaaaaataaaaaagtctatttctagggcactttcactattttgtgtaaatagaaaactacagaattccggttttatacttgaatcctgtagttttcaaaggaactattttgatttgataatctgaattatcaatggtcggcttaaccttctttctacagtcaaaaagttatatacttttttctgatgtaaatttgaagtcgtattccggctcgttatcttcttttgtcagaggttttattgtcccttcaataatcatggatccggcagaacctaatgctggcaatttcacgatattatatcctgttgcggcttcttttacaaattcttcattttcatcattacagattatcaatgtattttccgggttatgtaacatgggatcctctgtcaatagcttttccagtcgcataaaggctttaagattggtctggggatttactgaaattacatggatatatgatgccttccatgcttttttcagattatcagctttaataagggcaatcgtttccgtttcgtatgtacggacagcaacagtaaccttgtttgtaatatgccgatcggaagtttgtgcgtaggtgaaacctagagtgatgcaaaatacgcataataataaaattctttttttcataattctatttttattagttgaaaatggtattgatttgtgttttagaggccgttgtttttaatagtattgatgttttcattgtgtttattggtatttgatattgagacaaatgtacggttcttttttatattttccaattttttcgggggacaaaatagaagaggggtgatatactgctattttgctcataatctttactttaattaattctagtcttgtttggataaaagagaaaggtagacagacggtggggtatgttcttttattggaccggatacttttggaaaagctctttttattttgtatatttgtaggagaatagtgatgagtaaagaacggaactaaagaagaatggaaaagaaaatagtgcaatattgcaacagtggaatagaaactccttacagtagttaagctgtaagaaccttggtataaactaaaggctgcgaatctttgtagggtttgcagccttttttgttgttaaaaatcacaggaataacctttctcttggatttgagagtttataataaacttagataccgttattaataaacccctcaaaagtttattaataacatggaacacgtttgtgcaagaaacgttcgcttttttcttctttatatgcgagattgaatacgcccgataggatatttttatagaaagtaatttgtatatacattgatgtaactaaatcagaagcccatccaataactccagataaattccgacagcttcttcgatctctttcagcatgatatattcctctgctgtatgcgaacgtgaagagcgtcccggaccgatctttaccgaagggaaggacattaatgcctgatcagacagagttggagaaccgaaaggaacacggccaagctttactgctttctgaacaaacggatgtttttcatcaatttgtgaagagttgaggcggtatgaacgcgctttggcgtcacaggaaatatgtttcttgatttccacaaacagttcttcgtttgagtaaagttcgttgctccggatgtcgacgacgaaagaacatttgtcgggaatgacattgtgttgagtacctgcattaatcaccgtgacgctcatcttcaccggacctagtagcggagattccttttcaaaacgatagtcacggaaccaggcgatgtcatccaatactttgtagatagcattgtctccctcattgcgtgccgcgtgtccggctttacctgttgcagtgacgtctaacaccattaagcctttttcggcaatggcgggctgcatctccgtcggttcgcccactatggcgaatgagacaggaggaagtcccggcaatacactttcaattccgtccttacctgaaacttcttcttcgcacgaggcaagatagatgaggttgtatttctgcgaagtgcgacatagttgcaggaacacctgtaataacgaaacaacgctggcaccggcatcgttgctgcccagcccgtacaatttgccattttcttcgcggggagtgaacggatcctttctccaaccgttgacaggttttacagtgtcaatgtgagagttaagcaggatagtgggctttttcaaatcgaacatcggactgaggcaccacacattatttcccttgcgtccggtctgcatacctgccatttcaatatagttttgcagaaaatccgcagcttgggtttcttcccggctgatggaagggatgctaatcagtgatttaagcaggcttacagcctctgttgttatataggaaatatcatatttcatagtcaaatcttttatctatatcttaatctttgcacaaagatagtcgttttgaacaatagtttcaaataaaactaatatatttgtgatgtacattgattatcagatgatt

SEQ ID NO: 2983 - DNA, 43223 bp, Unknown
  gut microbiota DNA sequence
tttttgtctaacttttggggtgcacttcaaaaatagttgaggtgtttttttccatatatttgctttgagggtgatagaagcatattgatttgtgttgattatcagtgttttatcaatacgataaaaacggtgaaactcaagaatgggaagtttgtgttatttataaatttgtatcggaagttctcctttcaatgcccctagcgcattgaaagccaatgattccatttcgttttctccgggataaatatggatcggagctaaaaaagaaatacgttttttgagtcgtgaaatgacataatcggagtaagcaatccctcctgtcaggagaatagcatctatcttcccacaaagtacagtagcggcgccacctattgcttttgctacgttataaatcatggcgtccaatacgaactccgcttttttgtctccttcttctatggatttgataatcacaggtacatcggtagtacccaagtgagctgtcagtcccgcacgtccggaaatacgcttcttcaattcatctttggtgaactgtccgctaaaacaaaggtcgatgagttgaccggcaggcagtgtacctgcacgttccggcgagaaagggccttcgccgtccaacgcattgtttgcatcaatagctcgtccatggcggtgaactgcagtagaaataccacctcccaaatggcagatgattaaatcaaggtcttcgtattgtgttccctgctctctggcgaaacggcgtgctattgctttctggttcaaggcatgccaaattgtaattttgggcattaacggtgagcctgtgatacgggctatatcttccagttcatccactactcccggatcggcaatgaaagcacgacaattgggtaaggaagaagcaagtttgtctgcaattaatcctccaaggttacaggcatgagtgcgcatggcgtgtaccgtatcacgtttcatggcttcatttacctcatatactccacccggtatcggttttaccagtcctccgcgtccgatgactgcatcaaagtcaaaaggtatcttattggcttccaactcctggagtaccagattcttccgaaattcaaactggtctaccacttgtgaataaacggataattcttctactgtatggctgatattacggaccagtagcggagtttcattttcatatactgcaatcttcgtcgaagtggagccgggattgataactagaattttcatcaatattgatttttgaattatgaattattggggacttgatttatttgttttctgcattcacagtctcctgagacttgcaggcaagccattgccatgctataatatttggacaagccggagtcactacgagacggaagtaccactgggcagatcggtccttgcaataaacccgccatttctgcctgtgcaaacagggacacagatttgtagaatgcattacccgattctatattggggaatatcagcacatccgcttgtccgttgataggagatacaatacctttaatatcgccgcttgcctgctcgcaggcggtacgtacatccagcgggccgtcaataattacatttccgaactctccggcttcggcaagttccacgatatttacataatccagtgagtggggaaacttggcgcttactttttccgtacagtggattaaggcgatacgtggttgttcaataccgaagtggcggcacgtgcatatagcataccagatcatttctatacgttgttgcaaagtgggacgcggaataacggcagcatccgagaagaaaagtaatttgtgatacgttggaatttccattaccgccagatgcgtaagaattttccctttcggaagcaatcctttttctttatcaagtatagcgtgcaacaggttgtccgtattaataattcctttcatcagaatatctgctcctccctcacggacaatgcgtaccgcttcgcgtgctgcctcgtccgaatcttctatatggatgatttttatgtattcgggatattgtttgagtgtaggatatttttccagaatagccgaatctccgatcatcagaaactccgcaattccttcttccaatgcgcgggtaatagcatattccgtgttaggatcattggcacagactacggcaatccgttttctatgatttagttttttgagatgagccgtcaattgggcaaaactttgaataggttccataacgttagatttttagcaaatatcagaaaaaggattgagaaaatagcgattgcaatccgaaaaattacatccattatgtaacattttgctatattttatttgttttggtcgatagatatgcatggaatcgttttttcctgtatttttgcaaatgaatcccccaatgaaataaaaaagacatgaaacagtttaaaaatctattttttgttagcttaatcctcctttgttggctgttcatttcgtgcaagacgacgaaggttcctgaaggttggtccttggtctggaaagaaaaatttaatcaaaaaaagaattttgattcaaaggtgtggagtaagattccacgaggaaagtcggattggaataattacatgactgattttgattcttgttatgcaatgcgtgaaggcaaactggtgttgagaggtatcgtcaatcaggttcagcccaatgacacggctccttatttgacgggcggtgtttatacaaaaggcaagaaggcttttataaacgggcgtattgaaatttgtgccaagttgaatgctgcgaaaggggcatggccggctatctggatgttacccgaaaaagcggcatggccgtccggtggcgaaattgatattatggaacgtttgaataacgattcaattgcttatcagactgttcattctcattatacctacacattgggcatcacagaaaatcccaagtctcattccacgggacctatttatcctgaccggtacaatgtttacgcagtagaaatgtatccggacagcctttcattttatatcaatgatatgcatacgtttacctatcctcgtatacaaacaaaagaagaagggcaatacccttttaaccagcctttttacctgctgattgatatgcaattgggaggctcgtgggtcggagcggtcggtcctgaagatcttccggtagaaatggaagtggactgggtacatttttatcaacggaagtcaaaaaaataagaacatatatggatattcaatttcctccttttttgcagaaaggtgataaagtagttatcgtatcgccctccagtaagatagacaaacaattcctgaaaggtgccaagaaacggattgaatcatggggggtgaaagttgttatgggaaagcacgccggaggttcatccgggcgatatgccggcacgatcagccaacgtctgaaagatttgcaggatgcaatggatgatccgaaagtgaaagctatccttagtagtcgtggaggatatggagctgtacatctgatagataagattgattttacggcatttcgtgaatatccgaaatggttgttgggcttcagtgatattactgcattgcacaatctgtttcagaaaaacggatatgcttcgttgcattcgttaatggcacgtcatcttgcggtagagccggaggatgatccgtgtacaaactatttgaaagatatcctgttcggaaacttgccttcttatacttgtgagaaacataagttgaataagcagggcagtacgcagggggttcttcgtggggggaatatggcggtagcttacggtttgcgcggtactccttatgatattccggcagaaggaactgtgctgtttatcgaagatgtcagcgaacgacctcatgccattgaacgcatgatgtataatctaaaattgggcggtgtacttgaaaaattatctggactgattgtcggacagtttacggaatatgaagaagattgttcgctgggcaaagagttgtatgctgctctggcggatttggtaaaagagtatgattaccccgtttgctttaattttcctgtagggcatgttactcataatttgccgcttataaacggagcaaaagtagagtttacggttggaaagaaaaatgtagaattaaagtttatttgttaataatctatttcatctgaacaatgctgtgatgaaaatgactaattttgagactttaatagaaaagaggatgatgaaaaagaaaattatgatagtattggtaagtgcctttttgttattatcagcattctcctgcggaggtggcaataaggcaaatagtacaagtgaacaaaacgaaaagatagttgtgaatgtaccacagtttgatgcagatagtgcttatctgtatgtaaagaatcaagtagattttggtcctcgtgttcctaatacaaaggggcatgtagcttgtggaaattatctggctaagcaattaaaagatttcggtgcgcaggtgaccgatcagtatgccgatctgattgcttataacggtactttgttgaaagcgcgaaatattatcggttcttataagccggaaagtaaaaaaagaatcgctttatttgcccactgggatacacgtccgtgggccgataacgatcctgacgaaaagaatcacaagactccgattctgggagcgaatgatggtgcaagcggagtaggagctctgttggaaatagcccgtttggtcaatcaacggcagccggaacttggtattgacattatttttcttgatgccgaagattatggtacacatgaccaggataatgaagaatcatggtgtctgggtgcacaatactgggcgcgtaaccctcatgtacagggatataatgctcgttttggtatcctgcttgatatggtaggtggcgaaaatacggttttcctgaaagaatcatattctgagagatttgcgccggatataaataaaaaggtgtggaaagcagccaagaaattgggatatggcaaaatgttcattgatgaagacggaggaggggtgacggatgaccatttgtttatcaaccgcctggcacgtattaaaacgatcgatattattgcttccgatccggaaggtggttttaccccgacctggcatactatcaatgataatatggagcatatagacaggaatacactgaaggcggtcgggcagactgtattggaagtaatctacaatgaaaaataatctccttgttatttagagtatttagaaatttgtaaatagcaattatatatatgtcaattaatgaattacaagacgaagtgattgcagagttcagtgacttcgatgactggatggatcggtatcaactacttattgatttgggaaatgagcaggaaccgcttgaagaaaaatataagacggaacagaatctgattgaaggatgtcaaagcagagtatggcttcaagcggacgaggtagacggtaagattgtttttaaggcggaaagtgatgctttgattgtaaaaggaattattgccttgctgataaaagtcctttcaggacacactcctgatgaaatcttgaatactgatctttattttatagataagatagggttgaaagaacatctgtcacctacacgtagcaatgggttgttgtccatggtcaaacaaatacgaatgtatgcattggcattcaaagcaaaagaagaggctggctgacaagtttagacagtctcgcggcgcatatatagaatgactcctgccagtatgacaattgcaccgataagaataataaaatacggtgtaccgttaatcagatcatccatattctccgcttcgggatatttgatactgagatatactgataaggagttatttaatatatgcatgaatatacaaggtatcagactacccgttttataataagtccatgccaacaggataccgatcagaaatgccggaagtatctgtgcgggatttatatgaaaggcaccgaatagaagtgccgaaataagaattgctttggtaggattatattgttggagcaaagctttggtgattgctccccggaacaataattcttcaagtacagggcctacgattgctattgcaagaatccctccccagccggattggaggatatcgaaagattgctccatgatattaggtatccaatccagcaaactcattaatgaagaaacaacaaatccactggtaaggattgccactgcactacctaaaagataaggagcggacacaagtgaccaggtctctttctttgtgctgatgtagccggccttccacagatagatacccatcattatctgaccggccaattgcgccggaatcataattgtttgtgtcagaacagccttatctaaatttcctgtggttactaacaaatagatagtacaaggaatcataatcaggacaggggcaacaatttgcgcaatgacaaggtctattaatacaagtttgatagccgtcttcatattttacttttttatttagtagcgaagaagctgcatataaacatagctaacatagaaattgctattaccaccagagaaatactcataaatgacttttgcataagaatctattttaagttgttattcggttgatgtattattttcttagttcttcctgttggttacttcttgctttgctggcaagaagaatcgcttcggtttcttctgcatctttgtggagttggactattagctcgtcaatgctggagaacttcagttcggggcgtgtccgttttacaaaagtgagccggatgagtttatcatatatattcgagtggaagtgaaggatattcacttcaattgttcgattcggaccattgtcaatcgtcgggcggacacctatatttagcattcccatgtatgttttcccgtcaaacgttacccatacggcatatacgccatcggcaggaataagtttatccggatcatctacgcttaaattggcagtcggaaagccgatctttctgcctacttggtaaccgcctacaacagtcccgtccaaaaaatattcatatttcaggcaacgggctgcgatttccacttctccttcatgtaacagtttacgaatcaaagacgaacttaccggaatgtttcgggtagttcctatgtctatgtcactggtatatgcctgtgcacgaattacctctataccaatttctttcccgtagcatacatagtcctcgaatccttcgctgcgattatgtccgaaacggtggtcataaccgataaccagacatttcacctgataacgctcttttaacagtcggttcataaattcgcgggcggttaactgcgaaatgtccggggtgaaatcgagcatcaggcaatagtctacaccaatgtcggcaagcagactaattttctctttcggagtagtcaggagttccggccgataggttgcattcattaccttacggggatgaacagggaaagtgaccaatgcagaacgtagacctttggctgcggctatctctttcacttgttgaatcagatagcgatgtcctgcatgcactccgtcaaagaagcctatggtagctacacagggttctggttttatagccgatatgtcacgtataatctgcatatctattaaattatttactgttgaaaagatgactccagtcttcgccggcttttgccgtataagtagagattcctaagttctgtgccgctttgcagttgatttcggaatcatcaataaaaagagtctcctccggttcgatgccggcatcatccaatattgctttaaaaatttccggttcgggtttggccattttcatttcaaaagagagatatgttttttcaaaatagtcctctactttgaaagtacggtaggggaatagattcttacaagtccatttccaatgaatctcgtttgtattactcaacaaatagactacatatttttcgcgtaacttcagcaataaatcaagtttgtgtgttggtatatctaccagaaaactattccaggcggcatcaatttgtttgtcactaactactttacctatcatttcgcgaacgccattacgaaattctgcgggagtaatcaagcctttctcctgctgcatcaggattccgtcctgatttgagatgtccaatagttcctccacgttacggagccctaatttctggaagttctcgatacaacgttgacggtcgagattgataagtacaccgcctaaatcaataagaaggtttttaattcctttacttttcatttctttttcttttgtgaataatacgctgaacaaggcgaacaagttctccaacccataacaccatggacgaaacgcctataattagaagccatgtctgccagtcgagtggttccgtgcggaatacagcaccaccgaactgtacaataaggaattgtccgacaagaatggcaagcacaattaattccatgccatacgatttggaaagtcctttgaatgccgagtcggtagtgccgaacacacgtgcattaaacaggttccagaattgtaacatgacaaagaaggtgaagaaaatagtgaggttgtgtacatccataccttttgcactgtggtcgaaataataaatcattccgagcagtacgatgaggaagatagaacctacccctaatatgttagacctcattgctttgctgataatgaaatcagtactgcgacgaggcttttcgagcataacagtttcgctgggcggaatagaagccagggccagcgctgcgaaagtatccataatcaagtttacccacaacatctgcgtcacagtcaacggaagttccgtgccgataacggaacccaatagaacgataagtaatgcaacgaagttgatcgttaactggaaaacgatgaaacgctggatattcttataaagcgaacgtccccacatgacggcggttccgatactgttgaacgaatcatcaagcaatgtaatatcactggcctctttggctacagaagttcctgtacccattgataagccgacttgtgcatggttcagagcaggcgcatcatttgttccgtctccggttacggctactaccgctcctttttgctggagcaactgcacaaggcgttgtttgtctgtaggacgggcacgcgacataattttcaaatccattaccctgtcaagtgcttcttcgtcactcaattcagcaaaagcaacaccagtgatacgattccggtcggtgtcggtttccggcttccaaagacctatctgacgagcaatctcggttgcagtccccggagtgtcaccggtcacaatcttgataccgatacctgccgactggcatttggctacggcggcaggaacatccggacgaatcgggtcagagatagcaaccactcccaagaagttcaagtcgtttgccgaaacaagttccacacaatcattcggttcattctcctctacgattttgaaggcgaagcccagtgtgcgcatcgccatattctggtaattcagtagttgtgcttctactgttgaacggtattccacggcatccacccgtcttccgtccaagacaacttctttacatttgcccagaacaatttcgggagcaccttttatatagagtattttctttccgattaatggtgattctacaagcgtagccatgaacttgcgctccgtagagaaggtgagctggtcgagaacacgggcgttctcacggagtttcaggtaatttcttccctgactattgagccataatagtaaggccacttccgtcggatttcctactcctttcggcttttccccggtttctgtttcctcaaggaaggcggtcgaattagcgctgattccctctgcaatcaatgcactgatatcatcatcggacaggttactgccgtttttgattccatagaagtttggttcgtgcacttgcatcagattttgcgtcagcgtaccggttttatccgtacagatgacagtgatagcacccattgtctcgcaagcgtgcattttccgaaccaggttgttggtggaaagcatacggcgcatatttagggccagactaagagtcacactcatcggcaatccttcgggaacagcaacaacaatcagcgtaacagccatcataaagtatttaagtgtccgttcaaataccggaagccattcgtgccagccgtttaatgcaccgaaatcaaaatatagcaatacatcttttacgaagaagataaggaaagccaggccggcaacagtaaaaccaatttttccgattagattggctaatttggtcaactgtatatttagtggagtcggttcaaggttttcttccgtactttggcgggccacttttcctatttccgttgcatctcctacgtgcagaacgcgcattgtgccatgaccgtcgactaccgtagtgccacgcatcaccaaattagaggcgtaagtcgcttcttcgtcaaaatctgcttctataatcgtcttattgataacaggttctccggtcaggttggattcgtttacttgcaaagagatagcttccaccaattctccgtcagccgggatttcttctccggtttccaaaatcacgatgtcgcctacaactatatctttgcgcggaacttcctgtacgcggccgttacgaatcactttaactagtgtttcctcattaacggcattcagtaagtcgaattttttgttggcatcatattcaaaaaagaaaccgatacccgtagccagcaagatagcggctatgataccgatcgtttcggcgtactcattttcgataatggaaataatcaacgaaaagacggctgcaactagcagtacgcgtacgaccgggtcctcaaatttctcaagataaagtttccataaagaaggacgcttggggggtgttaacaggtttataccattcttttccctgctttgtaggacctcactgtccgtaaggcctaaatgattgtaatcatctttatttgtactcatgcagatacatgcgtttagtttggactgcaaaaatacaacatataattgtgataaaatgtttaattaaaactttttatgaagtagaatttcttactgaggtttgccgcatgaaagataagggagggtaaaccagaaggtagaaccttctccttcaatggaatccgctccgatctggccgctcaatttgcctacaatcgtttgtgaaatcgaaagtcccagtcctgcacctttttggtctttattcagtttcacaaaacgcccgaatacattcgacagtttttctgccggtatgcccgtacccgtgtctttcacgtagaaatatagttcagtatctttagcttcataaccgatacggatatttccttcccgggtaaatttaatagcgttgcccacgaaattggaaatgacctgtgccacccgattgcggtcggtctgtataaggcaggaagaaagtgaaggctctgctattatctgtacttttcctccggcatcattaatcctcatttggaaaagtctttgtaaatcggatagcaacaaattaatatctaccgttgaatacacaaattctaaagtgcccgcttctatttttgacatatcaagaatatcatttactaattgcatcagaagatcggcattcattttgataatttcttggtattgtgttttttcttcttctgtgtttgcgctgcccattacttctgcaaacccggtgatagcattcagcggagtacgaatctcatggctcatgttggccaggaaggctgattttgctatatctgcattttccgctttctcttttgccacttttaattccctttctacttgtttcaaatgggtaatatcatgtacggtaagcaccatattttcttcttcatcgaggaggaaataagagccggaaataacagcttcacaggctaccgtttgattttcggaagtaaccatattcaaagtggcttccagattagtgaatcctcttctttgttcgaaagcctgacggatagcctggcgtataggacaggagccacaataaacatgtgtaccgcaacctccctctgccgataatgcattacggcactgcaacaaatcacctactcttttttcttccggtccttttcgtgttccggtctgttggtagtaattcgttttcagcactttgaagtcgttgtttattaacaggatgaaggcgtgtacatttttcaagatagcactggcaacatggttggtatgttctagttttctggattcccgaaataaccgtttctgcattcgaaggcatttcctgcgctcccacaaaaaactgattagcaggattgcacataaaattatgagggtagataaaagtgctattaacatgacataatattgttggttcagcttgttgaatacggttacaaagatagtttttttctttcactataaaaaagtgttgaacaaatatcttgttatttgtgttatattaattagaaaaccaattaaaaatacgaacgttatgaagaagtacatttgcacggtctgtgaatatatttacgaccccgaacaaggagatccggaaagcggaattgaaccaggaactgcttttgaagacattccagatgattggacttgtcctctatgcggagtcgggaaagaagatttcgagccgtacgaaggataaaacaaagggagagaatttattaagaggaaatggccagatacaaatcgtatccggctatttttattttttgaataaaaatataatgctgattataaatgtagtatctttgatgcaaaaatatagaattatgcataacaaggcaactaccagttctaacttcctcttatatcctgttatctcttttttgttgatgttcgggcttttaatagctggttgtagtgataatgagaatgaagaagaactacctgctcctgatgttcctgattatagtacgataatagtcaaaggcatacagaatatgccgaaaaattttacattcgaccgggtggaggtaaaagtgaccggcttggactggcaagtgattgaaactcttatattcccttatgaaaacgggcaaattgtaatgacacttcctgctactttcccttcggaaagacttcagaaagtagatcggcggaatggtgatatggctggttattggactggaacctcaaatgacggtgatgcgctggtagcaacattgggagacttttttgtttttaatggcgatacgagggtaggacgaatagcactttccaattggtccggcaagggatcgtctgcggaaaaagcaacattggtgagttatcagtatgccgaccgccccttcatattgaccggcagtgataaatcttattattatagcgagtgttcctttaataaagggtggaatatttttgctaatatcaatccctcggaaggcagttcgcaaaaggtacttcggacaactaccgtcccggaatctactttattctggcgactggcagaatcctatatctataataaatagtgagtaaatacaaaataattgataaagaaaaaggagaagcagatgcattagtacataactgcttctcctttttctattctttatttctcctatttaggaagctttcttttcttttacatcactgctggcttctaccacatttactatataatcacccagtttctcacattcggcgataatatccatatagtaaactcccatttgataatcatattccttgttgtttacatccaagatgttctgattcttcaattggttgcggtaattattgatttcgttttcgatattgaaagacttgttgatatcaatactctgatgttccggtttctctactaccacaatcatttgtgcaagagcgtcgttcgtcagcttcatcataaaatggatatgctcatattgcttttcggtgaagtcttgatttgtctggcgtttccggttaatcgtacgtgccaagttgtaacaactgtccccgatactttcaatttccgtcacttcacgcaacatggcgcgtatctgtaacttactttcagaactcaaacgaccctctgatacttgattcaggtagttggctatctccagttccatgttgtcgctgatattctcgtatttctctatccggctgaacaacttattgaaatcatcatccttttccgtatgcagcaaatcttgcaccatgccgaacatacggtgggtacgttcagcgaataaatgaatttccttacgtgcctgaaggatggaaagttctgccgtagaaagcataccgcctgtaatgaaccgcagtcttggttcttcgtcttcttccttcgggtggattaaagcgcatacggtacgttcaattaacttcacaccccatatcaggatacatacgttgcagatattgaaaatagagtggaaggcggacagtttgtaagagatagcaacttccggattacttgtctggaagaaagtatctactacccagttaaccaactgcatgaacgggtggaagataatcaatacccagataacaccgaacacattaaaaacaaaatgcgccaatgctgcccgtttagcctgtgtgttggctgttaatgcggcaagattggcggtgatcgtagttccgatattttctcccagtaccagggctgctcccagctccaggctgatccagccgttggcacacataatcagtgtgattgccattgtcgcggctgaagcctgcacaatcatagtcagtatcgtaccgatgaataagaacaggaggatagagaagaatcccatgtccgtgtagttctgtacaaaggcaagcatttccgggttggcattcaggtcgggagcattcgctttcaggtaagaaagtcccatgaagaggaaagaaaaaccgaaaatgaattcaccgacagacttacggttgcttttgccggagaagatgagcggaagggcaatggccagaagaggaagggcaaatgcggccatatcaaccttaaatccgaaaattgagataatccaggcagtgaccgtagtaccgatattggcacccatgatgacactgatagattcagcgagagtgagtaacccggcattcacgaaactcacgaccattaccgtcgttgctgaagaagattggataagggctgtgattaacacacctgttaaaactcccgttaccctgttggtagtcattgccgtcaagatacttcgtagtctgtcacccgcgaccttttgcaagccctcactcattatcttcattccgtacaggaagagccctaatgaacctatgagctttaaaaaatcataaaaagaatattccatctataatattgttaatggttatttgttctcagtctgattataagtatattagtcccaaattattcaccttttaacgaactcgatgaaacagatgttacaaatatgttgcaaaaataacaatatttctaaagaattccccatcgggagctcacttttggatatttattacggttttaatcttaattttccttatcaagtggttagtgctaaagtcaataaccgctctgagggacttaattttagggtatataataataaggatatagagtttctggacgtgagagaccagtccggtatgcgtacctatgtccgttcgctctgttttgtactgtttaaggcggtcacggaattgtttcccgagggcaagctgtttgtagaacatcccgtttcgaaaggttatttctgtaatctgcgtatcgggcgtcccattgaattggaggatgtaaaacgcatcaagcaacgtatgcaggagattattgcagaaaatataccctatcatcgtatcgaatgccatacagccgaagctgtacgcattttcagcgaacggggtatgaatgataaagtccggttgctcgaaacttccggttccctctatacctattattatacgttgggcgatacggtcgattactattatggcaacctgttgcctagcaccggctatcttaaactgtttgacatcgtgaagtattacgatggactattgctgcgtattcccagccgcgagaatcccgaagtgctggaagacgttgtaaagcaggaaaagatgttggacgtctttaaagaatatctgaattggagctatatcatgggactcaacaatgcaggcgatttcaacctcgcttgcgaagaaggccatgcaacagatttgattaacgttgctgaggcattgcaggaaaagaagatagcccagattgccgataccatttttcatcgtggcgaaaacggtaaccgagtgaaactggtactgattgccggaccgtcttcttccggaaagaccactttcagcaagcggctttcaatccagttgatgacaaatgggttgaaaccttttcctatctctctcgataattatttcgtagaccgtgaggatactcctttggatgaaaacggaaactatgattatgaatcgctttacgcgctcgacctcgagctgttcaaccaacagctgcaagccttgctgcgtggtgaagaagtagaacttccccgctttaattttgctctcggcaagaaagaatttaaaggtgataaactgaaaattgaagataacacgattctgatattggaaggtattcatgccttgaatccggagttgacgccacatattcctgccgaacgtaaatttaagatttatgtatcggcattgaccactatctctctggacgaccacaactggattcctactaccgacaatcgtctgttgcgtcgtattatccgtgatttcaattatcggggctattctgcccgtgaaaccatttcacgttggcctagtgtgcgtgccggtgaagataagtggatattcccttatcaggaaaatgcagatgtaatgttcaattcagctcttctttttgagtttgcagtgctccgcctgcacgctgaacctatattaatgggagttccgcgtaattgcccggaatactgcgaagcctatcgtttgttgaaattcatcaaatattttgttccggttcaagacaaagaaataccaccgacttctttgcttcgggaatttttaggaggaagcagctttaaatattaagtaggaaaattaggatatattcgttttttcaatttactttgcgtaattatctcaacctgtctgttagggtcagacaggttggaatacgaaacagcaataattaaattcgttggaattattcagacgagagggtcaataactgttatatggcacttgaataaatgaacctttgggtatttattctgttatgaagatattacatacaacaaaaaaacgggaatatgattttttataataatcttttggcaaaatggttcttagggaaaaagaagcattattttatggtaggcgggcttttctttacccgatataaatatttagaagtttgggaagatatggaattacggatacatgcaaggcaatattgggaatgtttctttttgactttagttccggcattaattttgtctttgtggctttcgtggtggtggatgatagttcctttcgttacctatgacatactttattggttggaaaaagcattccgttctcattctgtattcaactgggaagcggtagaaaattgtggtgatacgctttatttaagaaaaagaaaatcttatgcatggatgaaatggtacggtaaaaagacgttgcctttatccgattgggacgaataaaggtcgtttctttatgaaactgttcatttgggcactcctataaaaatgacggaggttttccggtattaatgaaaaacttccgtcattctagtggttgtctgagaagccagtgttagtgcgattaatttttttgcttatcgtaaagcttccacttcgtccggagtcagagggattttcttacccagtctgcgggcaccagtttccgtaatcaggtagtcttcttcgttgcggataccaccgaaatccttgtaagtttccactttttcgtagttgatgaaatcggcaaacttcttttccgccttccacatatctatcaattcgggaatgaaatagatacccggttctaccgtatgcacaaatcccggttccaacggaatggcgagacgttgtgatttacgtccgaactgggtgcttttcggttgtccgttatatcctacccagatttcacccaagttttccatatcatgaacatccagtcccatcatatgacctaatccgtgcggatagaacaacgcatgagcaccttcgcgcacggcgtcttctgcatttcctttcatcagccccagtgccttcattccttctaccattacacgggcggacaattcataaacttccatgtagggaatgcccggacgtagcgctttgaccgattccagatgcatggcattctgtatttcgtaaacttcgcgttgacgggtagtaaactttttgtcggcaggaaccgtggacgacatatcgccggcatagcccgattcaatttccgcacccgcatcaatcaggaacaaatcacccggtttcacgagattgccgtgataatgattgtgcagcgtctgtccgttgatagtagcgatagtggcaaaagaaagttcgcagttgttagcttgcgctacccggttcatttcggctaccacttcatactcgtacatccccgggcggagtaccttcatcgctgtgatatgcatatcggccgtcacgtcgcatgctttttctatttctacgatttcttccgcagatttataattacgttgtgcgattacggcacggataaaaggcaccgatccttcctgacgtgcaggcggtatgcccagccaatccattagcttcagtttatgttcggggcggtaaggaggcagataatgaatcgcctttcctttctgcacacatttatgcagataaccgacgatgtcggccgaaggcattatatcttttactcctacacgttcgcatttttcgcgtagcgtaggctgcgatcccatccatacgatagcgtcaatagacagttcatcaccaaaaatgatttctttgtcctcatcaatatcaataattgccgaaagtccggcgcatgaaagtccgaagtaataaaggaatgtagaatcctgacgataacggaacgtgttatcctcataattcagtccgcactcgtcatttcccagaaataacaaaactccggagcctaaattcttttttagcagggctctgcgctgcatatacgtttctttggcaaacatactgtcttaatttttaagttcgtgcaacaaagataacgatttttgtgttataggattaaaaattatctccctaatctgtgtaatctctagttaaaaagttacttttgtagcgagaaacagtagaaagcaaaaacgaatatggcacaaggttcccgtcaaatacaatcgcaggcgcaacagcaggtacaaacgctctcgcctcagcagattctggtcgtgaaactgttggagcttcccgcagtagaactggaagatcgtatccatgctgaactattggaaaatccggcactcgaagaaggaagagaagaatccgcagcggacgaatattccgatgttgaaggttctgaagatggcatggataatgcatccaccgactatgattctttgaatgactacctcaccgaggacgatattcccgactataaactgcaagagaacaatcgttcgcaagatgatcagccggaaaatattcccttctccgaatctacctccttttatgaaatattgaaggagcaactcggtgaacgcaatctgacagaacatcagaatgaactggtggaatacctcatcggttcattagacgacgacggactgctccgcaaatcacttgaaagcatttgtgacgaactggtcatctatgtcggagtagaatccaccgaggaagaactggaagaagcattgtgcatcttgcaggactttgatcctgcaggaatcggtgcccgtactctccaggaatgcctgttgttacagatctgccggaagaaggatgaagaacggacccccaaccctatattggaactcgaagaacgtgttatcagagactattatgaagaattcacccgcaagcattgggagaaaatcatcaggaaactggatgtcgacgaagatacgttcaatgaagttatcagcgaaatcaccaagttgaacccgcgtcccggtgcctctttgggagaaactatcgggagaaacttccagcagatcattcccgatttcatcgtggaaacatacgatgacggaacaatcaatgtcagtctcaataaccgtaatgttcccgagcttcgtatgagccgtgacttcacggaaatggtggaagaacatactaaaaataagttcaaccagacaaaggaatcaaaagaagccatgatgttcctcaagcagaaaatggatgcggcacaagggttcattgatgctatcaaacagcgtcagaatacgttgatgactaccatgcaggcaataatcgacctgcaacgtcccttcttcctcgaaggagacgaatctttgttgaaaccgatgattctgaaagatgtggctgaacgtaccggactggatatatctaccatttcccgtgtgagcaacagtaaatatgtgcagacgaattttggtatctatcagcttaaattctttttcgttgacggatatacaacggaagacggcgaagaaatgtctgtccgtgagattcgcaagatcctgaaagagtgcattgacagcgaagacaagaagaaaccgctgacagatgacgaactggcggagatcttaaaagaaaaaggataccctatcgcccgccggacggtagccaagtatcgtcagcaactgaacattcccgtagcgagacttcggaagtgataggaagaagtaacatgaaaatgagagttgagattttgtaataaataactagtaataaaaagaagagtggataaagaaagagagcatatcatagcggataagaccatgttgcgggtagcgagagttacctcaatggtgtttactccattttcgattccgtttttgtcgtttttggtgttattccttttttcttatcttcgtatcatgccgatacaatataagttgattgtgttgggaattgtttattgctttaccatactgacgcctaccattactattttcctgtttcgtaagattaatggcttcgcccgtcaggaattgagcgaacgtaagaaacgttatgtacctatcctgctgactatcatctcgtatgtattctgcctgctgatgatgcgcaagctgaatatcccctggtatatgacaggcattattctggcatctctggtagtttctgtcatttgtattgccgtcaacctgaaatggaaactgagcgagcatatggcaggaataggtggagtgatcggaggactggtctctttcagtgcgttgttcggttataatcccgtagcatggttgtgcctgtttatcctgattgcaggtatactgggttccgcacggattattctgggacatcatacattgggtgaggtactttccggctttacggtcggtctggtagctgctctgctggtgcttcatccggtgagtaaccttttatttcgagtatttttattttaacaacagtataaatcctaaaaactaattattatgaactttccacagaatttgaagtacacgaacgaacacgaatggattcgcgtagaaggagacattgcttatgttggtatcacagactatgcacaagaacagttgggcgatattgtatttgtagacatccctactgtcggtgaaacgttggaagccggtgaggtattcggtactatcgaagtagtgaaaacaatttccgatcttttcttgccggtggccggtgaagtgatcgaactgaatgaagcgttggaagaaaatccggaactggttaataaagacccgtacggtgaaggctggctgattaaggtgaagcctgaagatattaaagcagtggaagacttgctggatgcggaagcatataaagcagtagtaaacggataaaagtcccgtcactgtaaaactgtaatttgtaactggtaaatagtaattaacatgactccaattgtaagtatcatcatgggcagtacgtccgaccttcctgttatggaaaaggcggcacaactgctgaatgatatgcatgtaccgttcgaaatgaacgctctgtctgctcaccgcacgccggaggctgtggaagagtttgcgaagaatgcccgcaaccgtggcattaaagtaattatcgctgctgccggaatggctgccgcccttcccggtgtgattgcggccaacactacacttccggtgatcggagtgcccgttaaaggttccgtgcttgacggtgtagatgccctctattcgattattcagatgcctccgggaatcccagtggctactgtggctattaacggagcaatgaatgctgctatcctggctatccagatgcttgcattgagtgatgaaaagttggcggaagcttttactgcttacaaggaaggtttgaagaagaaaatcgtaaaagcgaacgaagaactgaaagaagtgaagtttgaatataaaacgaactaatggatctattcaattattttcgaagagaaaccacagaagtaaatattggggctgtaccgttgggcggccccaattctattcgtatccagtcgatgaccaacacgtctacgcaggatacacaggcttgtgtggaccaggccaagcgaattgtggatgcaggtggcgagtatgtccgcctgacaacgcaaggcatcaaggaggccgaaaatctgatgaacatcaatatcggtctgcgcagtcaggggtacatggtgccgttggttgccgatgtgcatttcaatcccaaggtagctgatgtggcggctcaatatgccgagaaggtgcggattaatccgggcaactacgtagatgctgcgcgtacttttaagaaactggaatatacagacgaagagtatgcgcaggaaatacagaaaatccgtgaccgttttgtcccgttcctgaatatctgcaaagagaatcatactgctatccgtatcggggtgaaccatggatcgttgtccgaccgtatcatgtcgcgctacggcgatactccggaaggaatggtagaatcctgcatggaatttcttcgtatctgtgttgaagaacatttcacggatgttgtcatttcgataaaggcctccaatacggtcgtaatggtaaagaccgtccggttgttggtcgctctcatggaaaaggaaggcatggctttccctctgcatctcggagtgacggaagccggagacggtgaagacggacgtatcaaatccgccttgggtatcggcgcactgctgtccgacggtttgggagataccattcgtgtatctttgagcgaggctcccgaagccgaaatcccggttgcccgtaaactggtggattacatcctgttgaggcaggagcatccgtatatcccaggactggaggcaccggagtttgattatctgtctccctcgcgtcgtcagacaaaggctgtccgcaatataggaggcgaacacgtgccggtagtcattgccgaccgcatggatggaaaaacggaagtaaatccgcagttcacaccggactatatttatgccggaagagcactgcccgaacaacgtgaaacgggcgtggaatatatcctcgatgccgatgtgtgggtgggagaatccggaacatggcctgcttacaatcacgcgcaactgccgttaatgggcggctgcaatgcagaacttaaattcctgtttatgccctatatggcacagacggatgaagtgattgcctgcttgaaacagcatccggaagttgtagttgtttcccaaagcaatcacccgaaccgtttgggtgaacatcgtgccctggtacatcaacttatgacggaaggattgcagaatccggttgttttcttccagcattatgcggaggataatgccgaagatttacagataaagtctgctgccgatatgggggcgctgattttcgacggtctatgcgacggaattttcttgttcaatcaagggggcctgagccatgctgtcgttgatgcaaccgctttcggaatcttgcaggccggccgtacccgtacttccaaaacggaatatatttcttgtcccggctgtggacgtacgctctacgatttagagaaaacaatcactcgcatcaaagctgccacttcacacttgaaagggttgaagatcggtataatgggatgcattgtgaatggtcccggcgaaatggcggatgccgattacggctatgtcggtgcgggacgaggcaaaatcagcctgtataaaggtaaggtttgcgtggaaaagaatattcctgaagaagaggcggtagacaaactattatctttgattcagactgatcggaaagaataggagctttaatttgactcattaatattctaaggacagaagttgctttaaattcgtttggagtaatttctgtcttctgttactagaaaagttctttggttcttcttcaaatttggtggtaatttaaccagtcggtggtatctccattcccctccttcggggaaggaggggtggctgaaagccggggtggtaggcagatacacaatgctgataataaccgacttacgcattcacctaccacctccccctacggggactcctccttcctgaaggaggagaatgttgaatactatcgactatcaaattattattttcttaattaattttaccaccaaatttgaagaagaatcagttttttgttttcatttctcatattctcataacctagtggctaaatgtaagattattagtaagataccgctatgagaaatgttttttgaattggtatttctcatgcatttctcatagttttctcttcaaattccttcatttctcatactattttctcttatttctcatagggtaataaatcctttcggtagtatttaaccaagcttattgtatctggaggatacctattgttttcatataaaacattaaataataactaattattcactaactaatgtcatgtcttttaagtgatatcttattcgttctactttagtgaacaggcttgtttactggagtggcaggatttatctactggagtgcatagatctgtctacttgagtggaacgatagaagatgagataagaacataaatggatgaagacgagatatgataaggatgtaggtaacgtaatatataaatatctattgctttacgcgatgtatgtgtagtcgctgtctttactataaatatgtttttcttttacttggattttaatacttttatatagaatgtggagctatattaatgttatcttaaagatacgtattttatgtagcgaatttattcgtcctaccggatatattgaaccttgtttttcttatatttgcagcacatgatttctaaacaataattaaattattcattcttatgaaaaagattctggtattattcgttttaacagcgatagctatggtgagtgtaaatgcgcaggacaacttgaaatggggtgttatggcaggtatgaatgtgagtaaatatacttttaccggttttgacaacagggtaggctttcatgcaggtgtcaaagctgagttggggttatcgcaggaagcaagtggggcatacatggattttgctgcgttactgacgttgaaaggtgctaaaattgatggaggatcaattgcaaccgttaaatttaatccgtattatttggagataccagtgcatgttggttataaatatgctgtaaatgaagattttgcgctgtttggtagcgtaggtccttatttggctgtcggtctgtttggaaaagcaaaattgaacataggcaatgcgattggtgattgggctgatatagaaggtatggaaagtgtaggaggcctggaaggtaaatctgtatctgaagatatatttggcgatgacgggttcaaacgattcgacttcggcctcggattgaaagccggtgttgagttcaacaaaaaatatcaggttgctttgagttatgatttcgggttgattgacgtgcagaaagatttgggtatgaaaaacaggaacctgatgatatcatttggttatatgttctaaaacggactttgcaactttgttgcacgaatcattcgttacctttgcaacagataaaaaacgaatgaatatgggacattgttgttgcggtgcacattcatgcacgacagaaaataaaaagaatgccagtacttcgatagttcacgaatactggaaagtagggctttcatttatacttctgataggaggtattataatgaatgccctgaattttgcctttttccttggagagtatgttgctttaatatggtatatcctggcttatcttccggtaggaataccagtgatgaaagaggcttgggagggtatcagggaaaaagactacttcagcgagtttacactgatgattgttgctacgctgggagccttttatattggtgagtatccggaaggagtcgctgtaatgctgttttatacgataggagagttgtttcagaataaagcggtagacagggcgaaacgtaatatcggtgctttgctggatgtgagacctgagaacgccttggtgcttagggaggataatcttgtggtagaaagtcctcaaaatgtaaaagtaggagaggtcattgaaataaaggcgggtgggagagttcctttggacggagtgatgttgaatgaaatcgctgcttttaatacagccgcgttgacgggagaaagtgttccccgtgacatcagaaaaggagaggaagtccttgcggggatgattgtgacggataaagtaatcaggattaaagtagaaagacctttcgataaaagtgcgcttgcacggatattggaactcgttcagaatgcttcggaacggaaagcaccggcagaattgtttatccgtaagtttgcccgtatctatactcctattgtcatagcactggcggtattgattgtgctactcccgttcggctattcattgatagaccctcaattcgtgtttacatttaatgattggttatacagagctttggtttttctggtaatttcgtgtccatgtgcgctggtagtaagtattccattaggttatttcggtggtatcggagcagcttcccgattggggattctgtttaaaggcggcaattatctggacgcagtcactaaaatcaatacagtcgtattcgataaaacgggaacgctgaccaaaggaacatttgaggtacaggattgtaagtgtgtatccgggatttcggagaaggaactggtgaggatgattgcttcagtagaaagtgacagtacacatccgatcgctaaagcgattgtgaactatgcaaagctgcaggatatagggcttgcggttgtcaccaatactaaagaatttgcaggtctcggtttggaggcaataatagacgggacttcggtgctcgttggaaatagtcggttactgtctaagtttagcataaaatatccggcagaattgcagagtgttaccgatacgattgtagtttgtgctattggaggcagttatgcgggttatctcttgttggcggacgcattgaaggatgacgcgaagacggcgattgataacttaaaagcattaaacattgaaaacattcagatattatccggtgataaacagagtattgttactaactttgcagagaaactcggtatatcaaaggcttatggcgatctgcttcctgacggtaaagtgaaacatctggaggaattgcggaagaatgaagcaaatcagattgcctttgtcggtgacgggatgaacgacgctcctgtgcttgcgttgagccatgtcggtattgctatgggtggattgggcagtgatgcggcgattgaaacagctgatgtcgtgatacaaacagatcaaccgtcgaaagtggccgaagccattaaagtaggaaagctgactcgccggattatctggcagaacgtgtcgctggcatttggagtgaaactgctggtacttatcttgggagccggcggactggctacactttgggaagctgtctttgcggatgtcggcgttgcattgcttgccattatgaatgcagtgagaatacagaagatgataaaataaaaagaatatggaagagaatgtttatttggataagctggaaagacgggatatcaaaccgacagcaataaggcttctcatattgaaaaatatgttggaagttggacgggccgtatcgttactggatctggaaactctcctggatacggtagacaaatcgaccatatcccggacaatagctctctttctgtctcatcacctgatacatagcatagatgatggaagcggttcgttgaagtatgccgtttgcgacaactcctgtaactgcgtggtgcaggatttacactcgcatttctattgtgagaaatgtcatcggactttttgtctggaaggtacacatattccggttattgatttgcctaaaggattcacgttacatagcattaattatgttctcaaggggatttgtccggaatgtacttctcattcaaagaatgaataaatagaaaaagccggaactcagaccaatagaaatatcggtagagttccggctttttatcaatatgcttgtttaatcgatgtttggattcaatgaatgccagtctttgatggcaggtatgattcccatttcaataacttcatcacggagcttgcacaagtgttcgtagctcttttccagttcagcctgttcggcaggagttccggctacttccttataagtgacaccgtttttggtgattgaagtttccattgccatcatgatatgatcgaattttccattggagacatacgttccggcaggccagcggaaaggttgtccgcccatagcggcagcgatcatctcgatagaaagataggcggggctttggaaagaagaacggccgcgcagatcgatgatgtgctttccaccttggataacacgtactttcagttcttcccattcggttaatgggagacgggtcgtaccaatgaaatcagtcaacggttctcctttcactttagtggtagaagcaaatacggccatttgttcgccatgaccgccgtatgtgcggcagttctgaatttcagaagccgggatatggaagtatttcaccagttcgttttgcagacgggtgctgtccaatgctgccagcgtagaaacctgagacggtttcagtccggaatacagtaaggtaatcaaaccggtaatgtcggccggattgaaaatgacaacaatatgttttacgttcgggcaatattggcggacgtctttaccgaattgagcggcgatttctgcatttcctttcagcaagtcctcacgggtcatacctgctttgcgggctgcaccaccggaagaaacgatgtaagatgctccggtcaacgcttctttgatatcagaagtataagtaaggttgacaccttcgaagccgcagtggtacaattcttctgccaccccttccaaagcgggagcaaacggatcatacagacaaatattcggagtgagtttcatcatcatggcagtttgagccatattggagccaatcattccggctgctcctacaattgtaagtttctcgttggttaaaaattccataaagctatctatttaaaggtgaataatctgttatttctttttgtcgctacaaagttaacactttattgacctgattgttcattgaaaatagttttatcagataacgaaaagttatagctggctgattgaaggatctgtctaaaatagattatctttgtatcctatattatataaatggataaatatgagcatcgaattaggaaaattcaatcagcttgaagttgtaaaggaagtcgatttcggggtgtatctcgacggaggagaggagggggagattttgttgcccacccgttatgtgcccgaagactgtaaaataggagactttttgaatgtctttctttatctggatatggatgagagattgattgccactacgctgactccgttggtgcaggtagggcagtttgcctgtctggaagtggcatgggtgaatcagtttggagctttcttgaactgggggttgatgaaggacctgtttgtgccgttcagtgagcagaagatgaagatgcaggttggacggaagtacgtgattcatgcacatttggatgatgaaagttatcgcattgtggcttcggcaaaggtggaacgctatctgtcgaaagacaggccggagtatgcttcgggggatgaagtgaatattctcatttggcagaaaacggatttgggcttcaaggcaatcatagacaataagtatagcggtttgctttacgaaaacgagatattttctacattgcagacaggtatggagatgaaggcttttgtgaaacaggtgcgcgaagacggcaaggtggatttgatccttcagaaaccaggctttgagaagatagatgatttctcgaaaaccttgctgaattatatcagggagaatgacggaaggatcagactgaatgataaaagtcctgcggaagatatttatgctacatttggtgtcagcaagaagacctttaagaaaggagtgggtgacttatataagaaacacctgataaccttgcacgaagatggcatcactttggcagactcctaatcagaatagggaaatccctatgtatgaatagagagaatcactggggtggggagtttcctcgccctatttttgtagtatcagattaaataaagaagtaataataaaaactagataagttatgcgtaagataataataagtttctgcatcctgttatccgctctctctttacaagcgcagtccgtcagcggaatccgtattgacggtggtaatacccctattcttgtttactttggtggaaaccagatgtgcttgccgactaccacttgctttgtagctaacctggatcggggatattacacggttgaggtttatgctacccgtttcacccgtccgggagagcgtgtttggaaaggggagaggttgtacaacgaacgtgtttacttcgacggaagaggtgtgaaagatatttttgtagatgaccgtcatgccaatgtccgtccgggcagaccgggacaaggagaacaccgtccgaattatgaccgtcacgacagggtgatgaacgatcagctttttaaaacgttctataataatctgaagaaagaaccgtttgaggatgatcgcatggcattgcttaatactgcattggcaaattcagattttacgtctgcccaatgtctccaagtgacaaagctctatacttttgatgatgaccgaatggcaatcatgaaaaagatgtatccccggattgttgacaaggaggctttctttacggtgattgctacactgacgttttcttccaataaggatgaaatgaataagtttgtgcagaactatggcagacgctgatactaactattaaaactatatggctatgaaaaagatacatatcatcctactgttggcattgggactgggagtcagtagctgttttaccagctatatttctaacaagcaggttatgggtgtacagcaagggatgactcaaagagatgttgaaagtatttttggaaaaccggattaccgacgtttcgacggtgatatggaagaatgggaatttcatcgtgataacgggacgcctgttttgacttcggagcccatgacaatcattgttcagtttgccaataaaaaggtgatcagtatggatacattcaaaggctatggcagaccttcgccgcatccggtcgtagtacctcctcctactgtcactacttttgaagttgttcccggtcaccagccggaagaaattcgtctgatgacggatactgagtttaataacttcatcgagaagttgaaattcacaattatgagtgatgaccagaagaggttgatcggacagatgttggacaagcatgatgtcacttcaagccaatgtgtgagaattgtaaaagagatttcttatacgcccgatcaggttgagatgatgaagaaactttatccttatgtaagggataagcagaattttaataaggtgattgatagcttgttttccactgtgtataaagatgaaatgtacaagtttatcaaagaatatcatcaaacaaataaatgataggagattaaattatgaagcgaatattatttttactctttgctatcgggctgactgtcggtacgacagcgatggctggaatgagcactagcaaagtgcgtaaggaaacacgctttcttactgataaaatggcatacgaattgagtttgagcactcagcaatataatgatgcgtatgagattaattacgactttatttattctgttcgtaatatcatggattatgtggcccgtggctatgaatgggcattagatgattattatgaagctttggatattcgtaatgatgacctccggtgggtattgagtgacgcacagtatcgtcggtttctgggagctgattatttctaccgcccgatttatattaccggcggaagatggagtttccgggtttatgtgaattatccgaatcgtagtttgttctacttcggtctgccttatcattatcggacttactgtggagcacattatcgcccgcaccttcatcacgtaagtttctatcgggacagatataatttcagacattatcctactccgtatcgggtaagagagcagagatctttccattcttatcgtcgttcggattttggttcggttcatttccgcccgaattcttccgtccgtccgcacaatgcaccgactcgtccgggggtaacgggacgtccaagtccatcacagcgtccgagtcataattcacgaccgggaacatcaactcgtcccggaacggcaacgcgacccggaacgacaacgcggcccggcagttcttcacggccctcaacatcagttcgtcctgaatcagatcgtagaccgacgggaggtagcagtacgacagcaagccgtcctaatcgtgagagtagtagctcgagtacaagtagaagaaatgatagtcgtccgtccggtagcggcagtagctcttcgtccggtagaaataatcgttccgatagaagtaacacttccactagctggggcagcagttccggtcgcagtagcagtacttccggtccgagccgtagcagtagttctaaccggagcaatgtttccggtggaaaaacggaaagacgttcctcttccgaaagtacgagaagcagcagtcgaagttcttcttcccgttcttcagagcgagacaccaattcaagaagataacctattcctttaattatttatatcattgctcctcagcggtaggagagctagactccggtgttttgccggctagactattcagggcatcgcccgtaacttggatttcggggcggatagtatccgcctcgatttcacttatcaaacctttttgggcaagacgtccggcaatgagtttataatatccttccatgctctctttcagttttccgttttctgcgaaagaactgcggaaatgtttgggcttcgggatgatagaagccaggaagatactttcttccgtagtcagttgggaaggacgtttgttgaagtagtaggcggaagcctcctggatgccgtagattagcgggccccattccgcaatattcagatatacctcatacatccgttctttcgaagtcagtctctttgtttctatgatccatacaatcaatgcttcttccagtttgcgggcaaagtttttatttttgttcagaaatacattcttcactaattgcattgtgatagtgcttccgccacgtgcaaaacgtttgacttgcaaatcgtaaatcaacgcttcgcggagtgcatcgggcaggaaaccatgatgataataaaacgccccgtcttcactttgcatcacagacatttgcaggatcggtgaaatgctgtcaagtggggtgaaatgttcccaggaagggccgacggggaaagtgcgtactggcattccattttcatatgctgtgtagacaaactcgcctgacatcttggacagttgggtatcgccatattctacaatctcgaaattcctctctttcaactctgattctaatttgagactatccaattgtgcaaaatcaatatccaacaggaaatgataagctaactcaccacttgttttgatactttccaggttgttgaacaggcctttgggcagagaactgaacagctcgtctgccggaaaccatgatttgtcaacggctgcagtgaaatgccataaatcttttttcttttcggctcgtagataaggatgaacctgaattttattgaatataaccgtagtggtgctatccaattcaaaagaatggtcgctaatgttcatttgatatcctaaatgtccgcggtcgagatgaatcacttcgggagacagtactttgtggaatatatcaagtccgtttactttcgcttttccgttgagatatagctggttttttccattactttctttggtcatgctataagataaggtgtcaaaagtgactttcgcaccaaaacggcgggtaatataaggtatagaaacttttgtggaatcggcagagtatagctttgccattaatgtattggcagattgtttcagttcgccatcagctatccaatgccgggttagtgtatcttcgtgtatctcaatggttgaccggaacttgttctctttgatgataaaagaagggaataccatagaaacgaagttgctgtcttttcgttcagtgatataaatctgttttaattgtccgttttcaggtagaaaaccgtagcataaattgagtagcttgtttattctttccgcataattgatttccgttacggtttgaccggatgtttgtgatggaactttccggtcttttttaaagagaaaatcataattggcgatggagtcttgctttgtaaatgtgagtctgatatcttctgctgctatgtagcttacttctattttcttggtgagtaatttccaaaaattcagcttgatgcgggttgatgctaatgtgaatagtgtatcccgttgttcggggataaccgaaaggccttggagatatatttcatttaaaccattcatctccagtttgtcgtaatgaatgcataacccgtgtgtctgctcgatacgggatgtgtgtcggttgactatgctccgtagaagaacgctgcgacctgagtagatacaaatgaggcagatgagtattcctccactgagagctagcggaagaatacgcttttggctatttgttttcatcatttaccttttaattatcggatgcaaaggtaggtaaaaaaatgcattaaacgcgatggacagcctttgaaggacagtccgccgttctttttttatttgataagcggtaagtattctccgtagccttcctctttcattttttctttcggaataaaacgaagagaagcactattgatacagtaacgtaatcctcctttttctttcggaccatccgtaaatacatgtcctaggtgggcgtttccggttttactgcgtacttcggtacgtgtcattccataagaagtatctttcttctctgtaatcaagtccttttgaatcggttgggagaaactaggccagccacaaccggaatcgaacttgtcggtcgaaacaaataggggttctccggtggtgatatctacgtagataccgggacggtactcgtcccagtattcattccggaaagcaggttccgtagcatttttctgggtgacggcatattgctctgccgataattgttggcgaaggactgtgtcatccggtttttgataaactttggacttgggagcattggctttgcgtgccatttcaaataaagccgggttgatatggcaatagccgttcggatttttatccagataatcctgatgatagttttctgccggatagaaatttgtcaatggttttacttctatggcaatgggatttttatattgatccgctaatgcccggacagcctgattgataacagcgatatccgctttattagtataataaatccccgttctatattgcgtaccgcgatcatttccctgccggttgaggctggtaggatcaatcgttttaaaatacagatcaagaagcagacttaaattaactgtttcggggtcatagactactttcaccgtttcagctgcattggtttctcccgaacatacctgttgataggtcggctggttgataatactgttggcatagcctacctcggtactttctactcctctgatttgttttaggaaatgttctgttccccagaaacatcctcctgcaagataaatttctgctgcgatgataaagtgtttcatatccgttggttctttctatagtaacgaatgaaccggcggatatgtttgaagtatttcttgtaaaaaactcaatgacgttttctattctataatttctcctttatagaaatccagaattttagtacggaatagataatcatatttagcttgtaacttgtcagagagtgctttagtcagattcaactttgactcattatattccacgaaagttgctttaccgttattgaatttctcgctcattaaccggaaagattcttcattggctttcactgccacttcactggagttatatttactttctgctgccagagcattgtaccaggcttgttgtatttctttgtaaagaatctttttggtattatctagttgtaaactgagatttgcttgttgtaaccgggcggttcgtacacggtttcgtgtagcgaaacggttaaagatagggacactaagattaaatccgatatatttgttgaggttatttttcatctggctgctgaaacttccctctgatttaccactcactgtataatagttgcttccgagtccggcactgaaagataattgcggataaaaattactttgagcgatacggatgttcttctgactaccttgcaagcgatattccgctgctttaatgctaggtttgtaggcaagcgcttgtgtatatatatcatccggcggagttagcgcttcgaattccagttcttctttcggattttcgagaatgaaaccttcgggagtcggtaactcaagcagttggctgaggtctagcaatgataatttatatgtattgtccgcttgtacggaagtcatttcatcttgtgccacacgtgcttgtgcttcagccacttccgatggtgaggctttacctacttcgaagagtcctttgatgcgtttcaactgatctttgctcaagttcgtctgattaaaggcgactttgcttaactccaggttaaatagaacttgcagataagcagaggtaacgttgatggctatatcttctttagctttgttcaggtcctcgatagcggccctaagattcaacttggctaatgaatattgatttgataactgtaaacctgtaaaaatcggtacattggtccctaagctgaggcttgtattcgcgctgttgatatcactgtaggagttatctaccggcgaggcactacgtccccaactccaattctgactcgcacttccgcttagattcgggaggcgtgcccatttggctgtatttacgtccactttattttgttctgcttcattagctgtctggcgaatattgatgttatgctcgatagcataatcaatacattgccgcaacgtccaggtttgcgaagaaccgttctgtgcctgtgcggaatctactcctgttccggcgagtagaaagatagctatggttttatagattgttttcatagaaaatgagttatttgtcttttttctcggcgccgcgaattttgtcattggcagtcacccctttcttaatctcaattttgataccatcactcattcctgtggtcacttgtgtacgttggaatttctgttcgggtacggaatcagtcatgatatatacaaatgtagaatcacctttaaattcaacggtgctttcgggtactgccagtaccttattggcacgctgcaatacaatttccgcattcgccgaataaccggaacgaacctgtacggagtccggaactgaaatagcagctttaatttcaaactggttagctccgttagtctctactcctttaggagatatatattccaatatcgcgttgaatgtcagattttgtaaagctccgatagtcaacttaagcggcataccttcatggatgcggcctacttctgtttcatcaatattaccacggaaaatcaaatcattcatgttggctaccgtagcaatagttgttccgtcattgaaggtgttactcatgatcaccgagtttccggcttttaccggtacgtctagaatcagtccgtcgatagtagaacgaatcatggtactgctgaatgaagcactgtttttggtaataccttcttttacgatttccaggttatctttggcagtctgcttttcttcgcgtgcctgtttgacggctacttcacttttctcatattcttcccggctgattagttggtcctcatacagtttcttcacgcgggaaaaatccgtttccgcctgtgttgcattaatctccgccagacggacacggctttctgccgagtttaactgtccgagttcggggataacctttaccttggctatcacctcacctttcctcactgcttgtcctgcctccttgtatacttcgtcaataatacccgagatctggggcttgattagaatttcatctcttggttctacttttccggtagctacggtggtcttttgcagatcagtcacttctggcttgagggtttcgtagacaacaaccttcgggcgcgacttctgataaaggaatacgaacgttccgacgaggattatggcaacaattaccaataatacgattttcagatactttttcatcttgattatatatgtttaatttttaattctttattcaactttcaactcttccttctcaatactcaacttctactcatctctgattgcttcaatcggcttgatagccattgcccgataagcaggtgccaggccggctaacatccccaatgcagccagaagtgcgcaagtgccgaccgctaatccgaagctgacttgaaaatggctgtctcctccgtttgaactggctagcatatctgctacttgcaatatcattacggcaaaagaaatcccgaacattccggcaatcgtggtgagcaccatactttccgatagaatctgttgcaggatatctttcggacgtgctccgatagcccggcggataccaatttcggtcgtgcgttcctttacggtcaccatcatgatattggatacaccgatagcacctgccagtaacgttcctaatcctaccatccagaccaatatattaatgccgttgaataagttgtctaccatagaaaacatcgcttcggcattcagatacataactgcttgtttgtcgttaggggcgatataatgggcagctttgataatctgttccattttcggttgcagttcagacaccttgacaccttgtttggctgtgaagcatactacatcaatctgccctcccagattataagcctgttgcatggtggtgaaaggtagagtgatggcttccgaagctcttccttgtatattcatatctccttcggaagaagacatcccgatcacctgataataaatcccgtctactctcacgtatttgccgcacgggttctctcccggtttgaaaaggctttcataaattcgtttgccgatcacacaaacttttcgcgcttcgcgtatatcaacttcattgataaaccgtccatacgccatttcctgtgattcgatgtggagataatcggggtatagtccttttacactgcaatcatatttcttatcttcgtatacagctttagatccccaacgtgcaacggagggggtaatgacttccacttctttgacctgcgaacgaaggcgttcgatatctgtagattccagattccaccaccttcctttgcgaaaacctttatacgcttctcctgtcctttgtgaagctaggaaaccggagttagtcgcaaatccttcaaagttcttttttagcatatattccagtccctgtccgccgccaataagggctacaagcataaaaattccccagaacacaccgaatgcagtcagcagacttcttgtcttatttcttgtgatagtgatgaggatttcctcacaagtatctatgtctattctcataatcttaatctgctctaagtgcttcgatcggccggatactgactgctttccgggcagggaacaatccggctaatgttccagctattattaatgtgagtgtagcttgtatggcgattctgatgtcgacagtaggattcagaaaaaccgtttctgtccacattccggtatccattgtctgattgccgaaagcgttgttcatccattcggttgctccgataccggccaccatgcctatatatccgaatattgtggtaatagtgacactctcaacgataatcagccaaagaatagaaagcggtttggcgccgagtgctttgcggataccaaattcacgggtacgttcttttaccgtgatcagcatgatattggaaactccgacaattccgcttagtaatgtaaaaataccgataacccaaatcgctatacggagcatggccgacccctgctgttgttgtagataattggtaaatcggttccatatccaaattgcactatggtcggtcgggtcaaaacgatgattggctcccaaaactttgcggtagtaggtttcaaacttctcattggcttctattgtttccaaatttttggtagtcatgatgaggttattcagtttgtcacccttattataaatggtttgcagagtactgaaaggaatgtaggcgtcgctgtctccgctgtctcccttgtcgttataaagtccaaccacttgataaaccacattgccggcattgacaaactgtccgataggatcggtatgggtcttgtcgaataagatttcagcagtcttcttatggagcacgatcactttgcgtcgttccctgatatcaatctcgttgatgaaacgtcctttgaagagttttacaacttctacttccgtatgattgggatatacaccggaaagactcaggcttacatactcttgcccgaaactaagatttacgcctccttgccataccgttccgccggtattgataacatgatccgggaaataccggttggtagcgtctacgtctttattgtccagttgcacccgtcttccttctttcaatccatcgtaggatttacttgtccaacccgggaaaatcttgatagagttcatcgcccgttccgaagccgattgctcgaatgcatgaatcagtccgttgcctgcacccaataggacgataagcatgaatattccccatgctacggcaaatcccgtaaggaaggtcctcagcttattgcgtttgatagtactataaatttcttgccagatgtcaatcatgatatcgtttgtatagtagtatattttgatttatttcatgataccgtttttgccgaaaggagaagcgtcgtgatcgatgttgtcttcaattcgttcaatgataccgtctttgatgtggatgattttatcggtctggttggccactccgctttcatgggtgaccactacaatcgtcattcccattttatgcaggtctttcaggatttgcatcacttctactgaagttttgctgtccaatgctcccgtcggttcgtcggccaggataatttgcggttgggtgatgagtgcgcgggcgatagctacacgttgtttctgaccgccgctcatttcgttgggcatatggtgcgcccagtctttcagtcccaatcggtcgagatattccagtgcaagtgcatttcgtttctttcggctgatcccttgatagaataaaggaagtgcaacgttttctacggcgtctttgaaggaaattaagttgaatgactggaaaataaagccgatcatacggttccggtattcggcggctttggtttcgctcaagtctttgataagtacgttgttcagataataatctccggtatcgtagttatcaagtattcctaatatattaagtaaggttgatttcccagacccggatgctcccatgatagaaacaaattcacctcgtccgatagtgagattaatgcctttaagtacatggaggggtgctccgttgttgtaggtcttgttgatgtccgttagttgtatcacaattttctttatttagttcctgttttctaataaatttctactattagacggcttcaagatacgaaaagttgcaaggtggccgaacttttttctaaaaacattttgtagactcaatcttctttacgtaatttgtgtgcagtaaacttaatgattaactaacccttttaaataaaagtatcatgaattcaaacatggaaaagccctacgtagtaggtattgacataggcggaacgaacaccgtctttggaattgttgacgcacgcggaactattattgccagcagctcaatcaaaactgccggttatcctactgccgaagaatatgctgacgaagtttgcaagaatctgcttccgttgattatcgctaatggcggtgtcgataagatcagaggtatcggtgtgggtgctccgaatggtaactactatacgggaactattgaattcgctccaaacttgccttggagagggattcttccgttggctgctatgtttgaagaaagattgggtattcctacggctttgaccaatgacgctaatgcagctgctatcggtgaaatgacttatggtgctgcccgtggtatgaaagactttatcatgattaccctgggtaccggtgtaggtagcggtattgttatcaacggtcaaatggtgtatggccatgacggttttgccggtgaattggggcacgtgattgcccgtcgtgacggtcgtatctgtggttgtggccgtaaaggttgtttggaaacttactgctcggctactggtgtagcccgtacagcccgtgaatttctagctgctcgtactgatgccagcttgcttcgtaacattccggcagaaagtatcacttcaaaagatgtatatgacgctgctgtacaaggagataaactggcacaggaaatattcgagtttacaggaaatattctgggtgaagctttggcagatgctattgcattctccagtcctgaagcaatcgtattgttcggaggtttggctaaatcaggcgattatatcatgaaaccgattatgaagtcaatcgatgataatgtactgaatatttataaaggtaagacaaaattgctcgtttctgaactgaaagattctgatgctgctgtattgggtgccagtgctttggcttgggagctaaaagatatcaaggaataatatcgattttataataaaggtaatgaaaatccccgggagctattgttttcggggattttctttttatataccgggaaaattacagtttctcactggggaacaattccttgaccgtga

SEQ ID NO: 2984 - DNA, 18144 bp, Unknown
  gut microbiota DNA sequence
atgcttaattataaacgttttacgtttaattatcgtcattctgttttttattgcatttctaaatattacttatgccgcccgccacacttgggctacgacggcttattattgcgaaattcatccgggtattatttccgaagctatgggacattcgtctatcactgtaacggaaacatacctcaagcctttccgaagcaaaaaaattgatgaagcaaataaacaagttctcgattttataaagcgctcagtaataggattaaatacctgattattatcctgttactttgtaggtaacggggagaaattccggtgcaaatatgagcatatttcttaaaacaaccaaacgaaatcaaacattttttccaataaactactcaaaaacagaactaggatagataaaacacgcggattctttattttagggctttgttaacctctaaattatgccaaagattttcctcccctctgccgctcgtcagaagcaggggtaaagaactttcataatctatcgtatcatttttctgtattgactactccaaaagagcaggaacaaaggtttccccgttacctacaaagtaacgggttgtctattattgaaacttagtgtttaataatatattattaatgtaatttttaagtagttatgaaaagaaaatttgtaaaagtgatgttcttcggggcgttggcactttctactgtcacctatgtaggctgtaaggactacgatgatgacatcgacaatctacaaacacagattgacgcaaacaaagccgacatcgccaagttgcagagttttgtaaaagaaggtaaatgggtaactaatgttgaagacattaccggtggatttaagataacttttaatgataataaaagttattctatcacaaacggtaaggatgctactccaacgaaaattgagattgatccggtaacaaagaactggattgtcaatgacaatgacctaggtatttgtgctgaaggtaaaaaaggtgatgcgggagtaggaactccgggtaaagaaggatacgcaccgcaaatttcagaagacggatattggatagtttggaatgcagaagagggaaaacctaaaaaaacaaatgttaaagctactacagatatctatgtaagtgctgatgctaacaatccattggtttgggtattgaatattctcaataaggaaacaggagaatgggaaaaggtttctatgccgaaatctgctcgtatcactggtatgagtgtgctcggtgtaacagaggaaggtactgttgatttaagctctacacaagctgaagctactttgtactatggagtagcagggaaagatattgaatttaatggaaacaagaaatttaagaaagcaggtgatttacttattgccagaggtggtagcaagattcacgctttgattaatccggtgaatctgaaagctgcagatattcaggcttacgaaatcggtctgacagattctaaaggtaatactagctttgttgtagctaatattgcagataattttagtgtagatgccttgactcgtgtagcagacccagaaaaagaacctactgctaacaaaggtgtttatgatttgactctcagatttgcaaatggagtaactgatacagaattgaaggccttggaggagaatactgcttatgctcttacaacaaaagatgcatggggcaatgaaatcatttccggatatgacgtaaaggttgcggctaaagctgctacagaacaagaccaaccagaagtcgagtttactgctcctgacgaagccttgacttatcagaagagctataatttggatgaactgtttaacagtgaattagataaggtggtagcttactattatgaagttactaaggacgaagctgctaaggtggacgcaacatttgataaagataagaatacaattatcgcgaagaaggaaggtaaaatgacgattaagattcactatcttcctgttagtggaacagttgctagtgctgacgtagaactgacctttgcttatgtagctaaacaggctgaaatcaaagatatgacttgggttgtagatggcaagaaattaacagctacttctgaaattgttggtccttcagtagatgaaattaaaaagtctattaatggcattgattccgaaattgaatatactgatgtgacagtaacaattaataaagtaccgaatctgacatacgaaaatcagacgtctaagagtattactttagtattacaaggtctggatgcaaaaggtaaagaagcgaatgcagaagcaaacattactaagtatgtaatcaaagctacattcgatcctgaatatattgctgctgtacctcataccgcaacagttaaattcaagaataaaaactatgatcaaaacaattcagagctgggtaataaatatttatacgaaactacattcaagattactgtagatcagccgaagaatctgtatacattcaaacatgcaactgcttactttgaggatgaaaagaatgctgtagcttacggtaaagtatatgaaggtaatagtcctaaacttatttctttcaacctttataccttgtatcaagctaattctattcttgaaggtgatgcaacaactaatgactttgtgaaattcacagaagtaataccggaaaagagtggtgataaagtagctaaagcatggttaacagagcaaaagactagtaatggggcaatttcagttgaaccttctcctgcacacggtggtgttaatacaagtcgtagcattacggttacttatgcaccattcggaaatgctcgtttgaatgctattgttgacgaatttaacttgaaagtattatctgaaatttatcaaggtagtttcgattttgtgaagaagttcaaaatcgacggaaaagatgtacagaaaggtgagaaagaggataatccgattgaaatagaaggaacaggtactgtcgaaatactagaaagtgatttcatcagaaaagatgctcgtgctaatgactatggctttgatgataatagaattgtatcggttaaggttgagttagcagatgatgacgctaaaacttatctgacaattgacaacactgagtttaagatgggaactgaagctgctgcacagtctggaacagaacaaaaaatgaacactgttactattggaaagaatcagaccgcaggagccattataaatgctcctacttgtaaagtcaacatcaatattcttgacaagtggggtatgacgaaaacagcatcaatctatgttaaagtgaacaaataatttagattgaataacttataattgagaggcatcctaattctctttgggactagagatgccttctctttacaagttttattatacgagacaataaattctttaaaagaaatatactgagagatcaactgaaaattatgcttgtgaaagtatattttcaaatgtttgtctcttggaagggatgcctcccttatttcccacgggcatcccttttctgctcttaatgcatctcacttatcgtactagaaagcaatttactagtcccttatttccccaagacaaggagatgtttttaagaatataaatgctcgggcttgtgaaagtccgggcttttattcatttgatatttatcaatctttgtaatacaggtcactttcactcgctaaagcaccgctttaagaccactaaagcatagctttacataggctaaagcatagcttttttctctcaatgagacgtattcgctcctctgcctacaaagacgcattttagttaatttctccctttacttttcttctgacattccgataataaggcgctttcggatgaagagagattgaaaaaagaatatgatacccaaatgtaaacgcatttttcctatggcttatataactttggacggaaaggaatataaagcgtatagttactatccgtcggctttcctcccgccagtgccggcgaccatttcggcattccctttacaatacgaagagcctcctcggcaaactcggaatgagtagctttcaaaatatgaggacgcagaatcactccttccttatcaatcgtaaactcacacaaagcatatcccgatatattcttggctaaaagatttgccggataaaccatttgatctgcaatatattcttccggagtagtgccggacaaatgagcaagttcttctatctgtttgccggaaagcgacctctgctgaggccccacctgataaattccgacatacatcggtttcttataagcatccggttgctccttagtgcgctgttgcaactccttcaataaagcagcagcttcttccgccaccgcctgttccgaaatatcttctcctctggataacatataagccgactgacagaccaacacaagacgatccattaaagaaccttttttcggggaccacttacgtcccatctgatttgtacctttcgcatccgtcgaagtgaaataataaacgactccgtccaaacctgccgtagaaccgtccaaatcctgcacctgactcgtcaccgtacgaaaaatggcacccaaagactgataaagggacgaactgataaccaccgatctcgtatctaccgtcactgttcctttctctgcttgccaataggtacgcgacaatgtgttcgaaaccaaacaataacgcccacccttcttctctaccgacatggcatactcgggcgagaaagaaggaattgctacaaaacgagcatacggttgttgctgaaagcctgtgttcaataaagaaaatacattgcgataatattcgcccaattcgcctgtgtaagtagtgaaaggtttcaccggctccagataatcaatctgcgccgtaagacgaaaagataaggtcaaaagtagaataaagaaaacaatctttttcataagttgccggattttcaatgcgtatcggcaacaaagatacaaattatttcgatggttcgtgataaaattatatctttgcacggtttttactaagaaactgaataacaatacatcaaaaatatgatagctaagattgaacaacttctgaaagaggtagaggctttgcatgcctccaatgccgaagaacttgaagctctccgcatcaaataccttagcaagaagggagccattaatgacttaatggcggatttccgtaacgtagctgccgaacagaaaaaagaagtcggcatgagactgaatgaactgaaaacaaaagcgcaggataaaatcaacgcactgaaagaacagtttgaaagtcaggacaatggttgtgacggattggatttgacgcgctcggcttatcccgtcgaactcggtacacgtcacccgcttaccattgtaaaaaatgaaattatcgacatcttcgcccgtttgggattcagcatcgctgaaggaccggaaatagaagatgactggcacgtattctcggcactgaactttgccgaagaccatccggcacgcgatatgcaggatactttcttcatcgaggctcacccggatgttgtattgcgtacacatacttcttccgtacagacccgcgttatggaaacgtcacagcctcctatccgcatcatctgtccgggacgtgtataccgtaacgaagcaatcagctaccgtgcgcactgtttcttccaccaggtagaagctctgtatgtagacaaagacgtatcattcaccgacttgaaacaggtattgctgcttttcgctaaagagatgttcggtgcagatactaagattcgcctgcgtccgtcatacttcccctttacagaacccagtgctgaaatggatatcagttgtaacatctgcggtggtaaaggttgcccgttctgcaagcataccggttgggtggaaatcctcggttgcggtatggtagacccgaacgtacttgaatccaacggcattgacagcaaagtatacagcggttatgctctcggtatgggtatcgaacgtatcacaaacctgaaatatcaggtgaaagacctccgtatgttctccgaaaacgacacacgcttcttgaaagaattcgagagcgcatactaaaaacaggttgagagttgagagttgagaattgagagtggctatgcagaataatatagctaacccttaactctcaactctccattcttaacttctccaattatgaaggatagactcattacttccagttattgtttcatcttggcagccaactttttgctctacttcggtttttggttgctaatccctgttttgccgttctatctgtccgagttcttccaggcgggaaattctactattggtattgttctttcctgctatacggtagcagcactctgtatccgcccattttccggttatctgctcgatacctttgcccgtaaacctctctatcttttcgcatatttcatatttatgatgatgttcggcggatatctgattgcaggttctcttaccttatttattatgttccgcatcattcacggtgtctctttcggaatggttaccgtaggcggaaatacagtagtaatcgacattatgccttcttcgcgcagaggggaaggattgggatattatggtttaaccaataatacggcaatgtctatcggaccgatgttcggactttttctgcatgacgccggagtctcatttgcaacaatattctgttacgcattcggggcatgtatattaggatttttatcagccagtctggtaaagacaccttataagcctcctgtaaagcgtgagccgatttcgctcgatcgttttatcttgctgaaaggaatgcctgcgggacttagcttgttgctactttccattccttatgggatgacaaccaactatgtcgctatgtatgcccgacagataggactacacacacaaaccggattcttctttacctttatggcagtcggcatggctatctcccgtatcttttcgggaaagctggtagatcgaggaagaatcacacaagtgatagcagcgggattatatttagtagtgttcagcttcttcctgctcgcaggctgcgtgtatctgattcaatggagcgacacagcctgtacgattctgtttttcggaatcgctttattaatgggcatcggattcggaatcatgtttccggctttcaataccttgttcgtcaaccttgcccccaacagtcagcgaggaacggcaacttccacttacctgacctcctgggatgtgggaatcggtatcggtatgctgacgggaggatatatcgccgaaatcagcacgtttgacaaagcctaccttttcggtgcctgtctgacggtagtctccgccatttatttcaaaattaaagtaacgcctcattatcataaaaacaaattacgatgagaaagaaagaacgttatgagaaagtaatcgcttggtttcaggaaaatgtgccagtagccgaaacagaactgcattacaacaatccgtacgaactactgattgctgttatcctttccgcacaatgtacggataaacgggtgaatatcatcactccgcctttgtatcgggattttcctactccggaagcgttggcggctaccaccccggaagtggtattcgaatatatccggagtgtatcttatccgaacaataaagctaaacatttggtcggcatggctaaaatgttggtaaatgagtttaatagtcaagttcccgacaatatggaagatttaataaaattgcccggtgtaggaaggaaaacagccaatgtaatacaatcggttgtatttcataaagcggcaatggcagtggatacccatgtgttccgcgtcagtcaccgcatcggactagtgccggacagttgtaccaccccgttcagtgtggaaaaggaactgatgaagaatatcccggagaaactggttcccatagcacaccactggcttatcctgcacggccgttatgtctgccaggcacgtaccccaaaatgtgacacctgcggtttgcaaatgatgtgcaaatatttctgtaacacctataaagtaacgaaagaggcaccaaaagccaagaataaataacgttttaatagcagagaaacgaaataaatagtaactttgcaggcgttctaaaagaaaatctttaaaacacttttaaataaaaatagagtattatgcagacaattgacaaattcaattttgccggtaaaaaggcatttgttcgcgtggacttcaatgtacccctggacgaaaacttcaacattacagatgacacccgtatgcgtgcagctcttcctactttgaagaagattctggctgacggtggtagcatcatcatcggttctcacctgggccgtccgaaaggcgttgccgataaattctctttgaaacatatcatcaagcatctgtctgaattgctgggtgttgaagttcagttcgctaacgactgcatgggcgaagaagctgctgttaaagctgccgctctgcaaccgggagaagttctgttgctcgaaaacctccgcttctatgctgaagaagaaggtaaaccaagagggttggcagaagacgcaacagacgaagaaaaagcggctgctaaaaaagctgtaaaagaaagccagaaagaatttaccaagaaattggcttcttatgccgactgttacgtaaacgacgcgttcggtacagctcaccgcgctcacgcttctactgcattgatcgctaaatattttgacgttaacaacaagatgttcggttacttaatggagaaagaagtgaaggctgttgataaagtattgaacgacatcaaacgtccgttcactgctatcatgggtggctctaaagtttcttctaaaatcgaaatcatcgaaaacctgttgagcaaagtggacaacctgattatcgcaggaggtatgacatatacatttactaaagcaatgggtggcaaaatcggtatctctatctgtgaggacgacaaacttgacctggctttggatttgatgaagaaagcaaaagaaaaaggtgtgaacctgatattggctgttgacgctaaaattgccgacgctttctctaatgatgcaaatactaaattctgtccggttgacgaaattcctgatggttgggaaggccttgatatcggtcctaaaactgaagaaatcttcgctaacgttatcaaagagtctaagactatcctttggaacggtccgacaggtgtatttgaattcgataactttactcacggttcacgtgcagtaggtgaagcaatcgttgaagcaacgaagaacggtgcattctcactcgttggcggtggtgactctgtagcttgtgttaacaagttcggtctggctagcggtgtttcttatgtttctaccggtggtggtgcattgcttgaagccatcgaaggaaaagttcttccgggtattgctgctattcaagaataagaaaatttataatagctaatttttttacaatggttaaataagagggcagttctttgtgaaaagagttgccctcattcataaaaatgaggtatgaaaagaccgatactactcttttgtttcatccttttcttcctttgctcctgtcagagtaaaaaaggagatagtctttttttgcctctatccgaactgaaaccactcacattgggtatgatgcctacactcgaagggttacctttttacattgcccgctccgaaggtatttatgactcattaggattggacttaactattctcccattcaattctgccaacgaccgtgacgccgttttccaaaccggacaaatggatggtatggtaactgattaccccagtgcgataacactacaagctattcatcatacggagttgggctttatctttaagaatgacggctatctctgctttatcgtctctaaagaaagccgtatcaaccaaccggaacaacttatagagaaaaatatagccgtatcccgcaataccgttgtcgaatatgcgaccgaccaactattaaacaaagcgggaatcaagtatgcagagacaaacaaaccggaaatcagtcaacttcccctccgcctgcaaatgttacagtataaccagattgatgcttctttcttgcctgaccctgccgcttctatcgccatgaacagcaagaacaaatcattaataagtacgcaggaactgggaattgaatttatcgccaccgctttttcccgaaaagctctccaagagaaacgaaaagaaatcgaactgctcattacggggtataacttgggagtaaaccatataaaaatgcatccgcaatcagagtggaaacaagtattaatggaaatcggtgtaccagagaatctaaccggactgatcgccctccctacctatcggaaagcaacacgaccttcggcagaagccatagaaaaagcaacccagtggctgaaagcaaatcaccggataccccaaacgtactcggaaagcaatctgatagacacaacttatattcacacagtatcaaccaccattcaataacaactaaattaatcccatgcgaaaaacactcttactttcaattatcttgctatcaagcatgccgggtatacaaaagtcccttattgcacaagaaaaaacatcactgaaccaagttgtcaacacactgaaagaacgtatcagcctggccggatatgcccagttgggatatacgtacgatgatgcagccaaaccggacaatacattcgatatcaaacgaattattttcatggcacacggaaaaatcaccaaacgctggacttgtgattttatgtacgacttttacaacggtggtatgctgctcgaagtgtacacagattatcagtttcttcccggacttaccgcacgtatcggagaatttaaagttccttatacgattgaaaatgaattatctcctactacggtagagctaatcaactgttattcccaatccgtctgttatctggcaggcgtcagcggcagtgacaaatgttacggcatgacttcgggtagagacatcggcatgatgattcatggtaaactattccacgacttcctacaatataaagttgccgtgatgaacggacaagggctaaatacaaaggataagaacagccagaaagatgttgtcgggaatcttatgatttatcccttggaatggctatccgtgggcggatcgtttatccggggaaccggacacgcaatagccgattccgaatataccggaatcaaaacgggagagaactatgccaaaaagcgttggagcgcaggaggggttgttaccacttcccgtttcaatctgcgtaccgaatatctcggcggcaaggaccggaacgtaaaaagtgaaggattctatgcaacaggaagtgtgtgtttcgcacgaaacctcgactttatcgcttcgtttgattattttaatcctaataaagcggcagatttcaaacaaaacaactacattgccggtgtgcaatactggttctaccccagatgccgcttgcaggcacaatacactttttgtgacaaaaaaggaaacggacagaaagattctaacctgatacaggcacaggtacaggtcagattttaagttgcaagtattatggagaatcatcatataataaacctataaaagaaagactggaaatcatggaacacaaaatcgccgaacccaacgcccgagtagacgtggccgacgtactaagaggacttgccgtaatgggaatcatccttttacacagtattgaacacttcaatttttattcttttccggagaaagtaccttttgaatggatgaactttaccgaccaagctatttggaggggattattcttcacgttcagtaataaggcgtatgcagtattcgccctacttttcggctttagtttttatattcaggataataatcaacaacgcaaaggaaaggacttccggctccgtttcctatggaggctatttatcctttttatcatcggacagttcaatgctgctttctttaccggagaaatattaaccatgtatgctatcctcggtattattcttccgatattctgccgcatgagcgaccgtatcgtcgtcatctttgccaccctgctgatcctgcaacctatcgactgggcaaaattaatctatgctttatgtaatcctgactatgtggcaggtgaaagtctggcacgttattatttcggcatagctttcgatgtacagaagaacggaaccttcctcgaaaccatccgcatgaatatgtgggaaggacaacttgccaacatgacttgggcattggaacacggacgcatcctgcaaactccgggattattcctgttcggtatgcttatcggacgccggaaatatttcctatacagcgaacagaacgagcgcctgtggctgaaagcactggctatcgccctactctgcttcttccctatctacgggctcaacaatatgttaccggaatttatcgagagaagtgctatcctcgtacccttacagctcatactaagctcattcagcagtcttagttttatggtgttattggtaacaggattgctgctcaccttctatcacgtaaaagaccgcagctttttcatgcgtttcacatcttatggtaaaatgagtttaactaactatttggggcaatcaattttcggttctcttttgttctatcattggggattcgaactgggacgctatttaggaatcacttatagtttcttttttggcattctttttgttatattacaaatggtattttgttcgtggtggctccgtcaccataaacatggtcccttcgaaggtttatggaaacgcctgacctggattggaaaaaacaaataattgaattatgatgaacgagaaaacgattaatgaacaatacgcatatatacgtaccttacttgaagaaaaaagactcaaggaggccttgatgcagctggaatcgttgctttggcaatgtcccgactgggatttacgtacccgtctggaacaattgcagacttcttacaagtatatgttggaatacatgaaacagggagccaacgatcccgagcggtggaacctataccaaaagttggtggcggacacatggagtattgccgaccagtcacgcctactcatgctggacaacgcttcatcaaaatattatcacgaagtacgtcgtacacccgaaccggcagatttggcagaatatggcctaaaaaaaatacttcatatacttgaatcttttaatgatgacttagcaatcagcggattactctccgatgctaaaatggatgaagtgctgcaacggcatgagaacactcttaaattcatgtttgtaagaacatggacaaacagttcgtggacttctgaagacgaagaagacgcaaaatccatgttgggttcggaattgcttttacccgacgacttatgtttatttgtcagtgctgtcacactgagcgtaatggaatgttttgacttacgtaaaatcatgtggctactggatgcttaccgtcataaagatgtcaatgtcagccaacgggcattggttggtgtcatattcatcttctacattcacagaacccggcttctttattacccagaacttatcaagagggtcgaccttatggacgaaattccttctttccgggaagatgttgcccgtatctaccgccaaatgctgttatgtcaggaaacggagaagattgataagaagatgagggaagagattattcccgagatgctgaaaaatgtttcttccatgaagaacattagattcggttttgaggaaaacgatgaagaaaacgatgacaagaacccggactgggaaaatgccttcgaacaatccggactgggagacaagctgcgcgaaatgaacgaactccagctggaaggagccgatgtgtatatgagcactttttcttctctgaaaagttatccgttttttcgtgaggtacagaactggttttatccgttcagcaagcaacagtccaatgtactcaaggcactgaaacaagtagggaacgaaggaagcagtttgcttgacttaattctccaatcgggctttttcagtaatagcgataaatattcgctctttttcaccattcaccaactgcctaaaatgcaacaggaaatgatgttgagccaactcaacgaacagcaggtagcagaactggcggaaaagtcgaacgccgaaactatgaagaaattcaacgcacgcccgggaacagcgagcaatcaatacctgcacgacctgtaccgtttcttcaaacttagtgtgcgccggaatgaatttcgtgatattttcaaagaaaaactcgaccttcatcatgttcccgcactcgacaatctactatattgtgaagaagaattgtttcctattgctgatttttatctttcaaaggaacgttgggatgaggctatcgacatttataaagaattgattgaaatcggaggatttgagggagaaggtgcagaatattaccaaaaattcggatatgctctgcaaaaaagaaaaagatatgcggaagctatcgaagcctatctaaaagctgatacgctgaaaccggataatatatggaataaccgtcacctggctacctgctaccggctgaaccggaattatgaggcagcccttgcttattataaaaaggtggaagaagctacccccgaagcttcaactgcagttttctatatcggtagttgcctggccgaactcgggcagtatgaagaagcactgaactatttcttcaaactggattttatcgagagtaactgtgtgaaagcatggcgcggtatcggctggtgttcattcatcagcttgaagtatgagcaggcgatgaagtattatgaaaagatcatcgagcataaaccgttagctattgattatatgaatgcaggacatgttgcctgggtaatgggaaatattcagaaagcggctgttctctatggaaaggcaattacagcctgtggaacgcgagaaagattcctcgaaatgtttcataaagacgaagaaccccttctcaaacaaggtattcgagaagaggatattccgttaatgctggatttattataactttttcaactccccatacaacttctgtatggggagtcccattatattatagaagctaccggaaatagacttcactccaatatatccgatccattcctgaacaccataggctcctgccttatccattggctgataacggtcaacatagtactggatttcgtcttcggacagtacatcaaacagcacatcggaagctgccgtgaagcttttctgccattcggttgtcgttagacagacacctgtgaaaacctgatgcgacttcccggaaagagcacgcagcatttccaccgctccttccctaccttccggcttaccgagcactttcccctccagccatacaatggtatcggccgtaatcaataactcgccgggcttcatcatagaacgataagcatccgcttttttacgcgatatatattcgggaattgcagctcccaccaaagtttcaggatatgattcatccacgtcaggcaatgtcctgacgacatattccactcccaacccagacattaattctttccgacggggagaattggaagccaatataagctgatatttctttaaattgctaagcatgattttagttacgattaaaaaattgaatgatttacaattgacagttctcttaccagccgaaggcatcatccgtcaaccatattccatgagctttcaggacttgctccactacatcgcgtccgcagccatgccccccctccgcataagaaatgtatttcgccaccgcttttacttccggtacggcatctttcggacaacaaggcaagccacattcacgcattacttctatatcgggcacatcatcccccatatacaggatttcatcatcagcaagtccatacttatcacggaaagcacgatagtcgtgtattttcaccgcagaacccatgtataagtccgtcacgcccagtccggcaaaacggatacggacggcctccgtccgcccaccggtaatgatagcaatacggatcccctttttcactgccaattgaatggcatatccgtccttgatattcacagtacgcatcggttccccggaaggatgcaacggtacggttgtcgaactcaacacaccgtccacatcaaaagccagtgccttgatgcgtgataaatcataatttatggtgctcatggatactcttactcattaatttataaatttcctgcaacgccggagagtccaccaacatcgcaagatgattactcatcacattttcatcgtagcgtacagccggtccggtctgcgcatcacgcggagccagttcgtgtactttacgtgcagtctcatcaatcaacggaagcatcacttcgaaaggtaaattatatttttcgagcaaatcggcagccagcgcatacatgtgatttgtgaaattacagataaagacggctgccaaatgaagacttttgcgttgttctgaatcagcttcgtacactttctcagagagggtcgaggcaatcgctttcaatagttccgtatcctccgcccttttcgcttcaataaagaaaggcacttcctgaaagtcaacttcacgctgtttactgaatgtctgcatcggataaaatactccataacgttctacatgaccttcccagacactcatagggatgctccccgccgtatgaaccagtaaagatttttgtttaccttccgttatctgcggcaataattctacaaaagccgcatctttcagggatacgatatagagtttggcgtcttttgatatttcctgtaagtcagtcgtataatccgcctctactttctccgccagcgcacgggcggactcttctgtccggctatatacttgcacaatgcgaaaacctttatagtaaagtgcttttgccaaattggtagccaggtttccggcaccgataaatacaaccggggtatcttctatacttcttttcatcgttttttcagcgttttgcaaaccaatataagattataccgatgataagcaatgtcaatggcaacaaataaccggacaatgaaccaagcaatgacatcaccaaaccgatattcatcaccagccaaagtcccagcaacacaagacctattgatttatcgcgtttgaaaataaggaaacaggcagcagcatacagcaacatattatccttattcatcacccagggcaaaccgatagaagaaaaatgaatcagtttatcaatcagaaaaagtgcaccgatcaccataaaggtaacggcagtcgcgagataagtatctttactattatttgctttggcagctcccattgttattttcctccgaacttattgatatggattttctcccattggagatgttcttcattgaaaggtttgcgttccatccccttatggccgaccgcaatgacagaaagtacctgaagctgcaaaggtatatcaagaattccatgcacaaactcgtcggaaggcattccggttgccgtgaaacgctcacgtacctgcacccagcaactgcccaacccgaggtcttccgcctgcaactgtatcataatagaagcaatagcagcatcttcaatccatacatcgcttgccaacgggtcagccattaccacaatagccaaagccgcatctgcaataaaagaagaagcctgttccttgcaatgagacaattctttcagcatttccttatcatcaatcactacaaactgccagctattgctgcgcttggaagaaggtgacatcaaagctgctttcatcaatgttacaacctcatcctgtgtcagttcttcatcggtgaacttgcgcatactgcgacgattctttatcaattcactgaaattttccatattatttccggtttcatttaattaatgtatgcaaagatagtgcaaaccgagcgtaataggaaataaaaacagtatctttgcaacgatgaagttacgaaaagagtgtaatttattggaaatgagcgtaggttaattgctcttgatagtaataggttacgatttagttagttatctactgcattatccttctgcgcgttgcgtaaccttcaaagaactcttcgtatgcaaaagtagctatttaattcgagattttgatataaactcccgttttttatcccctcattcataagaattttccgtaaaagcggtattgtccgtcggcacaccattgcccaaaacgagtttggaacaaacgtgtgccgactaccgcatagctggagaaaagggcattgcctcacgcctaaacgatgtttagacagatgaagcaatg

SEQ ID NO: 2985 - DNA, 1644 bp, Unknown
  gut microbiota DNA sequence
aatgttttctactgactcgttatggaaacttatgatgccttgcttccacaggaatgggtcgtggttagggatactttctttatggaaatgtgttttgttggaatcacatatcttttcaccaggtttcaggagcgaggtctctttggtttgtttggaataaacacttactgagcctttcaacagggatacttcaaagggattaccaggatatgcacttacattaaaacttgttccgtgtactcttacttgatgcttgtcagtttctacaataaatggcttttttgtatctttggctacatcaaagaatccctcaccttttagttggatgtgacgaacgtctgcaaattgacttggaaaacgtaaagttgaaccagcattcagccaaactttggtaccatcaatcaatgtaatttctgcacgttgaccagatggaacaaccaacacttgcattgtgtcagtgtacacgtgatgatattggatatataagctatgagaggctaaaaaaataatgaatatagctgctatactcatagtaattctgaaaactttggatagggtaagggacttgaccacctgaagaggctctttggcttttgtatctgtatcagaattccagattattaaatcatttaactttctgatattcatataggacctttggttttcttcactagcttttatccattctaccacctcttttgtttcttcttctgaagtgtggccattaatatatcgtaaaattaagttttgactgatcataaatattattgcttatctgtaatataatacgtattgaaaaaacgatcttcctaatgatataagtattaaaaaaaataaaaaatcttttaggctaatgcgtaatgtttttaatactttacttatatgatactctactcccttttctgacaatccgattttggatgctatctcagcgttgcttaatccgtcaattctactcaagtgaaatatattctgagtttgatcactgaacgtacttaatgtttttgaaatgatagattctgcttctgataccagtatgttatcaagaacactattctcaagtgataaaatacggatttccaaatcggctaatcccacatttcccattttttcaaaataaagatcgtgagttgattttttcctaagataatcaagagacttgttttttaatataacgaaaagaaatgaaattagttcttttttttcagatgtcttcatttttttccaaacagttatcattgcttctgatgcaatgtcttctgctacgaaagtatcacctacataagatttggcatataaatatgccttcctataatattctttatatagctgaaaaaatgtgtctcttcctgatttttgttgactggttaacttaataatttctgtcataggttgtctatgtttcttacttaatctacttaacttacttagtccagtctctggttgactgccggggtatcctgacagtcaaccagaggtttcatttgcaaagttacacaatctttttgcatgttgtctacatctgttctttttttatagtatgtttttcactgtctctttaatatttcgtttacttcatgtacctgttcaccattcctcttttaaagtaccattcatgcgttcagttaccgcattttctctggg

SEQ ID NO: 2986 - DNA, 250 bp, Unknown
  gut microbiota DNA sequence
tagtacgcagatagaattgaggacggtatttgttgtggaacggagtgtgacgaccaccttcttctttcttcaggatataaacctcagctttgaatttagagtgcggtttaatctgtcccggtttacaaagaaccataccacgtttgatttcgttcttgtcaacaccacggagcaacaaacctacgttgtcaccagcttcaccttgatccaacagtttacggaacatttcaacaccagttacaactgattt

SEQ ID NO: 2987 - DNA, 46357 bp, Unknown
  gut microbiota DNA sequence
cctccgggaaggaggggtggctgaaagccggggtggtaggtggatacacaatgctgataataactgacttacacattcacctaccacctccccctacgggggctcctccttcccgaaggaggagaatgaagaatactatcgattatcaaattattattttcctaattaagtttaccaccaaatttgaagaagaaccagtttttatcgatttaactctcatgccctcactaatagtctacattcctttattcatcagggttgcagctatgagggtaactacaagaagtagcctgagggtaaacagttaccttcagaccgtattctctggagaattccctatacatttgttactaaaagcatacgggattaaaacatgaagcaataaggaagcagagaggtttaccttcattagcttgtttgtcaaccttcgttagcttatcagctaatcccggtaaacggagaggctaacattggttagctgttgaaggacaaagaagacaaacataagtaatctatatcgttattatgatagaccttatagcgtttcataagatatatcagtgtttaccggctgtattatgttgccggataagctgtatataaagagatttatgagggtaactttttactctcaggctgttccttgtagcaactctcatagctgcaaccctgatgaataaagggatgtagactattaatgagagtatgaaggtaaaattgataaaaacttttttctagagtcatctaaaaattagaagttgagactaccgatggacctcaggaatataatcgtgtaacacttcatctaccccataaatactataaacatcggaagattatctctaaggaatttcaacgccatagttatctgccgctctatcgctttctcggaaactgcacatcgttccgctatttctttattagtcaaatgttgttcccggctcattttgaagatccgccgccgttgaggaggaagctgttcaatcaacttatcaatatagctttttaaatcggccgcatccaactcatcttctatatcgtatgaattttcaagacctcgcagggctgtcattttaaaattcaactcataaaaatgccggcgcgaataattaaagataatgttacgggtaataataaagaggaaaccgtcaaagttcttggtttcatcaaacatttcccttgattcccaaactttaacaaaaacatcttgtaccacttcagaaacctcgaaagacgaagttatataaagctgcgcaaagttatagactttcagccaataacagtcatatagacgctcaaatgcaattgtatttccagcctttacctcggttaatatctctgtttcatccatattgtacaaaaactatacaaatataaaagaaaaatagataaacttctatattatttgaaaaaatcatgcaaaaacaggtctttttattcaaatatctaaagattttacttccgaaagaaagagtgcggaataacggaaaaatctgttaaccagaatattctttcatcatcccgcaccctgcactattgaaaacttttttaattcatcgtcacttccgtacgatctcctgttgccgacacagcatacaatttaaacccttctttccagctgagaggcaaaataaacgtatgtgtagaagatggagtggtttcaccactgcaaacaaaaatcaactttccatctgcatcctttacttcataagccactacatttttccatccttggatagttatcgcttcaccaatagcctccgtcttcccttctgtgaagcttttggcagtgtgtgttgcgtgcgaacctgccactaccgacgccctacttttatatagttcaaacgaattgtccgatatgtactccaaggctacatcgggtttggaatatcccaagccatttactttatgccttaacgcatctaccatatccggcgttacggtaagagtcctggtgtcatagtcctcaatttttttattgacaggagtaaggaatccccacttttcaaagaaatcaagcagattcatctttgccgacaggcagcaattatagacaaaatccaattgtatgtctccgtccgtcatgcctgtataatctttattacgggcatactcataaacatccggatagaatccgcctttgtccgactgttgcaaaggagtccgtcccagcacttttccgaagtaaagttccagttgccagaaaggaaccagtttgcagaagacatcattcgcatcgtcacctatatttgaaaaatcagcatgagaactacccgcaacgattattccattccaggcttttgagtatcgattacggtaaacatcccccatgtcttcagtttgtatacgcgagccctgaccaaaaattgttgtctggatatactcggacataatgttatttgtcacttccgtcattccgatccacatcactcccaaacgagtctggttacagtgacctatttcgtgtgccggtccccagcaagcgcttgtcttaagtttggaaggattacagatatcactcattgtcatttgattataagcggtatgataggaagtggcatacatatatgattgatacatgacattcaagtacatacggtttctgaacatcttgtcatatttctccagtcccaacaactgcatttcgttcaacgcaatctggtcatacaaatcaatcagttcgtttccgttattagcagcatatttacgatagtcattcgtttcgaaagtcatgtgtgcatacttccctactacgtcaaaatacttatccgtagcttttcccaacagttcattccaacgtccctcatgtttctgcgagtcaaaataaccgtttactgttcccgatgcaaaatgaatcttcaccggcaacgcagccgcatcatccaacgtccgggtatggtacatcacgtaaaccaatcctttttcactgattgtcaacttgttcgttcctcgactcaacggataggtcactcctccgaagccgtcactttccggagcatccagattctgtaccttcaaactgatgtcataaccgtgcgtatcgcccacaagtacaatcaggttttcattagccttcaccgaaataccggtcggattgtctaaaagactatacggattcgttttatgagtccccgattgaatatcaggattcgggtatgctttaaattcacccacacggaactccggctcatatttacctttaatcatgtaataagccagattcttaaagaacgggaactcgcacttctcaatgtcagcctcagtaattcccgcttttagctcactacacgtctcgtctgcaaaaagagttgaataatcaaaggcttcgggattctttgcataaaattccatttcagcacaagaagcaaacccttgtccatctcctgcaccagtttttacgataaagcggaaggatttagcacgaacgggagcatcgaataatactttagtagcagaagcggaacctaagaaatctttatcagccaaaggagtgaaagcactcccatcttcggaatattgaatttccacttccttaaactttccgttggcaccgtccgtgcgaggataataaaccagataatcgacatcggacacttcttccaaattataagtcagtgtaatggggaagtaattgctgccggagttattccaactggaatgataaatggtagagtagtctccgtcaaatgatttttcaatttctccaccatcttggaaagaagaagcggtcccatcctttactttcaatttaatatcgcctttgatatcttcccccgtgtcggcattatattcattgagtccatgttgggtgacagacacggtggcagaaaccggtacatcgttttccgttgcatcttccggcagtttctctgtaaatacgatagtaccttgtcttttgttgtccaatatactggcacgtaccgagtagcagtagtccgttgtcaccatttcggcagaacgagttttaggagcttcgacaatccagtcggacagaaccggttctacctcaacattggtagtcacggcaaatttgatttgcgcacccaccgccggtacttcaaacgcttgctgatcaatcaagatagccgcttcataacctagctgacggactctgatcgttttcgataacccatctgccgtaaccgatacggtagcttcacgtaccaatctttcgtcactttgatctacggatattttcagcagttttcctacaatcgaagggcggcaccaacttttatccgattgggcagtccacgcaacagcatttgtagtaatcgtcagactttgttcgcttgcttcacttttgaagtcaactgttgttttactgatttccaatgtagcaattgctatttcatcgtcgctggaacaagccgccagcagactcaagggaatcaagaaaagcagtaataaatatattcttctcatagttttcaatttaatttataaaaggggaaaaagaacggagatacaaatatatcctagcaatcatttgtatctccgctatcaattctctgtcagagaacgtcacttatttcaagagacattaatcctccactaccactgtctctccggtttcgggatcatagattgtcgttgtcacttgtttcaatgccagttccgacagagcaatccagttacttccggaagttgcagacaatactttaaaccagacatatcgaaatgtttcatccgaagaaattctatccgacatatatgaggccttccgagttcccggaagttctgaaagagaagccaacttagtcgttcccgtttcatttacataatcaggcttcgatcccaccagttccttacttaccaaaatatccatttctttcggattatcacagtttgcgttatctctagcagtataagtgaaactaaaaaagtttgtttcttcttttaaatctactacgatataatgcggaaaaggagtcgaagcactccaagacatatggaagtaattatcagaagcagtactaccgtcaaacagattcttcaacggcccttctgatgtttcctgagcatcggtccatgcatctccttctcccgttattttaaagtctttagaaatagttacagtctgcttatttgctgccgctgcctgtgcagtaatagagcaaatttctccgccattaccatcagcactgcatggctgtaacgtaaacacaatatctccatatcttttcaataaattatccaccaatatcgtatcactatatacactagccagacgtaaacactccttaccactttccggcaatgtataagtaactttgatatacttataattagcattctccggaatcttccatttcagttttacagctcctgctttcgcctcataagagagtgtactcgcatccaaagctgtcggagtcggataagattcatcatcagagcaagcagtaaaaaccgtcactcccaagattcccattataatataagataatatttttttcatattaatagacattttattgattaataccccggattattcaccaattgtgggtctctgtttatatcagtagaaggaattggcaacaaatactgagtaggagatttaaacttacgctcaaaactgatttctgtcagtttggcaaaatcatcaattgttgacgctttaatattcatacctttcgcttttactccgaaatattcctcagccagaagccaacgacgcatatcccagaaattttgattctccagatacaattcaatcattctttcctgacggacaatttcccgaagtttagattggttcagcgtagctattccattccatgaagtttctaatgtcggaattcctgcacgttctctgatataattgatatatgtcttagcattcgtcaaatcatctgatgttccaatttcaatgcaagcttctgcataagccaaatataaatctgctaatctaataaccggccaaggatattggttcaaagtcgtactgctcgtccccacggtagtattgggatccactccttttttattcaaatatccaccaggactatagttaccatcacgctgcacgttagctgtaccaatactacaattacctcccaaaaggaaactacataccaagcgtccaccatctacataaccatcgctgtaagccggatttgtagcattgttcaatacctcaaagtaaccaccctgaaaagctatccaagcataataacgaggctcacggtctaaattaaagagaattgttttctgaccctgtgcagcttgagtagcatgagcagcatctacactaaccacttcggttttcactttcgatgcaaattccggatcttcatcccaaggcaaaccattctttgtataaaagcgattcaacatagcccaagtaggacaaacaccattccatgcccaaccgtctttcacaaacggcaatgatttattttgtacgccataactaccttcattccgagtttcggcaaacaaaacttctacgttacgtgattcccaatccaccatacctgtacgcaaacatctgacagctccttcttcagggtatggattagcttctgactcatccagccggtaatctttctttttatataaatcatgtccgttcagtacggcaagttcaatagcctctttacaggcatctcttgcaagtacccacttattagcgtcataagtaagcggcatcaactgcacaccatccttatctacaaagttgctataaaattttgaattaccattgaatagcggcgaagctgcataaagtcgcatctttgcctttaatgatttagcagcgatactagtggcaagtccgaactcggaagccgtagaacgaacagccggcaaatcattggcagcttcgtcaaacaaattacatatccattccacacattcatcataaggtgttcttcccaaatattcttccaccggagtcgtgatagaaggtgtttcttttatcagcaaagtaggaccataacaacgggccatcaaataatgataataagctatcagaaatttagtctgtgccttataatccactttcaaatcgtttctcaaatcagctaccttgtcaatcctttcaagcaacatataacattggcggataccctggaagaaagtgtcccaataagaaattacaggagttgccgcagaatagtttcctttagggaaaccggcaaacgtttcatgctcgaatgcagtaatcacctcatcacctgtcatctggtccaagctaccactcgatatgttacactgcggcaaataggcataacaagaataaagataatctctcactgcatctttatcagcataagtatcctcgtcagtagttgtttcatccggaacaatgtccagatagttacaagaactatatccaattaatgcaactagcaagaataaaattctatatatttttttcataatcactggttattatatgtttatttgaatgtaatttgaacacctaagttgaaagttctctgagtaggataagccataccttttcctccacccatttcaggatcccacaatttaaacggagagaatgtcagcagattggttccactcatataaactcttccccatttaaagttataaccaacttctgcattctttaatttcaggaaagcggcgtttctcaaccaataagtagaagattgcatattattattgttgttgtacttagtcaaacggggatatttagcattcggattctgattttctttgctccaataatcctctgcaatccactccaacacattgtttttactttgagtaccaaaaggctcaaaaccactcatcatcaatgagacgttagcctgtccctggaaaaatacggagaagtcccatttcttccaagtaatagacggaccgaaaccatagataatttcaggaatagtaggatgaccaatggcgactctgtcatcggagtctatctgtccgtcataattaccatttacatccggttggtctacatatttcacatcacctgccgctattgttatattacctaatgtagaggtaggattattcgctatatcagcttcgtcaatatatagtccgtcagctacatatccccatagtgtattcaagggttttcctactgcggacagagccggacgtatatcagcggcctcatcagtttccattacacgatttctggcaaacgtaaacgttcctttaaactgaattgatagatctctattgatctgtttaccataatcaaccgccagatcaactccccagttctttaccttggcaaagtttccatagattactgtgttggctgctcccagataattaggaatagaaccttttgtagtaaggatattacttctgatctcacggaatgcgtcaactgtcaaattgagagagttaaataattgaatgtctgctcccacattcagcttatgacctacctcccatgtcatatcttcattttcaaatcttgagaatgtagggccattatgtgactctttatggctgccataaccagtctgatagctgggcgaatcattcaatgtagtgattcccatatacaagaaacgagtataaggtacttggtcgttacccaccaaaccataagaaccgcgaattttgaaattagatactatatttctaattggttcccagaatttctcctgactgatattccaacccactgacacagaggggaagaatccgaaacgatgtccttttgcgaagttctcagatccattataaccagcattgaactcaaataaatagcgattggcataatcataagcagcacgaacggcaatacccattctacgtttgggcaaagagttcaataaacaggaattaacatttgagttatattcatcctggttatacaacaacataccacctacatgatgatcgccaaaagcacggtcataattaaagtaaccttgaatgtaaaagcgtctgtcaccgtcagtaccaaagaaagaatctaacgtatgattggttgcatcccctattgaatttactgtataattatatgttccatcttcattcttggtatagtcagtcagctggtaagtattataaccctgtaaacgatatttggaattataactccagttcttaaatgaaatcaatgctttgaagctcaatcctttggtaataaaatcaagtttctgatcaaagtccagattggcaacgaccgtactctcgaacgtatccttatatcccatactggacacagcaacagggtttacaggattatagttacctgccacaatactaccccaacgataccatttctcatcttcttgcggatacattacaggaaaatcgaccgggttagttcccatgatagccccaaaaatattatctacaccggctccttctgaagttgtcaacggaccatgcatattgttcaactgtacattcaagtgtaaagacaaagtagaagtcttcgacatatggaagtccacattattctgaaatgcatatttcatatagtcgatattattcttataagagaagaagttgctggaacggtctttcagcatacctgtttcatgattgacattcacattcataaagtaagtaatcttggaagtacctccgcgaacattgaagttagctttctgattgaaggtcgcgttcttgaatacttcgtcgtaccaatccacattcgggtaaatgtatggattcaagttattcgccgtaccatagattttatcatctgaatacagtgcatctccggtaccttgattagtaacggcttcattatacattctcataaacgtcactccgtccaccgttttcgggcgcttaataggtgtattgacgtaagcctctacacgcacaccgataatcggtttttcaaggtcggaacccgacttggttttaatgataagtacaccattcgcaccgcgtgtaccgtacatggcggaagcagttgcatctttcagtacagaaaaactttcaatgacttccggatcaagtgcattcaaatccgcttttgagatttcaactccgtcaagtacaataagcggagtagcactgttcatggtagcaacaccacggataaagaaatccgcaccgttatttccaggctcaccactacgttgataagagatcacaccggaaaggcgaccggcaaaagccgtagaaagattagcagtcggtactttcaaatctgccggacgtacagactggatagaacctgttactgtttctttcttctgtcctgttccgaaggccgttacgactacttcatccagctgttctgcatcgtcagataaagtaacactcagtactttctggtttcctactttgatctccttagaagaatatccgataaaagagataaccagaacatcactggaagtcgccataacctcgaacttaccatctacatcggtagtcgtaccggtttttgttcctttaatcataacagatgccccaggaatgggatctccggtggccgactcggtcactacaccaataatcttgtgtttggccgcttgttgagtaaattcgccttcaacttttaaaataacttcgttacctttaatagtataactgactccactccctttgaatacttcgttaagcacttcattaattgtacccgaacaattaatatttctagtttttgtgtttttcaggtctgctgcattgtagaaaaaagtataactactgtttttttcaataagctgaatagcctgtttaatagtgattgactgcccttttactgaaacttgtccctgagctccaaggacagataacggataaaaaagcaaagtgaggacgatatacttcaaatatcgcctgcaactagagattctttgttttctcatgcttcgactgattagattagacattcgattaagtttataataaaatatttatattgatattaatgaataataatttgttcattgtgtgtttctatggtcaaattgagactaaaacagattttatcaagtacatcatccaaagtttcgtcataacggatactcccactaaacaatgctttttttcctaaattcctctttaagactatatttgtattatacatctgattgactgtttcaatcagttgagtcaacggaacatcttcaaagttatatcttccattttcccaactgatatttgagatattctctatttgtgtttgtgcattatctacattataagtcactttctgaagtggttgcatgactattttcttcccggtagattcaacattaaattctatctttccatgaaacagcgtaatttcattctgctttatatcatcttgcttgacaagaaagcaagttcccttcacttctataaaagctttattaatgtgtacttgaaaagtacttccctcgtgcttataaacttcaaataatgaattaccactcaaccagacttttctgtctttattaaaatcttttgcaaattgaatagaacttccgggcttcatccagaccttggtgctatccggcaaaatatacatcatactttgttgggcttcaatccttaccaactcattcatttccgctttattatcacctaaaatcatccaaagtccacctatcaacaataggatagctactgaagcggcagccaaatatggccttagttctacaagaacttagtaatacatctcacatcttttttattttttttcgcattaatcaattaactacattgctaattatcagataattacagcttacgttcaaaaaaactttcacttttttacaaagtcgatgtggggttagaaagagctggtgtgtatttatagtatatgagcaacaatagagtttaaaaccaacaaggtagaatagaatggataaggtcgaaaggaaaagattaatcaaaagtctgctgtcaggtagactctccaaaaagcaacggaaagcctttgctgacttggaatcggtaaatatagaaataaaaaaacaatggaatgaatctggaaacagagctgctgatatggcaataaaagaacaaatatggaaaaaggtaaaaaccaaatgtgaatacaggaaaaataacagagttcttgtagaaccaaggtggtattttgccgctgcctcaattgcacttttattgacaataggcggattctggttaacgtttaaaggcgacaagatagctaatgagcttattaaaattacagctcagcagaaccagatgtacactcttccggatagcagcaaagtatggatggagcccggaagttctattcaatatacaaaagcttttaacaaagaaagaaaagtctggttgagtggtaattcattatttgaagtttataagcatgaaggaagtactttccaagtatatatcgacaaggcttttattgaagtaaaaggaacttgcttccatatcaaacaaaccgatgccgaaaagaacgaaattacattgtttcgtggaaagatagaatttaatgttgaatccaccggacaaaaaacagtaatgaagcctttacaaagagtgatatacaatccgcgtaatgctgaaatgagagtagaacagattactaatataaaatgggaaaacggaaaatataacttcacggatattcccttgcaagagcttattagtatcatcaatcaaatgtacaactccgacgtcacattagcaaaaggtatcaatcatgaatcagcatttaccggaagcattcgctatgacgaaccattggaagatgtagtcaacaaaatttgtttcacattaaacctgaataaagaagaacatgcaaataaaatcattataaaaaaataataattaaacttatgtctaatctaaaatgctaaagcatgagaaaaattcaaatttcttacaagcaacgatatctgaagtatatcgtattgctgttgcttttttacccgctcaacatcctaggagcacaaggagtaatctcagtaaaagggcaagcaatgactatcaaacaagcaatccagctaattgaaaaaaacagtaattacacatttttctacaatgctgcagacttgaaaaacacaaccaacaaaaatctaaattgtgaagggactattgaagaagttttaaaagaagtcttcaaaggtagcggaatcacctacatgatcaaaggtaacgagatcatattaaaggtaaacaaagaggaagccgcacagcagcaacccaaaaagaaacgtaccgttacgggtacggtggtagacgctgaaaatggcgatccggttatcggtgctactgttgtagtgaaaggacagaaggacggagtaattaccgatttggatggtaatttcacgattgctatcagcggctcgaaagcacagctggaattcagttacatcggttacagaaagaaaacagtcgatgtaggcgatcttggtgtcatcaacgtaaagatggaatcagacaaccaactgctgagtgaagttgtagtagtaggtgccggtacacagaagaaagtcagtgtaacagggtcaatcaccagtgtgaaaggtctggaactgaaagctccaagttcttcgcttaccacctcctttgcgggaaaactggcaggtgttatttctatgacttcgaccggcgaaccgggtgccgcttccgaattctacattcgcggtgtgagtacctttggcggacgagccactcctttaatacttttggatgatgtagaaatttctacggcagacctgaataatattccggctgaaacgatcgaaagtttctctattttgaaagatgcttctgcgaccgctatctacggtgcccgtggtgccaacggcgttatgctcatcactaccaagaccggtaaagaaaacgagaaaaccagaattaacgtcacggttgagaactctttcaataaaccgatgaacttccccgactttgtaaatggtgccacttggatggaaatgtacaacgaagcccaattgacacgtaatccgggagcgaccccaaaatattcgcaacttgacatcgacaacacacgcaaccaagttaatccttacatttatccggatgtacaatggaaagacgtcatcttcaaaaacatgaatatgaatcagcgtgccaatgtcaacatctcaggcggtggttcaaaagcatcttattatatgagcttgcaagccaatcacgatacaggtttgctggatacaaagaaagtatattcgtataataataatataaacaattggggatataatttccaaaacaatatctcttacaaaataacatctacaactaaaatcgatttacacatgaacgcccagattcgtaacaagaagggaccgaactacagtacttccgatttattcgctcagatgttgtattgtaatcctattaacttccccgttactttcccggcacaacccggagacacacatatccgttttggtaatgctatatggacaggatcttcggtacgtaccaacccgtatgcttatatgttgagttcattcaaggaatataatgagaacacactcaatacttctttaaaaatcaaccaaaaacttgatttcgtaactaaggggttaagcgtacaagcaatggtcaattggaagaattgggcttcatcttcctacaaccggacgatcgaaccttattattatggtattaaaggaggaagttataacccttcaaatcctactgattatgaaattgaacgcctgggaacatcaggaactgactatctgaaaacatcagatataagtaaagcttccgaccagactttctatctggacgcccgcgtgaattatgaccgccagttcaatctacatcatgtaacaggaatgctgatgtatatgcaacgtgaatatcgtagtagcgtactacccgaacgcaatcaaggattctcaggacgttttacttacgactacggtcagcgctatctggtagaactgaatttcggttataacggaacagaacgtctggccaagaaagaacgtttcgaattcttccccgccgtatctctaggctgggtaatcagtaacgaaaagttctttgaaccgatgaccaagtatatagataacctgaaaatcagaggatcttatggtctggtaggtagtgacgaaaccggactttctgccggtgcacaacacttcctgtacatcgaccaggtatcgctcaataacataggcttcactaccggtgtagatatgaactataccttatatggtcctttagtaaccaattatgcagttgttaatggcggttgggaacgcgtaaagaaactggatataggtatcgacctcgaattattccgccagttgactattactgccgattattttaatgagaaacgttacaatatcctgctccaccgcgaagcatggccggaatctcttggatattatacagctaaaccttggagcaataaaggtaaagttgataactggggtattgaactaagtgtaaactggagaaaagaattcacaaaagatttatatgtagatttccgtggaaacttcacatatactgaaaacaaatatgtcaacctggatgaaccggtttatccgtatgtatggaaaacatctacaggcaaaccgttaagccgcacaaccggatatatcgcccaaggattattcagcagtcaggaagaaatcgataatagcccgacacagaatcttggtagtactgttaaaccgggagacataaaataccgtgatgtaaacggagatggtaaaatagatggcagtgaccaagtaatgatctctccttatggaactaccccccgcatccaatatggtttgggaatgaatgtaacctataaaaaattcgatttcggtgtattcttcaatgggtcggctaaacgcactatcatgattagcggtatttcaccattcggccaaagtgactataatgtcatgcaattcattgcagatgactactggtctgagtcaaatcccaatccaaatgctaaatatccgcgcttaggattgactagttcacaaacagccaataatacagtagctagtacttactggatgcgtaacggtaatttcatccgtttcaagacactggaactgggatataaattcaaatatggacgcgtatacctgaacggtgacaatatagccgtattcagtccgttcaagctatgggacccagaactatcatggaatgcttatcctttgcagcgtacattcaacatcggagtacaacttaatttctaatatatgaacctaaatacgagataaatatgagacttatagataaaataaaaaagatgggtagtctgttaatactctctacgtgttgcctgacatcttgcaatttcctagatgtagtacctcccgaacaagcaggtctgggagatgccgttaaaaagccggaaagtacacttggcttcctctactcatgctatgcaggaatcaaaggttcatccaacccaattacttataccggaatggaagctgcatctactgatgaatttgtattcccggaattatggggacacagcggacagcgtgccggttggggactgctgactccggaatctcccggagactggaaatggggtaatatctaccgctatatcggacaatgttatctgtttctgtcccaattaccaaatgccctcgatgtatcggaagtacaaaaaagagaatggactgccgaagccaatttcctaattgcttactatcatttcctgatattagaatactatggcccgtgccctatcactgattcatacattgatatggatacaccgaacaatgaatatcacggacgttatcactttgattacgtaacaagctggatttccatgaaactggacgaagcagctaaagatcttccggcctcccgtatcggttcggaatggggacgtgcaacttccactattgcaaaagcagtaaaagcacgcttgttgctctatgcagcttctgacttatggaatgggaaattcccttatccggattggaaaaacaagaatttcgaaacaccgggatatgggaaagaattagtcagccaggtttatgatcccgataaatgggaacgcgcactgactgcttgtaaagacgcactggaatgggcagaaggagaaggcggatgcggactgatgactactaaagaaagtgcaatccttatgggtaatcaaggacttaatctaggagagcttgatgttcccgtagacggagttaccgaagaattcaaaaaacatgtttatttgatgcgttatctcgtaactagccgttactcggatggtaaccgtgaaatgatatggggacttgcagatgacggcggtgtagtaatggcttctttaccagtacacgtggtaaaagtagacggaggcccttggagaagtggatatagcggctactctcctttattaaacagtgtagagcgattctataccaaagaaggagaattacctcgaattgctgccaataaagggactttcgcagaagaagattcatggtatgaatctgcaggaagaagcaatgcggatattatcaagttaaataccaaccgcgaaccacgattctatgcatggctttcatttgacggagaccaatacagcccacgaatttcaggcggcaaacctctggtactcaatcttaagaaaggcgaagcacaaggttggaacagaactgaattcgcccgtgatcactgtgtcacaggatacatgtcaaagaaatttatccaacccgacctgaactggggtacaaactggagtaacaacgaaaaaagctatccacgtcctctcttccgcttggcagaactttacctgagtgtagccgaatgtttggcagctttagacagacccaaagaagcacttacgtatctgaacgtagttcgtgaacgtgccggtataccagacgtaacagaagaaatgctgaatgatatgccggccatggattggatacgcaacgaacgttttgtagaactatggggagaaggtctacgctattacgacgcacgacgttggatgattgcccctgaagtttttgcagctggcgtacgtaaagggttgaatatggaacaagtagaagaacctactttcgaagagttaaatcaacctgttattgtaaatcaagattacaaatgggaaaaccgtatgtatctggcacctatatttgctaacgaaacatacaagaatccacaaatggttcaagcacccgaatattaatctttaaactgtttacaaattatgaaacaaatattatactcacttcttttcttgggttcactcgccacatttaccggatgtgaagaagctgactaccaagaactgataccccaagagtacaacaagattctttatttaaagaatagtggacagaacgatctggtactcttcaacgatggacaacaagtaaaatattctattactgtagtcaaatccggaagcgatccttccgctacggcccaagtcagactaagcacattatctcagaccgaaattgataatgaatcacgttacaaaggcaacaactatgttgtattgaacagtgattgttatactttccggaataaggatattagtttcgaatcctcagatacctataaaatagaagagtttacattaaatccggaaaaaataacagaacaggtggaagcggaagctaatgccaacagcatctttattttgcctatccgcttaaccagtaaaactgattctgtcaattttgagcaaagagacttaattcttaaacctcaagtgaaacagctaggtatcaaatttgagaaatcatccacaatgatagacctgggaattaataaggaagaagaaattattgctgaaatcaaagtctccatgacatccggagtcatcaaccagtggaattttacggccggtataacagccagcactgaccaaacagaaatagatgcatacaatacggcccaaggaacagattacaaagcagttccggaaggagcattttatcaactggaagatttgatattcagttccggaattagtgaaagcgtcggggttttagtagtagaccgttctaaattgactaaaggggcgacttatttaattccactacaacttgaacaaagtgaagatcttgaaactattacctcggacactaaaaaacattatgtaatcttgaagtatatgttcgatatggtggatgataagattgacttgacagataaaattactgatccgttgagctgtggagctaattcactaagttttctttacgatgacgataccagtacagcttatgaaaccaaatatcaatcagcaagcggaaatgctcagtatggacaacctattgacattaatttaggtaaagaaatgagagctatcatgtttgagtatattacaaaaggttggaataactcaggacctaaagtaattaagttatttactagtaatgacggaacaaactggaatgagtttgtcgaaataaacgaaggattaccaacatcaagtgaaggaggaaaaacatatacctcaaaagtatttacgtcgcctaatcctttcagctatctaagattgacagtaatggagtcttatttaggaaattgtataggagaattccagccaggtagtacttcatggtatgcatgttggggaatggccgaacttaaattatggggaatgtaatcactaaagttaatacataggaaacgttcttattatttatagagcggtttcctatacaaatccaataacttatgaaatatatacatttatatttaacatacttcttatgtctaataacatccttaatatataccggatgtaaggacgatgagagtgaactgattccaaatacatttgaaatcagcagtagtgacctgaacaaagagattgactttagaagcactacaatgtcaatcccggtaaaaacaaatctgcgaaccagccaatggagtgtcaattccgacgaaaaatgggctacagctttccaacaggatgataaaataatgctttctatccttgataatcaaggaaaaacaaaacgttatgccaaattagctgttaaatctgagttgggcaattataccattaatttaacccaatatggagttaatgatgttgatttcagaaacgacactcaaatagccatagtaagtggaaatgctatctcacaaggagataactggagcatcgaaaagacattcgacggaatcaaaggttcacagacacaaggtgatggatatcattatcattctccttgggataatacgactcatccattgcctatagatctagaatatacacttcaaggagataaacaagtcgattattttatctattatcctagaaacggaaacggaaacttcggagcagtcgatgtttacgttcaaacagcggataacccgaattatgttcttgcaggtacttatgatttcggacagcagggcgggtttgacggcaagaccggaatactaactaaaacggtcaaagccactaaagttaaaatcaccgttaagacgggtttaggaggcttcgccagttgtggagaaatggagttttttgaaaaagcaaactacagagatttgaatgatccactcctgactgtctttacagatcttacttgtagttccttgaaagaaggagttaccgacgaagaaatcgatgcattggaaagtgaaactttcagacgtgtggcccatgccttaaaagataacacttatgacgaatgggagaaagatttccgtatacgcgaatataaagcatatagcaatatcgactactgggcaacaagactacaaacaaagaaatacagtaatctagacaatccgaccggaatctacgtcaacaaagatgaagaaatcatagtattagtaggtaatatcccggaaggacaaaaagtatcattacaatgtatttgggaggagaatgtctatacaagcggtagctccactgactactacaagcaaacacaagcaaccggaacgacctactctttggaagaaggggttaacttattaaaaatgcaaggtcccggtcaattgttcgttatgtacaatgtggatggagaacagttgcttaacaaccctgctcctatcaaaatacatattcctctaggacacggtgtagttaatggtttcttcgatttggaagaacacaagacagatgctaaatatgcagaattaatcagtaaagccacccacaaatatttctgtgtacgtggagaacgaatgatgttctatttccatcgtctgaaaatgttggatgctgctccgactgaaattttatccgctattcatctttgggatgacattgtcggttgggaacaatcgttaatgggaatctctcaatacagacaggacggaaaaatcaataaccacatgtttgccatttctcctgaaggttcgtatatgtgggcatctgattatcgcatgggattcgtatatacgtatctgaaaaatattcttttacgtgaaaatgtaatggcagcagaagataatgcttggggacctgcccacgaaatgggacacgtacatcaagcagctattaactggccgtcgtccaccgaatcatccaacaatctgttctctaattacgtaattcgcagattaggaaaatataagtcacgcggacgaggcttgacatctttagccaatgcaatttatagagataagcaggtatggtggaatatgggtacttctactcaccagaatgaagatactgagattcacatgcgtatgaattggcagctatggatctattatgacttatgtaaaggtaacgaacaggaagctaaattctggcctaaagtattcgatatcatgcgtacaacatataaagatgtgccagaaagcgatccgggagcaagacaattggctttcgtcaaagctgtatgcgaagctgcccaggaagaccttacggatttcttcgaaacatggggattcttcaaaactgtagataatgtaaaagtagaacaatacggtacatggacttatacagtgactgacaagatgatagcagatactaaagcatggattaaaactcagaattatccgaaggccgctccaatacaatatattgaagatcgtaaaatttcagattttacatccggcgactaccgatataaagaggttggagacttaggatattatacccagttccagaacaatgaaaagattactaaaactccaacctatacaatggtggcatctgtgacaggaagtgaaatcacaattaagaatggagaacaagccgtagccttcgaagtaagaaagcaatcaacagacggtactatgggcgaagttgtttatttctctaacttcttaaaattcagtgtaccgagaaatattcctttaatccgtacaggcatttatgccgtgcaagctgatggagaacgtattcttgtgaataaagaataagttgcatttcacgataattatttataaaaatggcaggtaatatatgcctgccatttttattacctttataacgcacaatctatatcaataacacaatcagacttatatgaaaacattccacaagtttaccctcctgtttctatttctctctattttcaatgcaacactttcttgcagttccaacgacaaaacactgcctcagcctatacctgacatcgaggaagaagaggaagagacaaaagatgtagtacttcccgaagatattcagattataccgtacggaggaaaagccagcgaataccagcccggatctgacattgacaaatcatacgatggcaaatttactcaaggaatcagcttcgagtcacattatcacagttcatggagtaatacatccttccctgtcactttggaatatttcttcaaaggagatacggaaatcaattactttatttattatacccgatcagggaatggtaattttggtgaggttgaagtttacacctctaccgattccgatagaaaaagatatacgcttcaaggaacttatgacttcaaaatgaaagatactccgagcagaatcgtattcaagaaagggatgaaagccacaggcgttaagtttgttgtcaaaagcggacttggtaactttgtcagttgtgacgaaatgcacttctttaaaaagaatgaggataacactttggcaactaagttattgaccgtattcaaagatattacttgtagcgaactgaaagctgatgtcaccaatgaagaaatcaacaaattgccaagcaaatatttcgtccacatagccgaagcgttaaaaaacaacgcttatgatgaatgggagaaagaatttcgtatccgcaaatacaacgcttatagtgatatcaacgagtgggcggaaaagttaatgaccaaacattacagtagcttggataacctgaccggtattgctgtggaaaaaaacgacgaaattatcgtccttgttggcgatacctatggacgcgaagtttcaatacaatgtgtaggagaagaaagaacgaacttttgggaaccgcaggaatatgtacagaccgccgcttcgggagacgtttactatctggaaccgggtattaacaaaatcaaaatacgtaataggggccagttattcgtcatgtacaactgtgacctgaccagccatccgaaacctataaaaatccatattccattaggaagcggaacggtcagcggtttctttgacttgaaagaacacaaaacaaatgccaaatatgccgaattgttatcaaaagccaccgacaagtatttcggagtacgtggtgataagattatcttttatttccaccgggataaactgcgtgagtttgtgaaagatgaaatattgtccgctattaacctatgggacaacatcatcggttgggagcaggaactaatgggtattgaagatgtgcgccctactcaggttaataaccacttgtttgcaatttcacctgaaggtgcatatatgtgggcttccgactaccgtattgcattcgtatatacctatctggaaaatatattactatacgacaaggtgatgagtgccaaagataacgcctggggacccgcacatgaaatcggacacattcaccaactggcaatcgactggcctagttctactgagtcgtccaataatctgttctcgaatttcatactgtataaacttggaaaatattgttcacgcggcacagagcttaatcttcctaaagcggccgataaccgaacgactaactccgaaggaaatattacaggaatgacactttcggaagcccattgcgtactcaaccgaccttggtgtaactttggcagcaattatcagggagaaaatacagaactgcatatgcgtatgaactggcaactatggaattactatcatcgttgcggacacaaaacggatttctggcaaagactgttcaaactcatgcgggagaaccggacatcctccaataatccgggagttaaacaacttctgtttgctcgaatggcaagtgaagccgcacaagaagatctgaccgagttttttgaaatatggggattctttgtaaccgtagatacacagatcgatcaatatggcagctatcagtatactgtaacgaaggaaatgattgaaaatacaaagaaagctatggctaaatatccgaaaaaagccaaacctttctattatctggaagaccggaagaaaggagatataggattggatactactccaccggatgttggtcattatacccagtttcaaaagataagacctataacaaaggatataaaaggaaatatcaacggacgggaagtgagcattacaaacggagatgaagctgtagctttcgaactcagggaaaaagacgctaatggaaagttactctatttttctacctttatcaaattcgaagttcccttgacggtatcattgacgtacgccaaattatacgccgtacaagccgatggaaaacgtattctactggaagaatgactttgcttcacataaacagccgataagaaggcaaaaagttaagcaatactaaaaagtggttcctattctaggagaatgttcccatagtgtgtcttatatttgagttggtttgaaatagtaatagtaaacttaaacattaagaaatgctaaaaaaaacattagttcataggggaacaccccttacgaggtgtatttacttcgtacacacggaaatatgaccgtcacaacataaacgcattaagaccatgacaaatctgaaagaaaaagtaagacctgttttctacccaaataagggtaaaaaaacaaaattatctgttataattatatggaattgactaataaattactatttttgaccgcaaaatgaaaaacgacaaataaccccctattaaaaacataaaaaatatgatgaaaaagctattcacagtcgcagctattggactaaccttgttaacctgccatacaagctgcacacaacaacagaaggctcaggaagccttcgctcctatcaaagtagaaactcctgcccgccctgccggacaagaagacgtaatccaacttgttgctcccaaaattgataccgtacgtgtcggttttatcggattgggaatgcgtggtcctggtgccgtatcacggtggacacatattccgggaaccaagattgtagccttgtgcgacctttctcccgaacgtgtagagaaatcacaggaaatcctgaagaatgccggaatgccggaagctacttcttacagtggttcggaagacgcatggaagaaactatgcgaacaggaagatatcgaccttgtatatatagcaactgattggaagcaccatgcagaaatgggcgtgtatgcaatggaacatggcaaacatgtagctatcgaagtacctgctgccatgacattggacgaaatctggcagttaatcaacacttcagaaaagacccgcaagcactgtatgcagttggaaaactgtgtatatgacttcttcgagttgacttctctgaatatggcacagcaaggtgtctttggagacgtactacacgtagagggttcatacattcacaatttggaagacttctggccttcatactggaataactggcgtatggattacaatcagaaacatcgtggtgatgtatatgctactcacggtatgggtcctgcttgccaagtacttaacatccaccgtggtgaccgtatgaaaactttagtatcaatggatacgaaagctgtcaatggtccggcttatattaaaaagcaaacaggagaagaagtgaaggatttccagaacggtgaccagacttcaactttgattcgcacagaaaatggtaagactatgttgatccaacataatgtaatgactccgcgtccttacagtcgtatgtatcagattgtaggagcagacggttacgcaagcaaatatccgattgaagaatattgcctgagaccttcacaagttgattcaaacgatgttcctaatcatgaaaacctgaacgcacacggttctgtacctgctgacgttaaaaaagccctaatggataaatacaaacatcctatccacaaagaactggaagaaacagctaagaaggtaggcggccacggtggtatggactttatcatggattatcgtctggcatactgcttacagaatggtttacctttagacatggacgtttacgacttggcagaatggtgctgcatggctgaactgacccgcctctctattgaaaacaattcagctccggttgaaattcccgactttactcgtggaggatggaataaagtacaaggctaccaccacgctttcgtaaaataaaaatagtatttttgcagacacgaacataaattaatccggcttctcccccaaagccggattattcattggttcgtgtttcaacattttatagattatcataatcacgtttatgaaaacagctattccaaagccttctaagcaaagcattatccgtgaggctagagactatgtaatgattgccattggcatgattctgtacggcatcgggtggacggtatttttactacccaacgatatcactaccgggggagtaccgggtattgcttccattgtatattgggcgaccggctttccggtgcaatatacgtatttcactatcaacttcttcctgctgctgttagctcttaaattactgggattgaagttttgtatcaaaaccatcttcggagtgttcaccctgactttctttttatccgttatccagaaactggcggctgggatcagtctccttcacgaccagcctttcatggcgtgtgtcatcggagcgtcattctgtggaggtggaatcggggttgccttctcagctaacggaagtaccggaggcacagatatcattgcagctatcataaacaagtaccgggatattacactgggaagagttgtacttatctgcgacatgatcattatatcttccagttattttgtcttaaaagactgggaaaaagtagtatatggatttgtaactctatatatttgtagcttcgtgctcgatcaggtggtgaacagcgcacgtcagtccgtacaattctttatcatctcaaataaatatgaagaaataggacgacgtatcaacgaatatccgcaccgaggcgttacaatcatcaatgcaacgggcttttataccggacgcgaagtgaagatgatgtttgtattggctaaaaaacgggaatcccccattatcttccggtttataaaggatatagaccctaacgcatttgtttcacaaagtgctgttatcggagtttatggagaaggattcgaccatattaaagttaaataaaaacgaaatgaaaaaccaatattgagaaacatgaaatttcgactacaccccctcttattaactaacatttttctgggaatattttccctgatagtaaccagtgccgtagctgataatgcaaaaaagccttattggcaagatgtgcaagtagtagctgttaacaaagaatatccccgttcttcatttatgacttacgacaatcgtgaagatgccttgagcgggaaatttgagcgtagtaagttctatcggttattaaacggaacatggaagttctattttgtagattcctacaaagatcttcctgacaacattactgatccgagcgtcagtacagactcatggtatgatatccaagttcccggtaactgggaagtacaaggacatggagtagccatctacacaaatcatggttatgaattcaaagcacgcaacccacagcctccgatattgccggaagcgactccggtgggtgtatatcgccgtgatatagacatccctgccgattgggacggacgggacatttatctgcacttggcaggagccaaatctggtgtatatgtatatatcaacggtaaggaagtaggatatagcgaagattcaaagaatcctgccgagttcctaatcaacccgtacgtgaaaccgggcaagaatgtacttacactgaaaatcttccgttggagcactggctcttatctggaatgtcaggacttctggcgcatcagtggtatcgaacgtgatgtgtatatctactcacaacccaaagtagcaatcagagatttccgtgtaacatccacgctggacgatacttataaaaacggtattttcaaactggcaatggatatccgcaacaatacctcacagccctctaaagattatgttatcggatataaggtgttagatccgaaaaccgataaggtaatcgctgctttcgaaatgaataccgccataggtgcgaaccaaaccattcctctctttgaagaagtgaaaatagaagtccccaatgtaaaaacatggacatccgaacatcccaatctctacaaattactgatgtacatcaaagacggagataagtttacagaaatagttcccttcaatgtcggcttccgtcgtattgagatcaaaccaattgaacaaaaggctgctaacggcaaaccgtatgtttgcttattcatcaacggacaaccgttgaaactcaaaggtgtaaatatccacgagcacaatccggcaacagggcattacgttacagaggaattgatgcgtcgtgattttgagctcatgaagcagcataacttaaacagtgtgcgcctctgccactacccgcaagaccgccgtttctacgaactttgcgacgaatacgggctctatgtgtatgacgaagctaacatcgaaagtcacggtatgtattacgacctccgcaaaggcggctcattgggcaacaaccccgaatggttgaaaccgcacatggaccgtactataaatatgttcgaacgtaacaagaattacccgagtgtcactttctggtcgttaggaaacgaagccggaaacggatacaacttctatcaaacatatttgtgggtgaaagaagcagacaaaaatatcatggctcgtcctgttaactatgaacgcgcacaatgggaatggaactccgatatgtatgttccgcaatatccaggtgccagttggttggaaaacacaggcaagaacggcagcgaccgtccggtagctccttcggaatatgcacacgcaatgggtaattccaccggaaacctttggggacaatggcaagctatttacaaatatcctaaccttcagggaggatatatttgggactgggtagatcaaggtctgctccagaaagacaaaaatggtagagaatactgggcttatggaggtgactttggtgtaaacgcccctagtgacggtaacttcctttgcaatgggcttgtcaacccggaccgcggaccacacccggctatggctgaagtaaaatatgtacatcaaaatgtcggttttgaagcaattgacgctgcttccggcaagttcagaatcactaaccgtttttactttaccaatctgaaaaagtatcagatccattatagcgtactctcaaataacaaaacaataaaaagcggaaaagtttctttagacatcgctccgcaagcatccaaagagtttactgtacctgtaaacggcttaaaatcccaaccggggacagaatattttgtaaacttcagtgtgacaacagtagaaccggaaccgctaataccagccggctacgaaatagcatacgaccaattccagcttccgattcaggcagagaaaagaatttataaagctaatggtcctgcactgacaacagcaacgtcaggtgatgaactaaccgtatcttcttcaaaggtaaactttgtatttaataagaaaagcggattagtcacttcatataaagtggacggaactgaatatttcaaagacggttttggcattcagcctaacttctggcgcgctcctaatgataatgactatggtaacggtgctcctaaacgtttgcaggtatggaagcaatcaagcaaaaacttccatgtgacagatgtcaagatgactactgagaataaagttgtctcgctaaaagccacttatttgttagctgccggcaacttgtatgttgtcacttacagaatctatccgagcggtatcgtaaatgttagtgcccaattcacttctacggatatgcaagcagcagaaacagaagtttccgaagctacgcgtatggctacctttactcccggaagcgatgctgcccgcaaagcagcttccaaactggaagttccccgtatcggtgtacgcttccgtttgcccgcccaaatgaacaatgtacaatatttcggtcgcggtccggaagaaaactatattgaccgtaatcatggtacccttgttggcgtatacaagacaacggcagataagatgtacttcaactacgttcgcccgcaggaaaacggacaccataccgatacccgttggattgctctatctcctgataaagggaatggcctggctattgttgccgacagccttatcggcttcaacgctttacgcaactctatcgaagatttcgattcggaagaagcccttccccacccctatcaatggaataacttcagccccgaagaggttgccaaccatgacgaaaaggccgcgcgtaatgtattgagaagaatgcatcacgtcaacgatattactccgagagactttgtagaagtctgtgttgatatgaaacaacaaggagtaggtggatatgacagctggggagcacgcccggaacccttccatcagataccggctaaccgtgattatagttggggcttcaccctagtccctgtccgttcggccagccaggctaatgaagtagccaaatatgattatcaataaccttattataaattttaaagaaaagacccatgaaagatttatctagcattgttgctaaattcaaagtacaaggcacagtggaagaaatcaagccactaggtgcaggacttatcaacgacacttacaaagtaaacaccaaggaaacagatgctcccgactacgttctacaacgcatcaaccatgccatttttcagaatgtggaaatgcttcaatccaatattgccgctgtcacaagccatatccgtaagaaactgaccgaagccggagaatcggatattgaccgtaaagttttatcctttctttctactgaagaaggtaagacttattggttcgacggcgacagctattggcgtgtaatggttttcattcctcgcgccaagacatacgaaaccgtcaatccggaatattctaattatgccggacaggcattcggtaacttccaggctatgctggctgatattcctgagactttaggtgaaacaattcccgacttccataatatggagttccgcctgaaacaattacgtgacgccgttgcaaccaacgcagccggacgcgtagcagaagtgcagtattatttggatgaaatagaaaaacgggcggatgaaatgtgcaaggcagaacgtctgtaccgcgaaggcaaacttcctaaacgtgtatgccactgtgatacaaaagtaaataacatgatgttcgatgaagacggaaaagtgctttgtgtcattgatctggatacggtaatgcctagtttcatattctctgattacggagatttcctacgtacgggagccaacaccggtgatgaagacgacaaagaccttgatcgtgtaaacttcaatatggaaatattcaaagcattcaccaaaggatatctggaaggtgcaaaatcattcctgactcctattgaaatagagaatcttccctatgctgcagctttattcccctatatgcaatgtgtacgtttccttgccgattatatcaatggagatacttactacaagattaaatatcccgaacataatctggtacgtacaaaagcacaattcaaattgcttcaaagcgtagaagaacatacaccggaaatggtagcattcatcaatgaatgcttaaaaaagtgagaatagaaaattgagaatggagattttacttagtgaaaactccattcttccaatgataaacaattgggcggcggaggaacggttttagtttttccgccgtttcttttgccatatagtcaggagtggtcaatgtaagagtcagttccgaattatctttgctaaaatcagccttcatcagcaacatatcagcagaacggcgagcctcatcaaaatcataaatagttgtcgaatcaggagtactcaaaaagtcactcatcaccggtagagagataaactgagaatctgcaagtggtttccaatcggtcgtatagaaacgcagactgctatcacatgccggagcacaagcagtagagaccagacataccactttcgtcgtatcgctcagtgccaacaccttcatctgccaagatgtttgcggagacatttgcatacggacataatccgtaccaagctctgtcatttccgactttttaccaaaacggttttcaacttgcgctttcatcttgctttccaaaaagtcaatacaatcttcacgatttactttagtaagcaaaggagttaatgaatccgggatattcacaaacaaagttttagcttcctgcgcctgaagagaagccagcgaaaacaatcctacaacaaaaaagaatatagcggaaacgagtctatttattttcatatcaatcttatttaacctataatagtcagattatgaatctgccgttttaacttttagaccccaaatataagaatatcattccgattaacaccagtataaggtcaatcgctttgctttttaaattcttttcacggaagaagagtgctccaaaagtgaaagaaacaattacacttccccggcgaatcatcgaaacaatggaaatcatagaatcatcataactcaatgcataaaagtaaacgaaatcggcggccgaaagaaatacggaaatcaggataattgtccagtcccaacgaaacggtgtggtagacttccgtttaggccaccaaagcagaagcagaataggacacatgataaaaacctgatagacattgtaccatgactgcaccagcattggattcagagatttcatcagatatttatcatacaatccgctgatagctcctgttattgcggccagtacaataaaaaatatccacttattatgcttaaaatcaattccttccttctttcccgaacggcttaacatgaaaaaagaagcaatagccagcatcaccccaatccattggtagagattcagcctttcgccaaataccaacatcgctccgataagcaccattaccggacgagtagcattgataggtcccacgatagtgataggaaggtgtttcatcccaaaatacccgaatatccatgaggataacacgatgaatgacttgataatgatatatttatgctgttcccaaccagcaacaggaacattaaatattgttcctcccaacaaatccggctcatacacggacagcaagatgaaaggcagaaagacaagactggaaaagaaagtattcaaaaacaaaacgggaagcactgcattatctttcagcgactgtttcttgaatacatcataaaagcccagcaaagtggctgagagaaaagctaataataaccacataaaagattgttataagttattagttatataaacaaggtttccggatattccacattgaccaagaacaaggcttgtcccggagcagatgtcccggccttgcaacgatcctgctgctcgattattcttcggaaatcttcaacagaaagttttccacgtcccacttcaatcagtgtacctactatggcacgcaccatatttcgcaagaagcgatcggcacgaatggtaaacacccaagtagcttcatcatccgtcacttttgtccattcggcatgagtgatatggcagatgttggtttttacatccgtatgcagcttgctgaaacttgtaaagtcgctatattcaaaaagggtacgtgcagcctcgttcatccgttcataatccagcgaactataaatccgccaacgatattgccggttgaaaggatacttcactgctgtcacataatatttgtaagtccttgctgttgcatcaaaacgggcatgagcttccggttttacacggcaaacccgataaacagaaatatccggaggtaacaaacgattcaatttttcagcaacagaaactgtatctaatagtccgtcataatcgaaatgagccaccattaaagaagcatgtactccggcgtctgttctacccgcccccactacctctatctcgcaacgtagaaaagtggataacgctttcaccagacattcctgcacactaatcccattcggttgaatctgccaaccgtgatagttggttccgtcataagccaaataaatgaaatacctttgcactctaattcctgtttttagggttttcgtgtgcaaaagtactcatttttttattcataagtagaaggagtagtaccaaaagcgtctacaaaatgtttacggaacgtcggaatatcattatatcccaccatttcagctacttcctgcacaccgtattgtttcgttttcaacaatacacccgcacgacgcatacgtactcccctgataagttctataatcgtatagtccgtactttgcttcacttttcggtaaagagtcggctgactcatatttaattccgatgcaagcttcttcacactaaagtcagcttcacagatattttcctctacaattttaattacggaagtgataaatggatcttctgcctttgcttcttcttttcccggctgctctgtttcatctgcgtcaacggcatctgctccaggtaacttaaataactttgcatacatttgtttcaacgtctgacggccattaatcaaattactgactttcgctttcagaataccgggtgtgaaaggtttcaacacataatcatctgctcccaactccaaaccatggataatatcgtcatcctctaccttcgctgtcagcataataaaagggatactacaagtttccgggcattcttttacttcacggcaacattcaaatccgtcttttatcggcatcatgacatcacaaattatcaaatccggcaactctttcatagccatatccacgccttcttgaccgttagtagccatcaacagattatattcattcccaaataaaactttcagataaagccgaatatctttatgatcttccacaattaatattgtctttttctcttcatttgtcacagattgtgccatttctttaggagacaatactcccggaaaaagtattggaccctgtctccctatattttcgctaattttcgaatcagctttgagttgatccaacacttccggttctacttcaggcagttcttccggatcaataaacaatatattcggctcactttccaggacggctctatctaccggaagattcaccgttacctttgtcccctttccttcaacactttccaatgagattgttccttgatgcgcctctatcatctgccgcataatagaaaagcctaactgtgcggcagataaatcattatccaatgtcccgttctcactcattaattgctcggaagttctcaccttcttcattccattatcctctactatcagactgacataatgcacattattctctattatttcacaaacagaaaaataaactgttcctgcataatgcgtatgagtgaaagcatttgtcaacagattatgaataataaattctattttcttcttatttacatagaattccagttctttcttgacccttttctcgcaacgaaaatcaatcggatatactttcaacaaatcacggactccaaagacactactatcaatcatcttttctaccgaatagggagctacttccaacttcgtttccggactcccctgtcggtatatagccagtaattgatcacaagcatcaaccatacgaagcgaattccggtatgcaacctgcaaagaaaggttcgatatttgggaattgtctttctgtaattctttcaacggagcgatgatcaacgaaagaggagtacgcaattcctgtacaaacaacataagcaagccgttccgcaaagcttctatctccttcttttgagtctgcttcatcttctccaggctcaagttctctttcaataccaactcccggtcacggtgcatctgcttacgctgctctttcttcttaaaataaatgtagaaaaaacaagaaaatgcgacaaataacaaaacataagctatataagcccaaatagtttgaaaccatttatcttttacaaccacaagaatctcattcacatccccttccttaccatccggaaatacaagtttcgcctgcaaagtatattttccggcagacagtccattaaaccataagccttccgaaagtggcaccattctccaatccttatctaagggaagtaatcgataagctatcttacgttcagccatcccataacgtaaatcggaaaagaacaaatggaaatcattgttatcagaattgaatacaagctttttctgttgttccggagaacctgaaagaatcacctgtccattccgtttctccccagccaagatcgtttctccacccacttctatatctgtcaacatcagctgccttctttcacaatccgctttcgtagcagagggatcaaagaaaatcaatccccaagaatttgcccaaagcaaccgtccatcattcaaacggcataccgcactacaattacctaccgaaagataattatagaaagcatcctgcccatttctaatcgtcatcactccgacattatttccggcccaagtattcccgatacgatcatctaccatacagcctacatgtccattggtcagtccgttttgcaaggtgtatatagcttccaacttatccttctcccttccatcaatacggataacaacattcaaataagctgcataaatctgattatagttatttacataaatagttcgtacagccgcctcttccagtccattttctctctcaatatttccttctactctaatttgtactccatccgtttcaagtcttttcaaacctctatccgtcccaatccacacattgccttctttatcctctgctattgcaaatacattctttatttcttcaggcaatttaatgctcttgcattcgtgagtttcaagttcaacctgcatcaacccatttgaagtgcctacccacaaacgattccatgagtccaggcaaagactataaataacagtttgtatcctctcacctttattattttgcagatgaaaggactccacctcatttgttaatggatcaatgataacaatctctccccaattattacctaaccagatattcccgttcttacctttatatatatatgaaagcgtccggaaaagtctgatgcttttttccaaggttcaaaatgtgtatccaacgaaaacacaggagtagtacttttcataatccccccatcgctaacggtcaaccatacatatccttttgaatcttcgaccataccatccacccgagagccaaaatcctgccgtaccctactgtacatactatcactaatatcaaatttcacgaccccaccgccaaatgtacctacccaaagaatttgttgtttatcatcccaaaacaggctggtcattttattttcaatactcgaatggaatgccttctcattcttcgtcagcaaagtcaacacaaacggactcttacacagattgtcattatcgaaacgcaacttatacaatccattccaagttgtcaaataaaaagtccgattatctttcaaaaccagctccgtaacataagaattagagaattcagactgatcttttccttccatggagataacacgttcctcattcgttttaaggtcataacatataatgtcatcccataatcggcaaatccataaataaccatgccttaaaaacaatctatttactacgctgtattccttaatcaaagaagtttttttcgccactaaatcatagtgtaccactttcctctgattaacagagaaatacaaatttgtttttccatcactacaaagatgagcaacctttcctcttaccacaggctcaggattcaaaagacataacacaaaatcatgttttccttctgtcttgcgaacaatgcgcgattcaaataaaccttgtgaagtaaccaaatacaaactcccgtcattccagcagaaatccagaatatctttcagttccagaggcttatcaaaacgtaccggcaaaaacttttcaatatccttatcaaaacaagtaattccaccttggaaaagtaacgcataatataaaccgtcgggaccttcgcaaagttttttcacagcttgatgcagaggagtggaaagagaatcaatccccataatgaggggatagtcacgaaatctaaatccgtcataacgtgaaattcctttatcagtagagagccatataaaaccgtcacttccataacaaacattataaatagtattgtcactgactccgtttttgattactaccggttccagattccaatgagtatctattgaatatgcagggaaaatacctgacaataccagtagtaaaaagaagaatttcctcatatcttaatagtattttgttcatgtgtattggtcgataaaggtagacaaaataattatcatcaaatcacataacaaatattttttagaaataattcacaataaaacaaaagccctcctattcttttgaaatagaaagacttttgccgtttgttttgttcattacgcaatcaatctccaattattatattgtttgctgcttggttcctcttttttattcaaaggagcgactcatatcatacagacactccttaataatatatattatactaatacctaaatgcaataaattcttatgatattatttagcagctttcagagtaaagctataagttccttgaccggcagcaaagttatagctacctgtgaagtttaccggtacctttactacacagttcccctggtcgcttacacggaaataaagataagtagtagaattgaagatgctgttaccgtcagcagttgttgataaagaagcgccatatccctgccaactgaataagtcagtcgaagaagagtaagtagtaccgatataatacaccgcacctttatctatattaaagttcaatgatacacataatgcgaattgctcaacgaaagcgccacttcttgtacgagcctgatattcggcaagcattttcaccgctttcttatcagtagcatcaccataaaatccttctgttgtttccgattcacagttacggacagtattaccattctgacgaagcgcttccagcacacttgccatttcctctgcagtaacagaaggaatttcctcagctttctgatcgtaagctgccgactcaataccatataaagatttcatggattcgaagtttgaagtattatcttcaaaactgtcactttcagcattagaacatgctacaaaagttaatgccaatacacatgcgaaaaagaatttaattgatttcatattagttcctcctaaattttacttattcatttaatctgcttgcgaatcgttatttatcagttcgcggtctttttacacttttaattgtttatttattcatgttccttaggaggggaatcttaaacttaagttgtcttatttatctttccttgttcgtttgcacatcgcaaacataggtattttattcaacaaggaaaactttctgaaaagaaaaatgaatgaattaccactctttaacgaatgaaatacagcttactcaagcgattgactaagttctacaagtattaaaacaccacccacatgcaaatcattcatcacaaaagacaaaaacaccaattaacaacaacgaatgatcaaccacccataaatgaattattcaccaccctacttatcaatttccattgaagacaaaggcaagaaagatgaatctgccaatcaacagctatctgcattatgcctacttttgtaacatcaacaaacaaaacccatcatgcgatgaaaaagaaaagaatcttatttttgttcgttaccctgtttgcttccaccttattatatagtcaggtagtcggagtaaaaaccaacgtcgtaatggacgcgcttaaaattatcaatcttggagccgaagtcggtttaagtaagaaattaactctggacttgtatgccaactacaacccttggacatacaaagatcagaagatgatgaagatgcttgccttccaaccggagcttcgatattggttctgtgataaattcaacggtcatttcgtaggtgcacaccttcatggaggcgtttatcaggcagcagccattgatatgccatggggcatctggcccgaattgaaagaccaccgtttcaaaggacatttttacggattgggcgtttcctacggttatcaatggattctgggcaagcactggaatcttgaaggaaatatcggtataggttacgcgcgtgtcaagtatgagcagttcgaatgcaagacgtgcggtgaaaaagtcaaggaaggacataagaactatgtaggtcctacaaaagccgccgtcagtttaatctatttattttaaaacaaaacaaatatgaaaaagatattatgcatattcttctgcctgctgcctatattaggcgggaaagcacagactctctataaagatcaagtgcgtatagagaaagaatctatcacacgcagtgaagataacaatgtattaactatcaatctggacattgttctgaaagaaaacctgaaactggaatccaacaatgtagccacattgactccatttcttgaggcaaacggaaagaccaaggtgttatcttctattgtggtatacggacgtaagcgcgacatcgtcaaccagcgtaaccataaagctcccgaaaacacttataccattttacgtcgtaaacagcatcaggaacaaaaagtaaactacttggtacaaatgccgttcgaagcatggatgcgcaatgcaaatatgaaattgaatattgacctatgcggttgctgtgacatcctggaggagaacagcggtgaattaatcacccaattgaacattttaccactgaaagtaaaaccttccatagcctatatcactcctaaagctgaagacataaaatatcgtgcagtagaaggaagcgcatttctggatttcccggtcaacaaaatcatcatctatccggagtatcgtcgtaacacaagtgagttggcaaaaatacgtgcaacaatcgataccgtgcgcaacgacaaatatacaactcttacccgtataaagattcacggttacgcttcacccgaaggcagctacgccaacaatacccgtttggcaaagaatcgtacccaggctcttgtagattatgtgaccagttattacaatttcgataagaagctcatcacttcggaatataccccggaggactggaaaggtttccgcaaatttgtttccgcttcatcaatagagaaaaaggaggaagttcttcgcctgatagatgatgaaagcataaacattgataagaaggaacgcgatatcgctaatctggttggacctcagacatatcaatatatattggcagaatgttatcctgcactccgtcattcagattatacggtcaattatacagttcgtggcctcagccttgaagagtctaaagagataattaataaacgcccgcaattattgagtttacaggaaatctaccggattgcagaaagttgtgaaccgggaagcgaagaattcaaccattctttccaagtagccgctacaatgtttccggatgatccaatcgccaacctcaatgccggagcaatggaaatacaaaaaggtggtgatatgacaaccgccaagagatatctggctaaagctgatccaaaagcggcagagacacagaacaacctgggaattatcgctatgatagaaggagacttagacacagccgaaaaatatttcaatgcagctaaagctgccggtctcataaagcaagcagacgctaacttgaaagaattaaagaagaaacaaaattatcccttagaataacaaaaaacaataacacagacaaacagtatttgttcccccctatgatttataattaaaattttaaccccaaatcaagaaacgcatcacctgagaaggcagtgcgttttttcttatctatcaagtaacggctcacattattttcctggggatttaatatattatttcagtttgccaatttgagggggttatttcaaagcagccgcatccgaaatattagtctccgctactacagatccgaactttttcaacacggtcacaaaccagctatttgactaatacacagcgaaatacgtttcattaaattctcaaacaattctcaccgttgtgagaaaaaatactcatcactatgagaaaatattctcaccttgataagaattaatcctcactaaggtgagaaagtattcttgtaacgatgagatcatccacctgttccacgtaatgcagtctgctatgaacacggcaacagcagcagtaaatcattcaaaacagaatgaaaaagacacaaatcattccatcccgcctaaatagttgcaaaatttattctattgcgcaaaataagttgaagaaaacatataatacaaacagtggaaaaagaaaaggaaaggcggtataatattcatctcctcaacaaatcattcacaaaatgactaattcccccaccccaaaagtgacatttgaaagattgaaaaattcaccttgaaaattgaaaaaaacaccaatcaacagttttacatttctcccgtaactttgcaatgtcgataaggaacaaaaagattccttaaaacaaacaaaacaaaaatttagtaataaacaaataaaagaaacattgcctataagaaacaaacaaaatccctccaactggaagttagttatttcaccttataatatataagggcttccgatcagaaaaagaaatgatgtttttcacaaaacaaatgctcctcatcttttagatgactcttacccccaaaaaagaaaaagaaatcagcataactactaataatatgtagtgtgcaactaaagaaaagaaaaaaattatagcatcacacattaaactcaaaacaaagatgaaagttagaaatttattattagcaagtctagcagtagctgccatgacagcttgtagcaacgagaatgacgaattcgtaaacaatggtaatcaaaccggtgaaaagaatgcgattatggaatttggtatcgcatttcctagtttaacccgcgccacagaaactggattgtctgcagaacaggacttccaaagcgcaactgttattattagttatgaaagcggaggaaaagatgtgaccattattcctagaattaagttcgaagaatcgactcccaatgtattgtataccaaagacaaaatcacggtacagccaggaaatgctactgtagatgttgtgcttaacccgacatcagcaattgaagctgctttaaccggggatggctggttcaccagcatttataacacatccacatataatgctggcgaaatcactggaatcgacgatatcactggcaaaaacaatttcttgatgagtagtgacggcaagacaaaagttaaatttgtagcagaacaagaagtccctgctttagtaaaagtcagtcgagtagctgctaaactggaagaaacaactccaaccaataatgcttttgatgttaccaatagcagcgaaggaacagctatgaaagatccggctggaaatgctatcaaggtggaaatttccataagcaactattcatatgctaatttgcaaacgacttcgtatgtattcccacagacaaatgccatcaccccagctttgttccaagaatatacattaggttcgtttgcttacaagcctattactggtataacgactcaaaacgaagaagaatttggttctatcgtatactgtctcgaaaactatggagaaaatcacacaatggcgatatataaagctacagctactatcaatgatgaagccaaaacattctgggtagacagagacaatgtattgtaccaatctatcaatgaattaaaagcagtatatacagacattgaagcaacgacctctattgcagattgttggagtaagtacggtgtcagaaaatatgaagaaggtgtatgctactacaaagcagacatcctaagtaatggcaaagccgagattgttcgtaacaacgtttataaattaaaagttacaggcatagcaaagctaggattaccggaaccaaaagacgaacccaagctggcaacattgaaactctcagttgaagttgaaccatggactattcaaacaaataattttgaattcaaataatttccaaagataaaaagttgcaagagggagagaaggagattcctcctctccccccttatctatttctacatctctcgcgcttcaccaaaagaagattaatcaaacaaaacataagcgttccaaaagcataaaaacagaaacaatgataagcatattaactgacatacaaaaaaaagcaaacaagatattgctattcacaacattggttggtacaatgactgcttgcgattccgtacttgatttcgatgaaggcgattgcagtatcgaatacggcgtaacattcaagtacgactacaatataaaaaatgtggacgcgttcgctcaagaggtgaaaaacataacgctttatgcttttaatgacaacaataatctcgtagccatgaaagcggaatcaggagatatgttggcaacaggcgaatatgccatgacaatggatatcgatcccgaaaaatatcacctcatagcatgggcaggactggacgatgaatcatttgctgttcccttgcttactcccggcaaggctaatattacagaccttaacgtcaaaacgatacgcaacagtgtggtagtccctactaaacagggtagatcagaaggagataaagacaagtttattgtagaacatgaactctcctcattatggcacggagaattaaagaaaggcccctctacccgtagtggaagaaagcgcttcacagaagtcagtttaataaaaaacacaaacaatatacgcattgctttggtgcaagtaaaacaaaacgaaaatgcaacaatcacacgtgctatcaataaaaacgaattaaaattcaatatatacgacgataacggatttatgaattatgacaatacgctattggacgatgatatgttgacttataaaccatttatgactgaacaaaaaacagttgctactagggcattcaacgtggtagacactgaatatcctgctgtcattgcagaattgagcgtagcacgactcatgaaggacaaaaatcccgaattaagtatcatagatacgaaaacaaataaaaatatcctaaaaaccggagatttgatcgggtatcttaacctgttgagaacagagaaatacgcagatatgccgttacaagaatacctagacagagaagacaactatagtatgcttgtctttgtagacgaaaacctaacattaatcaatacagtcatcgagatcaatgattgggttatccaattaaacgactttgacttgtaagagaagttttaaaacaaaacaacccattagccatgatacgaaaaaacgatatatacagttggttgtccatattagcaatgcttcctatggtgttgacagcgtgtttggaagaggataattataaacaatgtcccaaccaaactgataaaattcaacttacaataagcctaccggagcagacacgcatcgctacaaacacccgtgcggtaagtaaccgtgttgattattctattgttaataatttaaatattgtattagctagtggaaatgatataactaagatctattattttgatgaaagtggtttgactcccaacgatgaccgtgttatcatgaccagaaactctttaccaatgagacccgaagaaggagacaataaaaggtatatcacgatcagaggagaagaaggagatttcgaccaagttactgaaatatatgcaattgctaattataacaattctatcacgataaaaaccattgatgcactcaagcaattaaaacaaacagctgcagacgggcagcccaatcgagcaaacgattgtatgatgttcggctccactaaacaattaacaaacgggacactttcattaaagcgtactcttgctatgttttcagtaaagatagatggcagcgaactgaaagatgacgttagaatcactccaaaaagaatgagtttgcacaatgtccccaaat

SEQ ID NO: 2988 - DNA, 93340 bp, Unknown
  gut microbiota DNA sequence
tagaatcactccaaaaagaatgagtttgcacaatgtccccaaatcttgtttcatcggaaacgataataaaataagccattcggatggatttgtttcattaggccaaacgatcgacttggcaaatgccgaaggttggggagccctaacaaatacaaccgaatttgtaggaggacatgaactagaaccggggactatccccatgtttatgtttgaaaatcttcaaggaaccaatgaaaacatcgcaataggtgaccaaagaaacaaacatcctaaagaatacacaggcaatacgcctgctgatttacaatcatttttagatggtaacaatgggaataagtattcatatattttagttgaagctgaatattattatcaagaccccaacaactcaaacaaaggggttcagggaagtatcgcataccgttttctattaggcgacaatgcatacaatgactttaatataaaaaggaataactattatcaagttacgctaactttaaaaggtaatggtggcgctaatgaagatggaaaagaagatgccaatggaaatctagtagtcaacaaagaagatcttagttggcgcgtagatatgaatattcaagactggggattcgtaaaagacgattttgatttcgattgccatgcaacacacgggtatttagaagtagtgggtgataacaattggaaaatcagtgctggtccagccagtggtcagtcatgggttaagttttactctgagacagaaggtagatgggtagaacctactgaatacggtgagtgcggtcagaatggaagaatagaatactatgttcaaacatggtctctatatgcgacaggcttcactggaacagaagacatatcaagagaaatcacattaacaattaaatccaaagaaactggcgagactcagacagtcaccatgaagcaatggactcctataaaaatcgccaataaagtatgggttgaacgtttcgaagaggaagacaatttagcttggggatatatggataatgatatgagtggaacagttactcaatctaatccttatttcaatacaacgttcaatttcggagaaagtacaacccagcatggactttataatacatggttcatgtactttaaagagaatgaaacatccccggttcaaacatattgttataggaaatccggtcgcgatttaccacacggagctccgacaagtacttctgatgactattgtctaccagatgcagagaccatgaaaactatcatgaattttaagtatacaggaaataatccgttccaaccgcttcggactgataaagattactggaccggttctgtagatagtaatagtaaacaaagtacttactatctggactccgctacgaaaactcttaaaacgactcaagacagaaatgccactaaaagagccagagcgatatatgtaactccctattaatttaatacaccatattatgacaccgaaagacatcctacaactagaatcaacagatatacgccaagcgtatctgtttgaagaaaacgggcactggtatgcatacgaacattcagccaaccggatagagaaattcgtgaagggttttgtagactttaaacacaaagtgcaagatgtctgcggtagaataaaaatagagatcgatctcaacgtcctggaaaaatgctccgttacgctgtgtgaagactcactgcttatactcgactgtcctacggcatagaagccgtcaaagagtataagcttcataactagatataaaagaattacacagaaattgtttgttttgtttgtgttcctcagtccactcagaggcagcttgtgaaagtagcgctgagtgggtggggattttttttatgaattatctttgtttatctcccataaacccgtatatttgaggtattataactagagactttatattaatacagaattactatgagccataccttttttctcattatcgctcttgtcacaacgggaatctttctcatccaattcgtattatctatctttttcggagatctggatgcagatgtagacgtagatactgacatcagcagtgtggtttcctttaaaggacttacccacttcggaatcggattcggctggtatatgtatctggcgggaaacacggaaatccaaagttacgttgtcggtattctggtagggttattctttgtttttgccgtctggtttctgtataagaaagcctaccaactgcaacaagtcaaccgcacggaacagacagaccagcttgtgggacgtgaatgtaccatctatttcaaacaaagcgacagcaaatacaccgtacaaaccaaccgtgacggagcaatgcgcgaagtagacgtcatctccgaatcgggaaaagcttatcaaaccggagaccgtaccgttatcaccagatatcaggacggaacattgtatattcaataattattctaaatacacaaatttatgacacaagaaatgctaatcatggccgctatattagtagcggttatcctgctcactttcatcggtatcctttcacgctaccgcaaatgtaagagtgacgaagtcctcgttgtatatggtaagacgggaggagaaaagaaatctgctaaattataccacggtggtgctgcattcgtctggccgattatccaaggctacgaatttctgtcaatgaagccgatgcagatcgactgcaaactgacaggcgcactttccgcacaaaatatccgtgtagatgttccgactacaatcactgttgctatcagcaccgatgccgaagtcatgcaaaacgccgccgaacgtatgctgggattgaccatggacgacaaacagaatctgattacagatgtcgtttacggtcagatgcgtctagtcatagccgacatgacaatcgaagaactgaactccgaccgcgataaattcctttctaaggtaaaagacaatatcgacacggaactccgcaaattcggtttgtatctgatgaatatcaacatcagtgatatccgcgatgctgccaactacatcgtgaacctgggtaaggaagccgagagcaaggcccagaacgaagcacaagctaatatcgaagaacaggaaaaactcggtgctatcaaaatcgcgactcaaatcaaggaacgtgaaacgaaggttgcagaaacccgcaaagaccaggatatcgccattgcagaaaccaagaaattgcaggagatatctgttgccaatgcagacaaggacagaatttcccaagtagcgattgccaacgcagagaaagaagcgcaggttgccaaagccgaagcggagaaaaacatccgcatcgaacaggcaaataccgaaaaggaaagccgcatcgccgaactgaactccgacatggaaatcaaacaagcggaagccggtaagaaggctgctatcggacgaaatgaagcacaaaaggaagtcgctctctcaaactccgaactagccgtgacacaagccaacgctgacaaacaagccggtgaagctgctgccagatcggaagctgccgtacaagctgcccgcgaaattgctcagaaagaagtggaagaagcgaaagccaaaaaagtggaatcttcactgaaagcagaaaaaattgttcctgccgaaattgcccggcaagaagctatcctgcaggcgaatgctatcgcagagaagattacccgcgaagcagaggcccgcgcaaaagcgactctggcacaggcggaagcggaagccagagcgatccagttaaaattggaagcagaagcggaaggtaagaaaaagtcattgctcgccgaagcagaaggtttcgaagcaatggtaagagcagccgaatcaaatccggctatcgctatccaatacaagatggtagaccagtggaaggaaattgccggcgaacaggtgaaggcattcgaacacatgaacttaggaaacatcactgtattcgacggaggaaacgggagtacaagcaactttctgaatacattagtgaaaacggttgctcctagtctcggcgtattggataaactgcctatcggtgaaactgtaaagggaattattcatccggaaaacaaaacggaagaaaaaactgaggagaaaaaagaggaaaagaagaaataatccctaatctctactaaaagagagaggaaacaaccataacttctctaccataagtttgaaaagtatgaaggtatctgcaacaaaatagttgcagataccttcatacttttcaactttatagtagaggaacgaaaaaatcaaatagaatccatttggtaaactagaacaaaatagtgtatatttgcaagcaaaaaatacaaaatggccatacataaacttcgtattttaccgatcttcctactaattacagggcttacgcttacttccggttgcaaaaagaaagatatgtcgctcagactaaacgaaccacgcaatattcgtggcgttgtcagctacaaacgctctttccccgatttgaatgacaaacatctggaagtagcaaaagctgttggtatccgtccgttggaggaccgggaagaagcggaaagcatgaaagaaaagttgacacatatcactgataatgagttctatgtggtagattcgctgacccattccatcccctacctcgtccctcgtgcaagtgcgttactcgacactatcggttctaattttctcgattcacttgctgccaaaggattaaatcccaatcaggtgattgtcacttccgtattgcgtacccaaagcgacgtgaaacgtctgcgtcgcagaaacgggaacgcttccgccaactcggcgcattgcttcggagctactttcgatgttagctggaaacggttcaagaaggtggaggacgaggatggaagacccttacaggatgtcggctccgataccctgaaacttgttctgtccgaagttctgagagatttgcgacaagccgaaaaatgctacatcaagtatgagctgaaacagggttgtttccatattactgcccggtaaagaaaagatgagtataaattgcaataaaattcatccccaaacaatcagagaatccaaaacgtttcattaaatttgcagaaatttttctttaatacgattgaatgatagagaaactgattgtccttgaggatattgatccggttattttttatggcgtaaacaacgctaacatacagttaataaaagctttatatccgaagctacgtatcgttgcacgcggcaatgtcatcaaagtgctgggcgatgaggaagaaatgtgtgccttcgaagaaaatatcaccaaactggagaaatactgcgccgaatataattcactaaaagaagaagttatcatcgacatcatcaaagggaatgccccgcaagcagaacagaacggaaacgtaattgtgttcagcgtcaccggaaagccgatcattccccggagcgagaaccaactgaaactggtggaaggcttcgccaagaatgatatggtattcgctatcggcccggccggttcgggaaagacatataccgccattgcccttgccgtacgcgcactgaagaataaggaaatcaagaaaatcatcctcagccgccccgccgtagaagccggcgaaaaactcggtttcctgcccggtgacatgaaagataagatagacccgtatctgcaaccgttgtacgatgccttgcaggatatgatacccgccgccaagttaaaggaatacatggagctgaacattatacagattgctccgttagcctttatgcgcggacgcacgctgaatgacgcagtcgtgatcctggatgaagcgcaaaataccactgcacaacaaatcaaaatgttccttacccgcatggggatgaataccaaaatgattgtgacgggagatatgacgcagatcgaccttcccgcctcacaaacatcgggattggtacaggcactccgtatcctgaaaggggtaaaaggcatcagtttcgttgagctgaacaagaaagatattgtgcgccataagttagtggaacgcatcgtagacgcttacgagaaattcgacaaggaagcgaaagccgaacgggagaaacggaaaaacgagcaactcgtcatcaacgggaacgcccggtgaaactggcaaaagactgatagactcaaaatccggaagcctattgcaacttataaattggaacttgtaatttgtaattatagataaaacaatgaaagcattaacaaaaacagatttcaactttccgggacagaaaagcgtgtaccacggaaaagtgcgcgatgtgtacaacatcaacggcgaaaaactcgtcatggtagcaaccgaccgtatttcggcttttgacgtagtactgcctgaaggtattccttacaaaggacaaatgctgaaccagattgcagctaaattcctcgatgccactactgacatctgtccgaactggaaactggctactccagaccccatggttaccgttggagtattgtgcgaaggttttccggtagaaatgattgtacgcggttatctgtgcggtagcgcatggcgtgcttacaaaagcggcgtacgcgaaatttgcggtgtgaaactaccggacggaatgcgcgagaaccagaaattcccggaaccgatcgttaccccgacgacgaaagcagaaatgggacttcatgacgaagacatctctaaagaagaaatcctgaaacaaggactggctactcccgaagaatacgaaattctcgaaaaatatacgctggctctcttcaaacgcggaactgaaatcgcagcagaacgcggactgatccttgtagatactaaatacgaattcggcaagcacaacggcacaatctaccttatggacgaaatccatactccggactccagccgttatttctacgctgaaggttatcaggagcgtttcgaaaaaggtgaggcccagaaacaactttccaaagaattcgtccgcgaatggttaatggaaaatggcttccagggtaaagacggtcagaaagtaccggaaatgactccggctatcgtacaaagcatcagcgaccgttacatcgaattgttcgaaaacatcaccggtgagaaatttgtgaaagaagataccagcaacatcgctgaacgtatcgaaaagaacgtaatggatttcttgacaaaataagaatggactacccacaacaacatatcaagccttacaacgaggaaggcaaaaagaccgagcaggtggaacgtatgttcgataatatcgcacatgcttacgacaaactgaaccataccttgtctttaggtatcgaccgcagctggcgtcgcaaagccattgcctggctccgtcctttccatccgcaacgtatgatggatgtggctactggtacgggggatttcgctatccttgcctgccgcaaactgcaacctgccgaactgatcggcacggacatctcggaaggcatgatgaacgtgggtcgtgaaaaagtaaagaaggaaggactctcggacaaaatttcttttgcccgggaggactgtacttcactctcttttgccgataatgactttgacgctattaccgttgccttcggtatccgcaacttcgaagatctcgacaaagggctctccgaaatgtgccgtgtactgaaaccgggcggacatctcgttatcctggagctgactactccggaccgtttcccgatgaagcaattattttccatttattccaaagccgtcattccgttattaggcaaacttctctccaaagacaacagcgcataccgttatctgccggacacaatcaaagtctttccgcaaagagaaataatgaaaggtgtcatctcacgagccggattcagcgaagtaaacttccggcggctgacatttggtatctgcacgctttacaccgcgacaaaataatgagttattatgaatggttaatttaattctttcgtgttatggaaaaatatggtttaatcggctaccctctaagacattcattctccatcggatactttaacgagaagttcaaatccgaaggtatcaacgcagaatatgtgaacttcgagattcctcaaatcaatgattttatggaagttatcgaggagaatcccaatttgcgaggtctcaatgtcactatcccttacaaagagcaggtgatccccttcctgaacgagcttgatccggataccgcaaaaataggtgctgtcaatgtaatcaagattatccgccaacagaaaggaaaagttaaactgatcggctataactccgacatcataggatttacccagtccattcaaccgttattacaggctcatcacaagaaagcgttaattctgggaaccggcggtgcttccaaagctgtctaccacggactcaaaaacctgggaatcgaaagtgttttcgtttcgcgtactcacaaagcggacggaatgcttacttacgaggagctgactcctgaaattatggccgaatatacagttattgtcaactgtactcccgtaggtatgtttcccaaagtagatttctgcccgaatatcccctatgagctattgactccaaaccatttgctctacgatttgttatataatccgaacgtcaccctcttcatgaaaaaaggagaagcacaaggcgctgttgtcaaaaacggcctggaaatgctgctgcttcaggcatttgccgcctgggaaatctggaaccggtagccggcggaatgtctctcccgagttctcatgcggaaggtaaataacaggacgtgatttcctgacagacaaagagattatttataaattgggataagttatgagaaagagaattatttatgtcattatcattgtcgtgctgctgttgaccggttgcacaatcggcgggagtttctatatgttgaatttctctctgaccccggatgccaagatattgtctaaagatgctgactcttatccctatatgtacagaaactatccattcctccgcccatgggtggatagtttgcgccaagcggacgcactcaaagatacttttattatcaatccgcacggtatccagcttcatgcatattatgttgccgcccctaaaccgaccgacaagacggcagtgatcgttcacggatatacggataacgccattcgtatgtttatgatcgggtatttgtacaaccgtgatttgggctataacattctgctccccgaccttcaacatcagggcgagagcgaagggcgtgccattcaaatggggtggaaagaccgttttgacgtactccaatggatgaacattgccaacaagatttttggagacagcactcaaatggcggtgcacggtatttcaatgggaggtgcgaccaccatgatggtgtccggtgaggaacagcagccttttgtcaaatgctttgtggaagattgcggctataccagcgtatgggatgagttctcgcatgaactgaaatcttccttctttcttcctcctttcccactgatgtataccacaagctggctatgtgagaaaaaatacgggtggaacttcaaagaggcttcctcattgaagcaggtggcgaaatgcaagttaccgatgttgtttatccatggagacaaagacacgtatgtgcccacctggatggtgtacccgctttatgaagcaaaaccagagcctaaagaactttggattgtatcgggggctgctcatgccgtttcataccaggagaataaacaggagtacaccgataaagtccgtgacttcgtcgggcgatacattcattaaacctattataacaaagagttttaaaaccataacagaaaaagtttctatctttgcaaatgtaaaacaactgttatgaaatcaatattcacatttataattgccgcctttttactgtttcctctgcaagctcaggagaaagtatacacggtagataatcttcccaaagtccacctgcaaaacaagatgcaatatgtttgtaatccggcgggaatactgtcgcaagcggcttgtgacagcatagatgccatgctatatgcattggaacagcagacgggcattgaaacggtggttgccgtagttccctctatcggggagacagactgtttcgacttttgccaccaactgctgaataaatggggtgtaggaaagaaagataaaaacaatggtctggttattttattagttaccgaccaacgttgtattcaattttataccggctacggcttggaaggtgtgcttccggatgcaatctgcaaaaggattcaaacgaaatatatgattccttatctgaaagatgggaactgggacgcaggaatggtggcaggtttgaaagcaacttgtcaacggctcgacggttctatggagaatgattctctggcagaatccggagatggaggttcatttgatttcttcctcgctcttttctgcttcttcgctatcggcgggggactcgccttttttgcagcacggaaacaaagccgttgcccgaattgcgggaaacaccaattacaaagaagcggaagcaggcttgtttcccgaatcaacggagtgaagaccgaagatattacttatacgtgcaggaactgcggacatacgctcgtgcgtcgccaccaaagttatgacaatgattatcaccatcggggtggcggcggaggaggtccgtttatcggtggcttcggaggaggtcgaggcttcggaggaggcggaggttttagcggcggcagcttcggaggaggaatgggcggaggcggcggtgccggctcccggttctaaaactagaaacaatcagattatcaatttcaataaaaaaacaagaaacatgaaaaagtcaattatcatcatcttagccgttgtggctatccttgttatatgggcagtaagtgtatataacggtctggttactatggacgagaatgttaccggtcaatgggcaaatgtagaaactcaataccaacgtcgtgcagacttgattccgaatctggtaaataccgtaaaaggatatgcaacgcacgaaaaagagactttggaaggagttgtcgcagcacgcagccaagcgacccaaatcaaagtggatgccgaagacctgactccggagaagctggcagaatatcagaaagcacagggtgccgtaacttcagcactaggtaagttgctggctatcacggaaaactatcccgacctgaaggccaaccagaacttccttgagctgcaagcccaactggaaggaacggaaaaccgtatcaacgtagcacgcaaaaacttcaacgatgctgcacaagcttacaacaccaatatccgccgcttcccgaaaaatatctttgcaggtatgttcggtttcgataagaaagcatattttgaagcggaagaaggaagtgaaaaagctccgaaagtagagttctagagataagcaacggcatttctaataagatagttggctgtacgaaaaaaaagcagtacttttgcagccgtatacaaaataattctataactcatgagtaatcaacgatacatgatgcgtggcgtaagcgcatcaaaagaagatgtgcacaacgccatcaagaacatcgacaaaggaattttcccgaaagctttctgcaaaatcatcccggacatattgggaggtgaccctgactattgtaacatcatgcatgccgacggtgcaggaacaaaatcatcccttgcttatatgtactggaaagaaacaggcgacctgtctgtctggaaaggtattgcacaagacgccctgattatgaatatcgacgacttgctctgtgtaggtgccgtagacaacatcctcgtttcttccactatcggacgtaacaaactcttgattccgggagaagtgatctctgcaatcatcaacggaacagacgaactgctggccgaacttcgcgaaatgggtgtaggcgtatatgctaccggtggcgaaactgctgatgtcggtgatctggtacgcacaattatcgttgactctaccgtgacttgccgcatgaaacgctcggacgttatcaataatgccaacattcgcccgggtgacgttattgtaggattggcctcttacggacaggctacttatgaaaaagaatacaatggcggtatgggtagcaacggtcttacaagtgcccgccatgacgtattcggcaaatatctcgcagagaaatatccggaaagttacgatgcggcagtacccgaagaactggtttattccggcggactgaaactgactgacagcgtggaaggttctccgattgatgcgggcaagctagtgctctctcctacccgtacgtatgctccggtggtgaagaaactgttggatgcactccgctccgaaattcatggtatggttcactgctccggcggtgcgcaaaccaaagtgctgcatttcgtagaaaatgtacgtgttgtgaaggataatctgttccccgttcctccgttgttcaagactatacaggaacagagcggcacggactgggcagaaatgtacaaagtattcaatatggggcaccgtctcgaagtttacctgtcaccggaacatgccgaagaggtgattgctatttccgaatctttcggtatccccgcacagattgtaggacgtatcgaagcgtgtgaacagacagaattaatcattaagagcgaattcggagaattcagatactaaagaatggcagataacagtaccatattagagaaattagacggacttgtagcccgttttgaagaaatatctacccttatcaccgacccggcagtgattgccgaccaaaaacgttacgtcaaactgacgaaagaatataaggaactggatgatttgatgaaagcccgcaaggaatatatgcagctgctgggtaatattgaagaggccagaaacattctagccaatgaatcggatgccgatatgcgcgaaatggcaaaagaagaaatggacagtagtcaggaacgtcttcccgtattggaagaggaaatcaaactgatgcttgttcccgccgacccgcaggatagcaagaatgcgattctcgaaatccgtggcggtacaggaggcgacgaagccgctatctttgccggcgaccttttccgtatgtatgccaagtattgcgaaaccaaaggctggaaaatggaagtatccagcgccaacgaaggggcagccggcggtttcaaggaaatcatttgcagcgtgacgggtgataacgtttacgggacattgaaatacgaatcgggagtgcaccgcgtacagcgtgttcccgccacagagacgcagggacgtgtacatacatccgctgcctcggtagccgtactccccgaagcggaagaatttgacgttgtcatcaacgaaggagaaatcaaatgggatactttccgaagcggtggcgccggcggacagaatgtcaacaaggtggaatccggtgtacgcctgcgttatatctggaagaatccgaatacaggcgtagcggaagaaatccttattgaatgtaccgaaacgcgcgaccaaccgaaaaataaggaacgcgcactggcccgcctccgtacctttatctacgacaaggaacatcagaaatatatcgacgacattgcttccaaacgtaaaacaatggtatctaccggagaccgttctgctaaaatccgtacatacaactatccacaaggacgtattaccgaccaccgtatcaattatacgatctataatctgactgccttcatggacggagatatccaagattgcatcgaccacctgattgtggcggaaaatgcggaacgtctgaaagaaagcgaactttaaaacatttatatagaaatggataagcaacaattatttgaaaacataaaacgcaagaaatcattcctttgcgtaggacttgataccgacatcaagaaaatacccgaacatctgctgaaggaagaagatccgatcttcgctttcaacaaagctatcatcgacgcaacagctgacttgtgcattgcttacaagccaaacctcgctttctatgaaagcatgggcgtgaaaggttggattgcctttgaaaagacagtaaaatatatcaaagataattatcccgaccagttcatcattgccgatgcaaagcgtggcgatataggaaacacttccgccatgtatgcccgtactttcttcgaagaactggacatagattctgtaaccgtagctccttatatgggcgaggacagcgtaactccgttcctgacctacgaaggcaaatgggtgatcctgttggcactgacttccaacaaaggttctcatgacttccagttgacggaagacgtgaacggtgaacgcttgtttgagaaagtgttgcgcaaatcacaggaatgggcaggcgatgaccgcatgatgtatgtggtaggcgctactcagggacgtgcgtttgaagacatccgtaaaattgttcctaatcacttccttctcgttccgggtgtcggagcacaaggcggctcgctcgaagaagtttgcaagtatggaatgaacagtacctgtgggttaattgttaactcgtcccgtggaattatctacgtggacaagacagagaaatttgccgaagctgcccgcactgccgcacaagaagtacaggcacaaatggcagagcagctaaaagccattctctaaaagaataaagaatctctaaaagaaacgaatgccttacgaaagaaagataatcaacgaccctgtattcgggtttatcaatattccaaaggggctgctgtatgatattgtacggcatccccttttgcagcgtcttacccgcatcaagcaagtagggctctcctcggtagtatatcccggcgcacaacatacccgcttccaacactcattaggtgctttctacctgatgagcgaagctatcacccaactggcctccaaaggtaattttatctttgacagcgaggctgaagctgtacaagcggctatcctgctgcacgacatcggtcacggtcctttctctcatgtgctcgaagacaccattgtcaaaggagtttctcacgaagaaatctcccttatactcatggaacggatgaacaaggagatgaacgggcaactcagccttgccattcaaatcttcaaggacgaatatccgaaacgtttcctgcatcagcttgtaagcgggcaactggatatggacagactcgattatcttcgacgcgacagtttctacaccggcgtaacggaagggaatatcggttcggcaagaatcatcaaaatgctcgacgtggcggacgaccgcctcgttatcgaatcgaaaggcatctattctattgagaatttcctgactgcacgccgcctgatgtactggcaagtatatctgcacaagacctcggttgcttatgaaagaatgctcatcagcaccctgctacgtgctaaggaacttgcctcaaaaggtgtagaattatttgcatcgcccgcattgcgtttcttcctctacaatgatatcaatcaccaggagttctatcataatcccgattgtctggaaaatttcatccaactggatgataatgatatctggactgctttaaaagtatggagcactcatcctgacaaagttctttccaccttaagcctgggaatgatcaaccgaaatatctttaaagtggaaatttcgtcagaaccgattagtgaggacagaaaaaaagaattaactttgcacatcagccagcaactaggcataaccctttccgaagcgaactattttgtctctacccccagcatcgaaaagaatatgtacgacccggcagacgacagtattgacattatctacaaggacggcactatcaaaaatattgccgaagcatcggacatgctgaacatctcattattgtccaaaaaggtaaagaaatactatctctgctaccagagattgcacagataagtataaaatattcatgcaataacacggaaatctgaaaaaaaagtccgttatttgtgaactaattaaattttaaagaaaagacatggagttctcggctaagcaaattgcagcatttatccaaggggaaatcattggagacgaaaacgctacggtacacacattcgctaagattgaagagggaatgcccggagctatttctttcctgtcgaaccctaaatatacaccttatatctacgagacacagtccagcattgtactggttaataaggacttcactcccgagcatgagatcaaagccacccttatcaaagtagacaatgcttacgaaagcctggcaaaattgctcaacctttatgaaatgagcaaacccaagaaagaagggatagattcattggcttttgtcgcacccagtgccaagatcggcgaaaacgtatatatcggtgctttcgcttatatcggcgagaacgccgtcatcggagataatactcaaatttacccgcatacttttgttggagacggcgtaaagataggcaaaggttgcctgctttactcaaatgtaaacgtttatcatgactgccgtatcggcaatgagtgtatattacattccggcgcggtaatcggagccgacggattcggattcgctcccactcctaacgggtatgataaaattccacaaatcggaatcgttattctggaagataaagtagacataggtgccaatacctgtgttgaccgggctaccatgggagcaacggttatacatagcggcgccaaaatagataatctggtacagattgcccacaacgacgaagtggggtctcatactgtaatggctgcccaagtcggtattgccggttctaccaagatcggcgaatggtgtatgtttggcggacaggtaggtattgccggacatattaagatcggcgaccgcgtaaatctcggagcacaatcgggtgtaccaagcagcattaagtccgacaaccaactgatcggaacacctcctatggagttgaaaccgtatttcaaggcggctattgtgactaagaaactaccggatatgtacacagaactgaacaaattacgcaaagaagtagaagaattaaaacaactattaaataagtaaccaatgctgaaacaaaaaacgctgaaagatagcttttcactgagcgggaaaggtcttcacactggacttgacctcactgttacatttaatcctgctccagacaatcacggatataaaatccaacgcattgacctggaaggacaaccaactatcgatgcagtagcggacaacgtgacggaaaccactcgtggtaccgtgttatcaaagaacggagtcaaagtaagtaccgtagagcatggtatggcagccctttacgcattgggcattgataactgcctcatccaagtgaatggtccggaatttccgattctggacggtagtgcacaatattatgtacaagaaatagaacgtgtagggacagaagaacaaagcgctgtcaaagacttttatatcatcaaatctaaaatcgaattccgtgatgaagcaaccggttcttctatcatcgtattgccggatgagaattttagcctgaatgtactggtttcttatgactcgacaatcatccctaaccagtttgctacacttgaagatatgcataaattcaaagacgaagtggctgccagccgtactttcgtctttgttcgcgaaatagagcctcttctctctgccggattgataaaaggcggtgacctggacaatgcaatcgttatctacgaacgtaaaatgtcgcaagaaagctatgacaagctggcggacgtaatgggagttcctcacatggatgccgaccagctgggttatatcaatcataaaccgttggtttggccgaatgaatgtgcccgtcacaagttgctggacgtaatcggtgatcttgctttaatcggtaaaccgatcaaaggccgtatcatcgccacccgtcccggacacacaatcaacaataagtttgcccgtcagatgcggaaagaaatccgcttgcacgaaattcaggcaccgacttatgattgtaaccgcgaacctataatggatgtaaaccgcatccgtgaacttctgccgcaccgttatcctttccaactggtagataaagtaattgaaattggtgccaactatatcgtaggtgtcaagaatattaccgccaacgagcctttcttccagggacatttcccgcaagaacctgttatgccgggagtgcttcaagtagaagccatggcacaagtgggaggtctgcttgtcctcaattccgttgacgaaccggaacgctattctacctattttatgaagatagacggtgtgaaattccgccaaaaggtagtgccgggagacacgttattgttccgtgtggaattgctggctccgatccgtcgtggtatctccacgatgaaaggttatgcattcgtcggcgagaaggtggtttgtgaagcggaattcatggcacaaatagtaaaaaacaagtaataattgatatttaaaagcatgataagtcctttagcgtatattcatcccgaagcaaaaatcggggaaaatgtagaaattgcgccttttgtatttatagataaaaacgtggttattggcgacaacaataagattatggctaatgccaatattttatatggttcacgtatcggtaacggaaatactatttttccgggagctgttatcggagccattccgcaagacctcaagtttcgcggtgaagagtcaacagccgaaatcggagacaataatctgattcgcgaaaatgtcacgatcaaccgtggtacagcagctaaagggcgcacaatcgtgggcaacaataacttactaatggaaggtgtacacgtggcacacgatgcgctggttggtaacggatgtatcattgggaactctaccaaaatggcaggtgaaatcgtgattgatgataacgctattgttagtgccaatgtattgatgcaccagttctgtcatgtaggcagtcatgtaatgattcagggcggatgccgcttcagcaaggatattcctccttatattattgcaggacgcgaaccgatcgctttcagcggcatcaacattatcggcttgcgccgtcgcggtttcgccaacgaagtgattgagaatattcacaatgcatatcgtatcatctaccagagtggactgaacacgactgaagcattgaagaaaatcgaagatgaatttgaaaagagtcccgagattgactatatcattgaattcatccgcaactcggagcgtggaattattaaataaacacttcaaaatagtcatattatgatatacagatttactatcatatctgatgaagttgacgattttgtcagagaaatacaaattgatccggaagcaacattcttcgacttccatgaagctatactgaaatcagtagggtatgctaatgaccagatgacttctttctttatctgcgacgatgattgggaaaaagaaaaagaagtgactttggaagaaatggatgataatccggaaatagacagctgggtgatgaaagaaactccgatcagcgaactgatagaggacgaaaaacaaaagttactgtatgtgttcgactacatgacagaacgttgtttcttcatcgaactgacagaaattatcaccggtaaagatatgaatggtgctaaatgtactaagaaagccggagaagctcccaaacagactgttgattttgaagaaatggccgcagccggtggctcgctcgacctcgacgaaaacttttacggagatcaagacttcgacatggaggacttcgatcaggaaggttttgacataggaggaggcgacgctggcaacccatacgaagaagataaattctaagtcttaaatatcaagtatcaggtattaattgctatgcagtgccgggcagttaatacctgatattttttaattccatgttttagtactcaacaaccgatacttactacttttaaccccatgcccactctcatcgttctgataggacccacaggcgtaggaaaaacagaattaagcctgcgattagccgagaattttcagactcatatcgtgtctgccgattctagacagttatatgctgaactgaaaatagggacagccactcctactcccgaacaactcgaacgtgtgccgcatcacttggtaggaacgcttcatcttacagactattatagcgccgcgcaatatgagacggaagcaatggagattctcgaaaagttattcatgcagcatgaggttgttgtcttgacgggcggttcaatgatgtatgtggatgctatttgcaaaggtattgacgatattcctaccgtagacgcggaaacccgtcagctcatgttgcagaaatacgaggaagaagggcttgaacaactctgtgcggaactccggttactagatccggagtattatcgtattgtggatttgaaaaatccaaaacgggtgattcatgcactggaaatctgctatatgaccggacgtacttacacctctttccgcacacaacaaaagaaaaaacgtcctttccatatcatcaaagtcggtttaacccgcgaccgggaagaactttatgaccgtatcaaccgtcgggtagaccaaatgatgcaagaaggattactggaagaagtacgttccgtacttccttaccgacatctcaattcactcaatacagtaggctacaaagaactgttcaaatatctggacggagaatgggaacttcctttcgctatcgaaaagataaaacaaaattcgcgcatttactcacgcaaacaaatgacttggtttaagcgggacgaggaaatacgttggtttcatccggaacaagaaacggagatactttcgtacctccgttaaaaaaagatcatattgagtaaaaacttttatttacccagtttcgatactttctgataaacttcacggtaaacactgttgcctaattggaataaaagcgtcattcgttttccgtcaatccggtaggatataggaacaagagctgatgcggttcttccatattcattatgcaatacctcacaataaagtccttctgcaataatattatactcacccgaacgagtaatcttataaggacaaaatacgcttcccgtacctctgtttcctgcttctaagtacattgcatttttaacataggcatctacattataaaatttgccttctttatcaagtaccttatatctggtcacttgtgaagtagcgtcattctgaacaagtctccagataccttttaagttttggctcatacaaagattgggcataagaaaaagaaatgaaacagccaacaaaatcttacataaatttcctttcataataaatagaatttaaagttcaacatatatttattctttaatttaatcagcacaacaaccttgcgtatgagttcgtcgctagcttataaaatcattcttgtttatctttcaaaatgactttaagtgtaggcttcactttaacttcaatggtaggctttccattatgacccaccagaagcacaccgtttttaggggcttttatagtaaagcgccctattgaatctgttctttccgtaaatctcgtacctcttacatttacaatagcgaatgtcggtttctcgtcctcattatacactactccggtcacggtaatccagtcagaacggtacttatctgttttcaaacgtacaattttctctttgcccgcttgatctaaagacactgctttaattgtctttatagacattcctttcaatttcgatttttcgacttcatcatcgtctatacaataaataatctttccttctaccccttctgcgacactttctgccagttccaaagcatcagcataaggtttttccggattatcttttttaaattgatactctccttccgtaagcaaagtaacaattatcactccattttttcctttttccccataaatagatgtagcagttttatctttcaatatagaaaaacttttaatacggtcaggagctatcttagacaaagcttctttatccgatacttctttatcattaataatgattaagggttgtttgccctcttcaactccataaagagtcaaactatttccgactttagtaccggaagataaagttccggtcgttttcagactaacggatgtctcaggaaacaatttaaccacatcctgttccattcgtattgacatttcagaagttacggctgctttcaccgttttatatccaataaatgagaaccacaaataactatccttcggcgttttcagacgaaagcggccatttgcatctgttattgcgccaatagttgtattaggaacgactatgcttactccggctttaggctggccctgctcgtcagtaacaattcctgtgacaagaaagtccggcacagtatttgtttcagtcgctttgatctcagtaaaagtgctgatgtcttgtacacgtgttttcccctccctgcgagtggtaacaagtatcaccccatttgcaccacgcttgccatataaaccaatagatgcactatctttcagtaccgagaaactttctattatccctctatctattttttcgaaagtctccatactcatttccttgccatcgaccataattaacggcttcttattctccggaaatctgatatctccaaacctcaccggaacggaatatttcacagacacaggcataccacgttgctttccgggaatccaggccggcatttcactcacaattctttcagcctctttagttaagataggttggtcggactgaagcgctcgcacatcctttactttcccgctttcagatacagtgaaaccgactatcacactacctccggctttccctttcacatcagaactttttgttttattctccaaatacttatacaacgcattcataccacccggatattcaggcatttgctccaccacttcaaaaacaactaattcttcattacctttcgtttttgccgcacgattttcagcactaaccttggccttactatcgccatgtgacacttttacagtatcttgcagcacattttctgtatctctcaacacattttcttgcacaatctcggccaaatcattaactttgacggcagaaatttcttctactttttcggagatttcgggacgggcaaaagcagttactgcaatagctgccaatggaagcacatacaagtacttcaaccgtgcccatggatttgatttttcttttaacatcatagtgatacgttttttaagtttactgtgattaaagctgttggccatagagtagagccttgtgccaacggctttttttattaataatagttgatattctttcgcgtttacaccttcattgataacagtctcgtcggcttcatactcatggatattctgcaactcctgtttcaacagccatgcaccggggttgaaccattggaaaaagatacagatatcagctaccaataaatcaatagaatgccgatgacggatatgtgctgcttcatgaatcagaatttcccgcccgttctcctccaaatccttccggctgataacgatatacttcatccaactgaacggagctatctcctgttcgtggacaacaagtgttgttccattctccaacttttcccgtttaccggaatgtattaacctgaaaagacggatcaaagagtatagattgcggcaagcaaagaagataatgccggccagataaacaagcagaagaatctctatccaggacaaggaagcgacttcgtatactgccactccgccggttgcatcgacagtcgcgggttccatttctgccattagcaacacctgctcaatggtgagcattgtttgttgtacttcaacctgatggttcgtggttacttcaatgaagggaatgagcaatgacaaaaacagtacgcccaataaagcaacacgattaaagcgatgaaaagtttctttgctaagtaagacccgaaaaaacaggtaaaacaagacaaggcaaactgatgattttaatatatagataaagaatgctcccatagtatagattgtcgttttattaattggtgttcattaaatagtgttctcaggtcagcctttcctgtccgccttctctacctcttgaatcaattgtctaagttcatccaaagaaatatcttcttctttgactaaagacgaaactgcattcaggtaggaattattaaaatacttactgattacattccgaagtgttcctttacgaaaatcttcttcactgacgatcggatagtattgataagtattcccaaaaatataatgagccagaaagcctttatcttccagcccgcgcacaatcgttgataaggtgttaaaatgcggcttcggttcttcatagaaagccaacatttctttcacaaacaagggacccttttcccaaaaaaatcccatgatttcttcttcctttgctgttaatcctttcatacctgcatctttgtttgatgcaaataacgagaagttttagtttataaactaatttttctagttaatataaactaaaagatatagtttaaaagatgacaagcctgtaaaaggctctatcaaagataaattcttcattcttttacccccacagtttatcaacaataaaattccctataaagaataaatcgcccataaagacgatactgaataccagaaaagtgaaacaggtactccaacgagctcccccattttcttcaccgcttttgatacggagcaaggagctatgcaagcaatcacctgctatgaacaacacaaacaagctcggtatcaagtcaccccatgacaccaaccacaagttatcaccctttcccattaggaatgtcaatgccacggccaacaagaagacggaagcatactgcaagtcttttctctttgaattcatagtggtaatatttaaagtacttttcacaaagatattgaatctcattaaatatcctctatcaaatccatacaaaaaatcagtatcattacatattttacttgcctttatctgtcactacaaaagtaaatgaacaagcagacacaagacgaaaggcagagctccttcatccactaacactgatgaacagggaaagatgaaggaatgaacggatcatgagatatttcaccaaaccaatgaaactctaatcctccacttgctctccttcagattcttccggtttatttccggttttagaagacttcttttttaatcggccactttttctcaaggcttcggcaataatccactgaagttgcccgtttgtactacgaaactcatcagccgcccatttttcaatggcgtccattgtttcagtatccactcgcaaaacaaaactctttattgaagattcctttttagccacttctattttaccttcttatttatagtttatcaatgattcagcgtacctgtattcacaaccggttgcgcagcttcgtccgcacaaagcaccactagcaaattactcaccatggcagctttcttttcctcatccagttcaacaatttcctcttcagaaagtttatgcaatgccatacgtaccattgaaacagcaccttcaactatcttttcgcgagcactgatgatagccgacgcctgctgacggcgtaacataactgctgcaatctccggagcataagccaaataattaatacgggcttccactatctccatacctgccatggccagacgttcattcaacttttgttccaactgctcgttaatttcatcaccgccactacgtaacgtcaattcatccaaatccgcttcgttgtcgtcataagcatacagtcccgctacctgacgaagcgcagcgtcactttgcacacgaacaaaatcctcaaaggcattcattcgcccggcaacagtcacagtcatctgtccgctccctctattatccgccattgtctgcgcatcaatttcgaacatagctttataagtgtctttcagtttccagacaagcaccagaccgatcaaaataggattaccaatcttgtcatttactttaataggctccacatccaagttacgggcacgtaaagatagtttcttcttattcataaaaggattaacccagaaaaatcccgtttcagtaaacgtacctttatatttcccgaagaataccatgacacgggcttcgttcggttcctgcgaaaaataacccggaatcatcagaacagctaatgcaagaaaaagcaatagcaagaaaaacataattatgcttcctttgaaaagcataaaactcacaacaaccaacaaaggcaacacgatcaaattaagaaacaaggccaaaaagccattaacaaccgcatcatcgtacttaatttcttttgtaatcatagcatttaattttgatattattttgatatcacaaatatatcaaatttagaaattaaaaagcaaacaaaaagagactttttttccatgagaaggcatatttttaactaaacagccctgtcttgttcctaaacaaatataaaagttgaggaaataagcggctatccgaacctaaaaaaagagtttgctctttgaggtatttaagtttattactatttttgcaggatacgaatttaaaacctataaacagtaaaacataaaacaattcataaaatgagaaaagtaagtttagctctactcttctgccttctctgccttaccggaatggcacaaggacaaaaggctcttgatttaaaagatatcacctccggacgtttccgcccggaaaacattcagggagtaatccccacgcccgacggtgaatactacacacagatgaacggcgaaggcacacaaattattaaatattccttcaagacaggtgaaaaagtggaagtggtgttcgatgtgaatactgcacgcgaatgtgatttcaaacacttcgacagttaccagttctcacccgacggtcagaaattgcttattgctacgaaaacgactccgatttaccggcattcttatacagctgtacattatatctaccctttgaaacgaaatgataagggcgttacgacaaacaacattattgaacggctgtccgacggcggacctcaacaggtccccgtcttttctccggacggaacaatgatcgctttcgtacgtgacaacaacatattcctcgtaaaactgctttacggcaacagcgaaagcaaagtgactgaagacggtaagcaaaattctatcatcaacggtattcctgactgggtatatgaagaagagttcgggtttaaccgcgcattggaattcagtgcggacaataccatgattgcttttatccgtttcgatgagtctgaagttccctcctactctttcccgatatttgcaggacaagcgccctacatcaatgccttgaaagattatccgggcgaatatacctataaatacccgaaagcaggatatccgaattccaaagttgaagtacgtacctacgatatcaaatcacacgtgacacgtacaatgaagctcccgttggatacagatgggtatatcccccgcatccgtttcacaaaagatgcctccaaattggcaatcatgacactgaaccgccatcaggaccgtttcgacctttactttgccgatcctcgttccaccctttgcaaattagtattgcgtgacgaatcaccttattatataaaggaaaatatattcgacaatattcacttctatcccgattatttcagtatgcttagcgaacgtgacggttacagtcatctctattggtatagcatgggaggtaatctcattaagaaagtgactaacggcaagtttgaggtaaaagactttttgggttatgatgaggaggatggttcgttctattacaccagtaatgaggaaagtcctctgcgcaaggcggtctacaagacagataagaaaggaaaaaagaccaaattgtctcaacagacaggaacaaacacaccgcttttcagcaaatcgatgaaatattatatgaataaatattccagtctggatactccaatgcagattacgctgaacgataataccggcaaaacattaaagacgctggttacaaatgaccagttgaaacaaaaactggcaggatacgcagttcccaagaaagaatttttcacttttcagactacagatggagtgacattgaacggttggatgatgaaacctgtcaatttttccgcttcgaaaaaatatccggtactgatgttccaatacagcggccccggctcacaacaggtactggatacatggggaatcagttgggaaacgtatatggcaagcctcggctacctcgttgtctgtgtggacggacgtggaaccggaggacgtggagaagctttcgagaaatgtacttacctgaaaatcggtgtaaaggaagccagagaccaggtggaaaccgcactttacctaggcaaacaagcgtatgtagataaagatcgcatcggtatttggggatggagctacggtggatacatgactttgatgagcatgagtgagggtacccccgtattcaaggcaggtgtagctgttgccgcaccaaccgactggcgtttctacgacacgatttatacggaacgcttcatgcgtacaccgaaagaaaatgcggaaggatacaaggaatcgtctgctttcacccgtgctgacaagttgcacggtaatctgttgctggtacacggcatggcggatgataatgtacacttccagaattgcacggaatatgccgaacatttagtacaactcggcaagcaatttgatatgcaggtatatactaaccgtaatcacggcatatacggtggcaacacccgcaatcatctgtacacacggttgaccaacttcttcttgaataatttataatggctgacagagtacgtaagcctgaatggctgaaaatcaatatcggtgccaacgaacgatacaccgaaaccaaacggattgtcgactcccactgcctgcatacgatatgcagcagtgggcgttgccccaatatgggggaatgctggggaaagggaactgccacatttatgattggcggagatatctgtacccgtagttgcaagttttgcaacacccaaaccggacgtccgcacccattggatgtaaatgaacctgttcatgtggcggagtctatcgcattgatgaaactggatcatgcagtaatcacctcggtggaccgtgacgatctccccgacctgggagcagagcattgggcacgtactatccgggagattaagcgtttgaatcctcaaacgactatcgaagtactgatacctgattttcaaggaaagacagaactgctaaatcaggtcattgaagcgcatcccgatattatttctcataatatggaaactgtccggcgtatcagtcccctggtacgcagtgcagcaaattatgataccagtttacaagttatctctcacatttccaaaaacggagtaaagtccaaaagcggcattatggttggtttgggagaaacccccgaagaagtggaaacacttatggatgatctactggcagccggttgccagatactcactataggacaatatctgcaacccagtcatcggcattatcccgttgccgaatatgtgaccccgcaacaatttgcaaaatacaagattatcggcttagaaaaaggattcaatatcgtggagagtgctcctcttgtccgttcctcctaccatgctgagaaacatatccgttagcaaacaaaacacaagcactatttgttttatagatagaaccgacaaataaacataaagagatggatcataaaggaatactttcttccgcatttaacatgtcactgggttttatccccgttattatttccattttattgtgcgaatttataacgcaagacacggctatttacatcggtacagtcataggtatcgtaggtgtatatctttcttatcatcgtaaaggcatattgctacccaactttattctttatatatcggcaggaatactgattcttctttccctggcagcccttattccgggcgattatgttcctgaaggtgcacttcctctcacattggaagtgagcattctcataccgatgctaatactctatatgcacaagaaaagattcatcaaccatttcttgaaacagataggttcctgtaacaaacgcctgtatgcacaaggggcggaggctgctgttgtttctgcacgaattgctctgattttcggtatacttcactttattatcatcagtatcgtgataatctgccagaacccgttaagttctaccagcaaacttactctttataaagtgctaccacccatcgtctttgtcatgagcattctatttaaccagattgccattcgcttcttcaatcacttgatgtctcacactgagtacgtacctatcgtcaacaccaaaggagacgtcattggaaagactcctgcagtagaggcgatcaattacaagaatgcatatatcaatccggtcataagaattgctatctccacacatgggatgttatttctctgcgaccggccttcgacagctattttggataagaataagacagatattcctctggaatgttacctgcgtttcggcgaatccttgtccgacggtgttaatcgtttattaaccaatgcttttccacatgccaaagaaaatataaagccggagttcaatattgtttatcactttgaaaatgaagtgaccaaccggctgatctatctgtttatcgctgaaataaaagacgatgcaatcctttgtactccccgcttcaagaacagcaaattatggagtttcaagcagattgaagaaaacttaggcaaaggattcttcagcagttgtttcgaagatgaatacgaacatttaaaaggagttatttgtataagagaaaaatacagggaatcttagacagttcgggcacgtgtcctttccaatccttcaccgtacgcgtttgtatatactctccttcacaagtaatattggcagcaatacaaagtttggtctgcgggcggcaattctgcaaaatatcttctatcatcttatgattgcggtaaggcgtctcaataaatagctgcgtctggctttcggaatacgcccgctgttccaaagtttttaatttcttggcacgctcgtccggttcaatcggcagataaccatgaaaagcgaaactctgtccgttaaagccggaagccattacggaaagaatgatcgaagaaggtcctaccaaaggaacaacctttaacttcttgcgctgcgcgatagcaaccacatccgcccccggatcggcaacagccggacaaccggcttcggaaatcactcccatagaagcaccgccaaccaaaggtttcagataaccggaaatgtcttcaggtgaagtgtgcttgttcaacgggtagaacgtcagcgcatcaatatcaatcccccggtccactttcttcaagaaacggcgggcagaacgaatatcttcaacgataaaatgccggataccggagataatctccttattataagaaggcaaaaccttttcgacaggtgtatcacctagagtcacaggtagtaaatagagagcagtttccacttttaaaattgagaattgagaattaaaattgccaatgaagctatcaggaagccagataatcggactggttcaacatctcgtgatagtcggtaaattccaacaaatctttcagcttcatatccttatgctttttcatataggaagaaacaatctgtgcgcctatccatatacccactgatgcaggcgcttgtccacccagcatttcaactgcaggggcaggtttcatataataacggatgatcatcgggtcacgcgcatgcaaatgatcgttggaacaaatatgttcccaaatagccttttcgtttttcttgcaccaggcattttcctcatccgaataaccgattgcatcaccaatattatcataacccaacaaatgctgcactacataattgatcttcccggaatgcatcatcaggtcaatcaggcaagtcccctcgtgataactcattccgtaacggtcgaggagatagaatacaaaacaatccggcacaatacgttcgggacgcattgaacggcattgatagtcgtaatagaagcgtttgtaaagcgggtaatcttcccccatatatttatcgaggctgataccgagcaacgtgtctacaagaataatagactcgttgaatgcggatatctgcgaatagacaaacggcaccttcgtaccagggacctcttttttcagtttccggaatcctttattcagtcctttctccacttcatcaagattggggaacttagcttccacgtcactcactaagcggactaacgtagtgtccgaatagaatttttgaagacgctgaaaaatggtatcgtctttcacggtaccgatagccagtacatcttcaatcagaattttcgtcggctggcggtaatccattgtcagcttctgcatagcagaaaagctgttggaacgaacatattcgttcaacagcttatcatatctcagaacagaaatctcttctcctttctgctccgtaccttttcctgtgcttatcccgcaggaggcgaaaagcatacttattaatataacaagaagagaaatccgtagtttcataatcttttatccgtaaatgatattaccattttcgtccatatattcatccaaccctttctcataggtagccattgcacgaagactcatacctacgctggagaaaccaccgtcatggaaaaggttctgcatagtcaccttacgggtaagatcggagaacatcacgatacaataatctgcacattcatcggcagtcgcatttccgagcggagacatacggttggcgaagtcgaacaacttatccatacctttcacgcccgaaccggcggtagtgaatgtaggcgactgtgaaattgtattcacacgcacactatgctcgcgtccgtagatatagccgaagctgcgtgcaatagattccagcaatgcttttgcgtctgccatgtcgttgtagccgtagaaagtacgctgtgcagccacatagctcaatgcaacgattgaaccgtaatctgcaatcgcattcagtttcttggccgactgaatcattttatggaatgaaacggctgaaatatccaatgtcttatccaacattccatagtcaaggtcatcataagtacgtttcttgcgtacgttgggagacataccgatagagtggagcacaaaatcaatttgtccgcccagtatatccattgaggtcttaaacacattcgacaaatcctctacgctcgttgcatctgccggaacaatctggcaattcagtttctctgctaaagcattgacttctcccatacggatagccattggagtatttgataatgtaattgttgcaccttcttctacggcacgctctgccactttccaggcaatagactgatcgttcagagcaccgaagataatacctctttttcctttcaacaagttataactcatatcttttaatcgttaaattttgtgcaaagataggaactttctgcataaaaacacgagatgtgtgcaaataatagacagaaatgacaaaaaatacacgtaatctatcaattagtccacatcctcttgaagtttcccacctatctttgcgaatgataattaagaggttttttcataatatttatttaaggttagaattaggttaacatgaattcgtcttattccgctccggcaggctgcctgcgaaagatcgcctgcggagggacataagaattatgaaatcatccttattaatatcaacaatataccaagaaaaacaatagatgtataaccctatagaattagattactaaatgaacacattgacaaaaagactcctctggatagccgtatgctgtttgccgtttatctcgggatgtaaacaacccaatgagaatgcagtaagcaagaatgcaataagcgacgcactttaccggaatttaccttttgaaatgcccgaagtgcaacaaccggcttttcctgcttatgaggtaaacatcgaaaaattcggagccaaaggagatggattattcctgaatacaaaggcgatcaatgatgcgatcaaagacgtcaaccaacgtggtggggggaaagtgattatccctgaaggtatctggttgaccggtcctatcgagttgctgagtaatgtgaatctttatacagaacagaatgcattggtacttttcacaggcgacttcgaagcatatcctatcatcgacacttcttttgaagggttggaaacccgtcgttgccagtcaccgatctcggcacggaatgcggagaatatcgctatcaccggctatggcacgtttgatggtaacggagattgctggcgtccggtgaagaaagagaaactgactgcttcacagtggaagaaactggtcaattcgggcggtgtcctggatgagaaacaggagatatggtatcccaccgcaggttcgctgaaaggagctatggcttgcaaagatttcaacgtacccgaaggaattaatacagatgaagaatgggctgaaatccgtccgtggttgcgtccggtattgctcagcattgtgaaaagcaagaaagtgttgttggaaggcgtaactttcaagaactctccgagctggtgtctgcatccgttgtcctgcgaagatttcacggttaataatattatggttatcaatccatggtactcacagaatggtgacgcgattgatttggaatcttgcaagaatgcgctgattatcaacagcgtatttgatgcgggagatgatgcgatttgtatcaagtcgggtaaagacgaagatggtcgccgtcgcggagaaccttgtcagaatgtgattgtgaagaataatacagtactgcacgggcatggaggattcgtggtaggtagcgagatgtccggaggtgtgaagaatatctatgtagaagactgcacattcatgggtacggatgtaggtttacgattcaagagtactcgcggacgtggcggtgtggtagaaaacatctacattaataatatcaacatgattaatataccgaacgagccgctattgttcgatttgttctacggcggaaaaggtgcaggagaagaatcggaagaagatttgctgaatcgtatgaagactgccattcctccggtaacggaagaaactccggcattccgtaatattcatatttcaaatattgtttgcagaggttcggggcgtgcgatgttcttcaacggtcttccggaaatgccaatcagcaatgtgacggttacaaacgttgttatgacggaagctacggatggagttgttatcagccaggtagacggagttactttagaaaacgtttatgtagaatcggcaaagggtaacaatatattaaatgtcaagaatgccaaaaacctgactgtcgacggaaaagtttatgaagaactgggtgcaaaaggacagattctgagcctcaaataagatgcattccagaaaaaaagaagaaaaccacaatatcattatatagagtaaaaagctcaaatagcagactattttatccttaaaagatagacggtctgctattttttccgttacttttgtgacaaagaaatacaacgtataatatcagctttagaagcatgaaaaagaatattcttattatcgctttccttttagggagcgtcatcctacccaccttggctcagaaacaggaaaagacgattacgatagaggtacataataactggaaccaaccacaaacggatgcaccggtagtgatcagcctacgcgagcttcaaatggggttcaaggtaaagtctgccgtagtcatggaaggaagcgatgaaataccttcccaactggatgacttgaacagggaccgcaaaatggatgaattggcattcgttaccgaactccctgcccagggcagaaaaacattccggattactctttcttcggaaaagagcacgaagacttatcctgaacgggtttatgctgatatgtttatcacagaccaccgcaaagggaaacatcaacgggtacaggctattaccgttcccggtaccagcaatatatatagtatggtacgtcctcacggtccggtgttggaatcggagttagtaggctatcgtctttatttcaatgaaaagcagacgccggatatatatggcaaattcaacaaaggactggaaatcaaggaatctcaattctatcctacggatgaacagctaaccaaaggattcggggatgatgtgctgcgggtatttgacagctgcggtccgggtgccttgaaaggttgggatggacagaaagcaatacacgtcactccggtggagacccgcacggaacgtatcatctcctatggaccggtacgtgtcattgcagaaatcgaagtgaccggctggcaatatcaaggctcggaactggatatgacgacacggtataccctctatgccggacaccgagatctccgtatcgaggctttctttgacgaaccgctcaaaaaagagatattctgcacaggagttcaggatattgtaggtaattccaaatctttctccgaccatcaaggtcttgtaggaagctggggtacggactggcccgtaaacgatacagtgaaatatgccaaagaaacagtaggactcggcacctgcattcctcaacgttatgtgaaatcggaggagaaagataaagcgaacttcctttatacaattactgctccgggaagtaactacttccggtatcacaccacgttcacttccatgaaagaaactttcggatataaaaccccggaagcgtggtttgcttatctccgccaatggaaagaagaactggcacatcccgtcactgtgaaaattaaggatatctgtataactaaatagggattatgaaacgattgacacagactttagctttctgcctgcttacggttttcaccgcagtagcacagaaaaactatgtatccgaagtatgggtttccgatctcggaaacggcaaatacaaaaatccggtactctatgccgattattccgatccggacgcttgccgtgtaggagatgatttctatatgacttcatccagtttcaactgcctgcccggattgcagattctgcattccaaggatctggtgaactggacaattatcggcgctgccgtccccaatgcccttactcctattgaaactccggaacgaccggaacacggtaaccgtgtatgggcaccggccattcgtcaccacaacggtgaattttatatcttttggggagaccctgaccagggggctttcatggtgaaagcaaaagatccgaaaggtccgtggagtgagcctgttcttgtaaagccgggaaaagggattatcgacacttgcccgttttgggatgaggacggaaaagtatatatggtacatgcatacgcaggaagtcgtgccggactgaaaagtgtaatcacaatctgcgaactgaatgcagaggcaacgaaagcaaccactccttcccgtatcatatttgacggacacgaggcacaccagacttgcgaaggtcccaaaatgtataagagaaatgactattactatatctttcatccggcaggcggcgtaccgacaggctggcaggtcgtgttacgttccaaaaacatttacggtccttacgagtggaaaacggtattggcacaaggcaactctcccgtcaacgggcctcatcagggagcttgggtagatacccctaccggagaagactggttccttcatttccaggatgtaggcgcttacggccgtatcatgcatctgcaaccgatgaaatgggtaaacgactggcctgtcatcggaacagacaaagacggtgacggttgcggtgagcctgttttgacttacaggaaaccgaatgtaggaaagacatatcccgtttgtactccacaggaaagtgatgagtttgacggttataccctttcgccacaatggcaatggcacgctaacatcaacgaaaaatgggcgtattatgcgggagacaaaagttatgtcaggttatactcttacccggtggtagaagagtataaaaacctgtgggatgtagctaacctcttgctacagaaaacctcttccgataatttcagcgcaacgatgaagctgacgttcagccctaacctgaaaaacaagggtgaacgtaccggacttgtcgttatgggcagggactatgccggactgattcttgaaaatacagataaaggtcttgtgctgtcgcaagttgaatgcctaagagcggataaaggaaaaccggaagaagtgagagcctccgttcccctttctcaaaatacggtttatctgaaggtacgtttcagttgtgacggaaagaaaatcaagagcagtgaaggcgggcacgacctcattgcaatgtgtaatttcagttatagccttgatgggaaaaagtttgaatcattcggtgctcctttccgggcaagagaaggacaatggatcggtgccaaggttggtatgttctgtactcgtcctgccattgttactaacgatggcggttgggcagatgtggattggtttcggattacaaagaaataaaaaagagtaaccaaatacaaaaagacgctcctgcatcataaaaatcttgcaggagcgtcttttcttttctacctttgtaagcgaaaagatccaagatagcaagattaattataaaacagaaagctcaatgaagaaactagttatattcgatttggacggtacattgctaaacaccattgccgatctggcccacagtaccaattacgcattaaacaaattaggatatcctacccatgacactgagaagtataactttatggtgggaaacggtatcaacaagctttttgagcgtgctctgcccgaaggagaaaaaacagaagaaaatgtactccgtgtaagaaaggagttcattccttactatgacgttcacaatgcagatgacagccgtccttatccgggtatttcagaacttttatcctatttgcaatccgaaggtatacagcttgcagtagcttcgaacaaatatcaggcagctaccgagaaactgatagcctactatttcccagagatccgcttcactgccgttttcggccaacgggaaggagtgaacgtcaaacccgatccggcagtcgtctttgatattttgaaattagccgatgtagaaaaagaagatgttctttatgtcggggattcaggagtcgatatgcaaacggcagctaatgcaaatgtaacagcctgtggtgtaacatgggggttccgacctcgaacagaattggaaaagtttaatccggcgtatatagtggactctgcaaaagagattgaaaaactgatatcatcgacttgctaaaatgacctattgcaaatgttattctcataacttaatcgtcaacgcttaatgaactgtagcaaaactatcgttcattctcatcataactaacagacaatgaaagattataccaccataatcagtcgattttcaataagaaacctttatcgttgcactccagtgaacaggcttgtgcactgaagtgaatagggctatccacctgagtgcaccgatctgtttaccagagtgcaacaataaggatgaaggaactatttgcatactacatgatagacttcattctccctgacagaaaaagcacaataatcacgatatatagtaacaggcactgttcttccattagctgtcacttctatctcccggtccggccacggattccggatcttgcaaacaggtgctttgcctgcctgaattttcaactcggtcacttgagccccatcatacgaagccgacacaagaaaacctcctttagcccgaagacgtgtaaaggatgccggtttcttcatccagtcgggaaaaaggtaaagcacatcatctaccgtttgtagcatcatggaatgtaccgcctccataatcgcactcttctccagacaatggtgcccatccgtaatcaagaagttctttcccgcagtttcagcctgatacctcatcttgtcgataagtatttccgggtcgaaagctacgcgggctcccatcacataagcactcaagcccaattcgttcatgagtttatagccctcctgtgccacaaaataatagtggaccgtattgcgtgcaatctgaagagcttcaggagatgatgccagattcaagacttcacatggataagcggcatgtaactgtatcatgtgattcggcgcatcccatccggcttcattcttggcataaacaggtagtccctggttcggttgccgggtaggcataatcactttgtaggccggaagatgatccacaatatcctgccatttgtctcgtctgcccgcatccatgttcaggatttggctataacgcagcaggagccggaatgtctgttccacaaaagccacatccgacggcggattcaggtcccacgagttttcatgtcccccggtggtaatcgtatatcggtaggaattaccgtatcgttctttttgaatgtaatcttcgtaaaaatccccacactccctgataaaaggataggctctttcacgtagaaaagtttcatcaccggtgtattcgtaataccagctaaacaacggtacattgaaaggagcattgactgtttgctgccagtaggtacaataaaagccaccaattcccaacgcactgacaggaaataaaagccccctgcacgattttcctttcagcgaagggtgtaccaattccaattcttcctttgcccgccttctaccctccggaatcatcccttcaagaaaacggtagtagggcatggcaagctcgggacggttagatgaaaacatactgtaaaatccaccttggctattataattcagatgaatatctccgtggtagttcatttcgtcatccatattccatacaccatacattcctccgcaagcaggagagtgttcgtcataagccgaagcctgtaaatagacagagacaagatattgcctgtcaatcaggtcatcgccggtctccacatacgaacgtcgccacatctctgtccaccaaagatctttctgctgtttcaaccgacggagatcttttaccgacaaagaggttaaccggacgtaggcttcatcaagacgcgcgttatcttcagtacctccgcccgatacataagtgactacatacaccttctcacctgcattcaacgtgaaagtactttttacattgttttctgcatcctgcttcaccgacgagactgccccgataatacgggtagagacacctgcttgcgaaatccaacgtacactgtctgtcaacgtccggcgatatgcttgggcaatagtacctttcaccatcgccttatcctcataatttgaagttgttccgcctgcataagtatctacagtgatggtaacagggtgttcggaagcagtgacaagttccgtcactatcacgttggagcctctgcccatccagcttgtcatctccacagccggcaatgtcccgcttgtcattcgcaattcattacccaacatatccatttcgtaacggaacccttcggcagaaggagcatcaaccgatacttttattcctcctatcggaagggccgccggtcccctgcccgtccaatcctcccaaccatccgtcacgaaatcgactttcgatatacgaatggtctggctattggtagttgtatggctgacacatcccacatctccattgcccataaaaggtcccataggtgcatgcttgctccgtatactttcgtaagagaaaggttcttcccatttggcagtcagcaagtttcgctttccggcgaaaaacgtttcgtctttttgttcatcatacatagactccatcctctgcatttgagccccgaccgcctgccgtctccactgaaacggcttatcctttttcaattccagacattctttcatcccatcgtgtgcccattccaaagtctcatcagcaacagcgtgaatggtaaacgattcaagtctgcctgctttccagcagatgtccagtgtgtgcccaccataaatacgcattcccttgagcgaaccatcgggaaatccaacgggccaggcgggcaagaattcgatatatccggattttgtaaacaccagcatctccatcaacagacgaggaaagctcaatatcgcatctagattgaagatagcacgtcccggctcatgggaagtgattaatccgtcgtaaagatagttccgcttactaaaacgctctatgttttgccgcaccttatccgcatctcccaaacgggcggcctgaagcgccagatgaatcaaaccgtgagcagaacttgtatcaaatccgaaacgtttgtccaacgccacttttgccgccttctgtaatgcaggatcggcatccggcccaaccaagtcaatccccgggaagacaggataaaggtgggaattatggcggtgattatagatatcgggataagccggatccacccactcagccaaagcgccgtcattgttaatgcggtaagccggcaatttctgcagtatagcattccatctttccatctcagcagaagaagcatggaaacgtcggcccatgtcacaaaggaaagtaaacacttcacgggctatcgccacatccatagtagcatctttacttagccatgtattcgtacctttcggagcgttttccggagaaatagaggttgtgatatgatataatccgtcagtaccttccaccaaatagtcttcgtaaaaatcagccatttccttgtataaaggatagactttctctttcagatatgtcacattgccggtcaacatggcatattcatacaaaggacgcaaattccatcctgccccacctgcccaaaacatccatggaaaggaactaccgaagtgtgtcaggtagccattggtaggatcattgtaatgagcaacgacaaagccgcggcaacctaaataattgcgggcgttcagtcgccatcccggcagcaggctttctatgtgtcggttataactttcggcacattcgggcaggttgctcatcgttgtggcggatatagccagattaagattggaatcccagacgaagcctccaatccatgcaggtttccatcctccactccatattccctgtaaaggaggagggaattttccacacgaagaaatcaacagataacgtcccatggcatgaagttgttcaaggaacaagggtgttggccctgtttctttgatctgtgccaacatctgttcagtaggcgtcactgtccattgttcaccacaacctaaatccaactgcatacggtgaaatagttcgccgtgtttttgcgcatgaggccgcaacaacttgtcatagtttgtagccaacttatccagcccagctttgacagcatccaacgaagcatttcgggcatcttcctgcgggacaatactcactataattaatacttcttctgcatttctgactaccaacgatttacctttcgtctgtatgtttcctcctctcaaagtaaccttcgccactccatcatatccgccgggatctttgtcgtatgcggcatgataagtgagccaatgcccggaagcttcccgatttacctcagaaaaggcatgatccaaatcgtgttcaaagtgttctccttcccgtccgggagtttcctccagactaagttccacatttattttccctttgttgtttgctttcaggcgaatgacattcacattgtctttccttgaagaaaaaaccgattctgtaaaactgcctgaaccttgcttccagacaacagtcgcttcccccgtctccaagttcaattgccgccggtaatctgctaccagaagaggcaacttgtccaactgacggatgcaaagatcgaaagccggatgcggaattaacggccatcgttgattagctcccattgcacgcaattgtctttctgcctcatccgtcaacagccaagccgcttcatccgatttacctttttccattagttgacgaacgtatggcatcaattgtgcagtttgcggaacagtcactttatgcctgccccatccgcggataaacaattcttcatgaacacaagtgattcgttcttcctgcggacgtcccgctatcaaactgccaatcttcccattgccggtcacgaaagcgtcctcccattgcaatgcagggttcttcgaccagatagtccaacgaccgatagaagaattagcggcagccaagacacctgtatttagcaaaaatcccaataatattcctaatccacagattaaaacatgcttcttcatagttactgatgatattaattccatgtatcatataccttaacccgcaccctggaatctcctttaaattcaatagcgccgggtaagttccctctttttttacgcttcctccccaaatagtctttatcgaaagccttctttccatccggcaactcaatccgctgtcggggaataacagcttctcccaattgctgcgaatagaccaatgctttagtacattccttgctcaatgatttcgtagggatgaactccagataccaaccatcagccatttcttctactctatattgcaccagtgtatctactacattcccttccatctttgtcggtaatttgctattctcgtacatactcaaattttcccgtaagagcaaattattgaagtaacacacattcccgcaaggacaatcatggtatcccttaatttgagtgtcatgaggaaacatataaggagtttgcctttcatccacatcgcctgtaggccatattttccaagcaattgtattgtgtacaaaagcaactccttgtgaaagtttgacttgcgccagttcgggcgacaaaaataaattattatccacaatgatgggaccgtggttcacttccaaggagaaatcctgtactctgttgtcgtgaaggagattacgtgtcacccttgtaccttgtgtcatccagtccagccaaatgccgccctccgtccgataaatgtgattgtgttctatcacagcgtctatagccgcatgcagtttgataccggccaattcgtatccccaaaatgaagaacttccgatatcatgaaccacattgtcgctaatggtactgaagattgctcccaaactacctgcgataccggcttgtccacagaaagaaacacgattgtggcgtacagaatgactgccgatatgctccctgttccattggttgtccaatgcccttttgacagtgccgacatatccttctacgctttctgccttattatcccattcatctccgtatttacctaaagtaatgcccacacattttgaatgagtaaccacattgtcctctatagtccatcctttactccaatgtgtaccgatagcccctatttgttcagcagtgggcggtgcccatggcgtagcagcttgactgacgtgaaaacctcttactgtaatgtagttgacaaacggtttctccggatagaataccgtccggcgtacattaatctccaccagttcacggttcggatcgcatcccggaaaattggcccatatccatgtactgtcatttcctactttactataccacaactgacgattacctttattcagaagcacatcttccaaccgttccgtttccgcaagggcacggtcattcaaatatacttctccggtatgcgaccattgtcctcttgccaaccaatcaccatgtatcgtatcattgtacggattgaagtcgccgaacaaactattagggatcaccgtttcccatgtctcattgttcagccgtctccaatttttaatgacttcggaacctttgatttccactttttctccttcagccgcttgataggttatcggtcgctctttagattctcctccccgcggtggagcaactctctccctgtaaacaccttcgtgtacgatgacaacatctcccgggtatgcccgttcggccgcagtctgaatatgacgcaatggagctgtcgcagagccatcagcactatcatttccactaatagaaacatgccactgccgaggtgattgtaaagacttcacctctttggcttgtgcaaagacacacatatatagcattgcataagtagcaataaccttcattaaactcatacttattccttccctacctttaaacttttacgggtagaaaaacctttacccgtagcatttatattgattttcgaaatctcaccggttctcaccaaaaatgaagcgactcctgcttccagtggatacgaagtaggacctacgatttctcctccttgtaccgacaattctacaggaattccgttaacaggacaaagtactccttgtttgtccagcattctgacatatacaatcagcaagtcattctttgtagccggtttgccactctcaaaataagtaatatccagacgttccgggactccgggagtcttcaccgtatattctgccacttttttcccttgatgataaccgacagctttcaatacccctctctccttaggtactccataaaacgtgaacggtgggaaatgaagattcttgccattgcctccattcggtacgggaatatagtcactatccgggcctttgtcagctgtttgccgtctgatagttttgccatttaaaaccagttctacctcatccacattaccgtacaccattactgtatcagataaaatttcgtccctatacgccggaataaatacctcataaggcatctttcccgaaggtagcatgctaccttccgcaatctgtgttctgaaaaaagaaagactgaatttaggtaatctaaagatgtcggccacaccactataacaaatattatcgcaacatccccgattgtaatcatacatactccataccgcatcccccattgtctttggataataaatacggtatcggttgtgcgaccattgcgcattccatgcgttctgaagttgagccttttctccgtctccccgtctgatacgtgttgtgctgtaatgcccgccaaactcataatcataatattcgcgtataaatcccggtttaccactattattgggacgtttgaagccttcttcccagtcattgtaacagacatcaaatcctttataaccatacgaatcgcctgatgtgaaacattgatctcccggcagttcctcatgggcaatcttgactactccgtctttccactcggccggaggccatgactcattaagcgttgtttcccacatcacaatggatggatgattacgatcacgacgaatcatgtcacgcacatcccggtgcgtgagcgatatgaacaacggatttttattgaaaaactgccatccgggtatcggttctatggcaagaagtcccaactcatcgcaagcatccaatgcagcagtagcttgcggataatgtcccaaacgaacaatgttgaatccgtttgaacgaatttgatacatatcacgatattgtgcctgatcggaaatagcattacctacatacggatattccatgtgtcggttactacctaccaacctaagtggttttccgttgatgacaaaccctttttcaatactcatttctatatgacgtattcctatacgagtttcttccttatctaccactttcccattttctacgacttctgtcgacaacacatacaaattcggttcatccggactccacaaagccggatgtttcacctccatgcgctgattgttttctattgttatgccagggtgcaatgtgagtgtttctgaaatgttctgtacttttttatcctttcctttctgctttttccaagtataaagcgtgtgtctaagttccaccactttttccttatcagaagtattctttatttcagttttcgcatccactaccgatagctcctgcgacaccttcggataggtaataaatatacctgctcctgccggatgtccgtcaagaatgggatgagtaatatgtacatcagctttcgctatcaagtgtacattccgataaattcccccataataacaaaaatcaagtgtttccaacggttttccgggaggaatcaacgaattgttacggttgtccaaacggactaataattcattttctttacccgttttcaacaatccggttgcgtctaccacaaatggggtgtatcctccggcatgttgcatgacatgcttaccgttaatccacacgtcggccaagtgcatcgcgccttcaaactctatccaaatatgcttcttcgcctcctccggcgtaatggtaatcttttttttgtaatagcagataccttgccattgatgcagcacagtcaatggttctacaaatggcgtatgcggaagagtaatttgttcccattgtttgttctccaactgccgcagttccgctcccaaagtattttgcggaacagccaattcgctattcccgttcatatccatgtgctgcacattgtattgtgaactccagtcacttccctgattcttgatttccgctttcgacgtttcatcggaaatgcgacaaaaattccaatcctgactgatacaacgcttctgcgcaagccccggagtcccgaggctaaacgcaaacagcaatagtaaaaaataaagtctgttataattcatcgtcctattttatatctcgttgaattcaatattatctttctccatagactaatattctctttccatcccaagaaacagcttcaatgcgtgtggaaccttcgggatagcaaacctttgtttcactcaggtcaggagaatcagttcccacaatggcagcatatctcaattcatctccctgataggtttcaaagactacagcatttttccacacatcgtgattgatgacaatccaaccattatttcttaccttgacaccttcattataagttccttctactgctaatttgtccttaaatgacttctcgctattggctgataagtaataaagcacgggagtggccggtttaggatatttggaagcatacttcaccaactcatcgcaatctgtttgggtaatagtcatttgtccacgtgcataatcgtccaattccttatcaataggtttcagcatacctgccttgataaagaagtcggtcaaatcctctttcacaacatccatagtattgcgcatgaaattgagctgaagttgcccgttagtcaattgtgattcatccgtattgcgtacaatctcagccacatcaccgtaccaatcgcgtttttctcctcccacaatctcacgataatagagcagcaactgccatagcggacagagtttcacaaagtgatcgcctccgtaaggatacttagaaggatccatattatcctgtcctttttggcagagccactgctcccctttgataataccataattgagataagaattgaaacgtccccctaggacgttattgttgtttccgtcattgcatttttcctgttccaacggcatactatcccgaccaaattgatatctcacacatacagaatatacattgttcgttacctctgttgtcgatacccatttcagtcccgggctgatttgattaacatgtcccagctcatgcgcaatagcccagtttcctttagatttagcagcattggccaattcgttcatacaaccttcataccatccagccccccaaccgtcagcaaacaatccatctttggtcacacggccgaacatatgattcttgggacggcgattgtgttgatccaatcccataagttcatgctccaatttcactatattgtcataactctgtattaaatctcctaaatcgtcacaatgagtctttacgctattcaccccaaatacaagattaatacgatcacctttgatatctatacaaccataagtagctttattcagaatctcacgccagttggccaatgcatcccgatgcttgtcgtaatatccgttcactttaccggaagcaatgtgcaatttaagagctgatgcagttctccaattcggagtataatactcaatataacttagtcctccatgtacaatccttaatttattaataccttcattcagaggataagagacagggtccggtgtactgtttccctgccttaccgcatcaaagtcgtacactttcaaattcacttgttccccattggtattacctaaaattacgacagcctcctcgccatccttaaaataaatacctgtggggttctcaaacggattatatccactagttttcatctctgtcgccaaatcgttaatttcacgataaggttcataagtttgcacacggtactccaaatcatacgtcttgtcatacaaactttgcgctatcattctgaaaaagttattctccaatccgtctattttgcgttgatccacatctgcacgaagttcggaacagagttcgtcggcaaaaacttccgtaagtcctgctacaggagcagcattcctataaaattccatttcaccgcaactcaccactccaccgacagcttcatttacctcaaatcggaaggactttacccccttcagcggttcagcaaagcttatcttcgacgaagaagaactaccagtaaaatcatacgatgctatcttttcataattttctttctgcgctgtggaaacatataagtcgaacttcttccaattaccattattgcctgaacctcgaggtttatatacaaaataatccacgtcttgaggagtttcaaaagtgtactcaagtttcacaggcaaaactgtaccataccaccgtgagtgataccaagtggacgcagttccgtcaaatgacttttcaatactctcatcatccgaattaaattcacttgcctttccactggcgataggcaagaatatatcgccgagttcagacggatcaccgggcttgtattctttatcccgatgtccctggcgaaacatcaatgagcgttcgaccttctgatccacagaacggaatacaacagagatatagcgcaccgtatcatcttcatttctttcaatgctgaaagtacgttccgattccgccatagcccgtacctgtacttgttgcttcatttccttaatccaatcagcgttttgcggaatttccacttcatattctacgttacttaccaccttgacggtaactaccgtatctgtatagttcaagttgagacgctcattctccaacaaaatatccggttgctctcccaattgtttcacgtgcactttttgttcaaggccttctcctttaacaacaatgtctgtttcacgcaagtctcttcccgtattcttttctaccgaaatagacaacaaatcatctgctccctgaaccgtacaccaattcccggatgaaggcacactggcttgccaagcaatgtttgtattcactacaatagaagtatttgcagcctcttgtgcaaacaccacagtgtccttctttatttccaaaaaaggttgcggtttgctttcctgatcggaacaagatatagcaaacagactcatcgcccagctacataatatcaaaataataatactatattttttcatggtttaaaatcattttagttataaaataaggttattcaagtactttcctttatttgcgattcaatgtctcaatcacaaaatgataagtcagcgagccttcattccacatggagaaattcgttccccacaaattgttgttcagattaaaatgcgcccctttacgtttatcaggatagttggttgaataattcaacccctgagcttctcctacgttgagtaagaaagcttccttactgctgatacgtatcgtttccccggaggttatcaaatcgacataacggtctatcccatgcatttgccggttacctttttccaccacatccatcaaatccacccgttcacccatcttctcggctatcaccgattcaataccgggcaccgtgaacgacaaccaataagattcgggcaaacgtactgccggtttaccataaatggtcaatgccacttccgacctttttccattctttgtcgtaaaacagttcacctgtattcgttcgggatatacacgtttgtccactttctcattttcaggaaacctcagttcagtgataatacgtgtcccctttttctctttacgtaccgattgcgccattgtctgtgcataaagcgttacactcactgcatgtgattctttcaaacctcgtttacctaagtcatccaatgcccaaccataccgtgcacgaagatatctattttgaaaatcatcataatcatccccatcaaacatttgataagacaatcccgccaacgtcattccaccggctatcggttgttcccaacgcttccgttccattggtttcatctttgagttatcctccagtttaaccttatccacttctgcgactacttcgcgcgcctctttttgcaaggaagccggaaggaaagcgatagcactatcgatataattatcaatctctttccatgaagcttcagccatactgaatattccttcggaacgacctttgagaaacttatccatatcatatttgtcccattgacgaagatgtgttttcacatccacaccttgcgtatgttctgctatcagacctaattcggctgcaaagtccaaagcaacgtcactatcttttttgattttcccttcattcaaccattgagaatacaaccgcgagacagcacgaaatttagccatacgtatcggtgctccaccataaccaaatatccacgtatcaccaatctcagaagtaacaaccggcaaatccttctttatcagcaacagttcccgggcgacatcattaaacgatgcacctacaagctgagcttgaggataacgcttacgcaaatcggcataaatctttttcacacgttcatagctatgcggtccgtggttgtcgcccgtaaaattaatactgacaactgtctttccatccggcaatacttcatcttctccataatctttctgataaaccagcaacaagtcattaccagaaggactgcgccaccgacagaaagtaggcaccgaaggtaacggacaagctgaattaattcccacatgcaaaagacgaatgcctgcgtcatacatcggatcgatgatactacgagtgtgtcccggcacatcagtcatctttgcagcaatagtctgcttgttgtatttcttatccaaacgtttggaaagcaacaagcaggtttcaaacagttcacgcgtcattgtctccgattccacagtatagggaacggaattccatacgatatcgccacgaccaatggcctcctccaactgcttcacagcctcaggagatgccgtgcgaagatatttccaaataagccatgagccggttgtccatacataccgatcaccaaagccgtcagcgcgcaagcgttcactaacttctatggctttcggaataaaatcatgcacatacctttcggtcacaacggaactaagatcagtaaatcccacatcaaggtgagttttgaatgcaacgtaaactttctcgatcttctcaccggatacttgagccatacaaccggctatacctaagaagatgaaaaaagtaaaaagtgatattcgtttcatgtcattgcatgtgttttaagaagattgaatggtataaatacattacttattcgtaaatctaaaccaattaaagtcggcatatccgttatttccttgcggcgtagtattgaagttgaacaatgcaaaacgattggctgtccacggcaatcccaatcccatctgcaattcattaccaatacgtttataattcacaccatccagactgtaatagaacaaagccttaaattctttgtctgtagcacgtacgcgtatccacagtttatctccattgaaatgctctacggtttcgatatccttaccgtcattacacatcacaattttgcgtctaccggattcttgtcgtatcgcaacataggcataaggaaactcgaagattccgaatccggcaatattgccatctttaagtccggtcacttccatttctaccgaaccctcgcaactcggtccctgaacacgttgtgtcaatgtattacgagcatctttcaatgtagaagcttgggaagcatacagacgcatatatcccttacgttccttcaaactccatctgctattatccggattatgattccattgccattgcagacctaattgagaagcattgaactcatcggtagtagccggactctttatcttcgattttttcccggtagcaggtttaggataagtgataagatcttttccttcatcacccagcataggccaaccgtctatccatttcacgggcacaagacacggaacacgtcctatcggtcctctgtcctgcataatcataaaccaccagtctccatttttcaactgtaccatcccaccctgatgaagtccgttttcgggatatgaactccaatcgttcattatgagtttgtgttcatagggaccatagatattatccgaacgcaagcagatttgccatcctcccgttcccccggcaggacaagtaatataatattttccattgatgcggtacatatgagatccttccataccgaaaccgcctcctaactcatgtgcatttttaaaaccaccctgccatatcttcacaggtttccctttaacggatttcacgtccgagttcaactctgtcaagtatagtgtaccttgcccgtgaaccacgtaaacctttccatcttcatcaaagaataaccccggatcatataaatattcaggaaatatagtacgttcccaaggtcctttcacatcatcggctatacaaatagagaaatgcccggtttcccgtccccaaccatagggtgtacagaaaccgacgtaaaattttccgttatgatgccgtatcgtagttgcccacgccccattcagataaagattgccaccctgcatatcatatttcggatcctcatcataacgatccaaagcatatcctgccatttcccagtttaccaaatcttccgatacagcaatagggcatcccggtacatagtgcatactggtagacacgagataaaacttatcatcaacccggatcagatccggatcgggccagtctccccacatgatagggttcgtaaatgttccattctgattatccggattccaaacagttgtttgagcgaaggtgcagtgcattcctgcactacacaccaatcctaaaaaaagtgatttatatatattcatatacctattgaattattatttaataaactctgcatcctcataataaggagctacttctatcccttccaacacggccccgcaagtttcggattgtcgaagtccgagcaccaatgtattcgttcctcccatgttcaaccaacattccggtaagaagaactcccgttgcggaccttcttcccaataacgtccgatattatgcccattcaaccacatatatcctgtacctgaagcattgataatggctctccaaggaatccagcattctttttccgttttgggcagatcaaatgttactttataccaagtcaataaggcatcttgtttacctttaggctgtatattgtttccttttcgatgcaatgtaccatcggttttcaatgtcaccaccttccaattgtcaccgccggcggttttccctccacaatatccttgtgtcactcctccaagatcaagcgctacttcccacttcagaggcttcagtattttcagttcactgaacaagcggattccctttaacaatcctcctgcaccgctactattacgcaccacaatagccacattattctctccttcatgcagaaaatctttcatattggctacaaacggtttgtcccaagcatcgtggcttgccacttccttaccgtttacaaaaagcgtacccgcatcatctacgcaagcgaattctatcattgtttgcccttcggtcaacatctgacgtgtcatatcaatagaagtacgataaatagccgttccttctttcccttgcaacacccatgcggcaggccattccggcttctccagtccggctatttgcaatgtagcaagattggcgatagtactttgatcaagcatgatggtttcccagccttcattgttagacagcagtgacttgatatctttgacattattttccacctttttcacttcccatttttcgataggaaggatagcagattgcttcttgcccaatccggcagatttcattccgctcaattcctccatcgggcgatatccatgagcgtgtccacgattttcatagatgcttacgatttcattgcttccctcatgcagtagcccatctatgacaaatgtattatccagttcatcggtagaagcccttttagctatttttccattcacttgtacataaagcggatcagccgtaaacatctcacaaaccaatgttccatattcctctacctctttcttcgatagttttactacactacgatacatggagtaacgacaatcgttcacaccaatttctggcaaagaaacacctttacgcagtggtcgccagttcccctgaaaggtttcatcacaacgttctgcctgtgcaattcgtatcggcataggcatattgacaggacgttccggcaaagtctgttctttcggataccattcacattgtccattcgcctgagatagtaccagcaccttgctgtccaatggctcaaccgagcaataaacattgaatgccggcataccttttatatgaaattgaacgttatcacggaatgcttttttcttatctttattaaatataaaaataaacaaagttccctcttttgtccggcgtactccaacggtcaaatccttgatgttgtccgatgtagtaaactctatcgcttcacttctcgctaattgagtaccaaaacgattgacgaaatccccgactcctttcacggcagcgaatttctcacccacaccaccactttcttttaatgcagctccgtaatcgtagctggtagtcatacggcgagcgccccaaccggctagatttgttcctccgaaaaacatataataattaagtccggtagaacctccggccattgccatcaatgccattccacgcgcatgacgtccatccaaatagctgtcctcactcaatcctccacctaccgtggaaaaccagccaccctgcaattcacacacaaaagccggtgcgttaggctgttgtctctttaaatcttcaatgcggcttttcgcctcctgtatattccaccatacatattgattgtccatatcgaacaactgactgataacggcatctttcgagcctcttacctcaggtgtaacacaggtaaacagcggtacctcaattccattgttcgtgcaataagctgccatgtcgcgcagcacctcttcttttttctctgactccatgccaaagtaaatgtattcgttctcgagttgcaccatgataattcctttctcaccggatttcttacgtgtaagctgctcctcggcaaaaaccggacaaacagcatcgtaccaatgtttggtccatttcatgtgttcgggatggttactgcgtaaccaaaagctagtgtcatattttgccggacaaaacttggcaatccatctaggataacctcctcctgcccattctgcacaaataaaaggtcccgggcggacaatggtatacagtccgaactcttcgtgagccatcttgagccacgccttcaggtcgtcaaaatcacattgcgaatagtcctttacattacgcggcatagtgcgctcatgccaattccacggcacataagtctccacagtgttgaatcccgcctcctttattttacggaaacgatcccgccataactcctgaggaacgcgaaaataatgaaaagccgcactcaagataaaaatatctcgaccttctatcgtgaagcaatgctgatcgtaacgaatacgttccggatgtgagaattgtttagcgggaagttgttcggcatataaattaaaagcaaaacaacatacgaggatcgatgttatcaatttgttcatgaagttctattgtttagacgaaagggagggagacatgccccctcctttccataaataataagcaataatttcagttattcttatatatcagctattccttgtcttcgggtcggtaaataccttccggatcgtaaatctcagttctgacagtatagaattccaactcagctaacgcaaagtacacagcattgccggaagtctcgtctgcacgataacggatgtatgaataaggctgtccttctgtccccaacgtaggtgtggtataagaagcaccacctttgccatcatcttctatttccgcaatcttgttccactgttcaccgtcattactccctaatacggtaatctccacaggacattgaccatactttccattacgatagtaagtttgtatcttaaactgctctacaggagatggaagagtgatatctatatagtgcggaacagtacccgcatcatgccaatcagtatgaaaaaagttagtgtaattaccatccaccaaatactctatatactttccttcatccggatcaggtttattacaaaacaagttgtctttacttaataaaattttatcagtgatttccttcaccaccggctggacaggaagtgcggaagctcttacttccaacttctcacccacatcttgggttgagctgacaggtgtggcatggaatgtgtattcaccatcttttgccaacataccctcaataagcatagtatcgcaaaagacactggcattcttattcacacgtttgcctgtgacaggatgagtatagtctatctgtacatagaacaggttggaatcgacgggaacttcccattccagcagcactcctccttcaagaggcgttgctgtcagattgctaatagccgacggtaagacagctgccttgtcatcatcgtcgttacaagcagataccataaatatggcggctaaacatgccatgaaaaaatatttctttttcatcgtaattgctattttaatgattaataacccggattttgcacaatcaacgtattcttattcaattccgaatctgcaatcggaagcaggtaatgagtcggtgaagtgaacttccaagcacgatctactaccactggacggaagaaatcctcatccgacacaccatctgtattaagagcagacggattgtggcctaagacatgctccaattctttccaccttgccatgtcccaacggtagtgtccttcgaaactcaactcgatgatacgttcttgacgaattatttcaattagcttatcttttgtcaacgtagcaattccttcccatgattcttccacagtcggtatgccggcatgttcccttatcttgttcagtgctgtcttggcaatgtttaattcacctgcttctgctgcagcttctgcaagattcaaatacagttcacccaagcgaataacaggccacggataattctggaacccgttgcgggtatcataagtaggcgtgcaccatttctttactaaatatccactcaatgaaaagtccgtagaacggttttgttttccatgattgtctgatttacggaacatagtaacaattctaccttcattatatccttcacgctgcatttcaaaatatccgttatggaatgaaacccatgaatagaaacgaggttcacgtttcaagttgaggttacacgtggtacgtccttcatactgtcctatcttaaaataatcatcaggagtgtagtatttcggatcttcgtcaatcgggagtccgttttctgtatagaatactttcacaaaatccaatgtaggacctactccattccagctattacctccattcaccggatcacgcggagcggattggttttgtgggtcataaacaccttccgtacgggtatccgcccaaatgacttccatatttttcttatccataatttgcatcttcaaagcatattggattaaatccttgggccaacattcttcaggaatttcgctttcattagcaatctgaaactgggtgtatttctgttcatccgccagcgtcaacgcttcttgacaagccgtaagcgcagtattccatttagatggattataatccaacggcatcaatggctcatttgtctccggatcgtaaagagatgagttggcataaaaactattgccattgaaaagaggagacgccgcatacaaataaagccttgctttcagtgctttggcagccagttgtgtagctctgccatagtaggatgatgattgaacggcaagcaatccgttgttgcaagcttcgtcatacttgtcggcaatccattttacgcatacgtcaaacggacttcgcttcagtttctccgtgctacttacactaacctcgtgatccataatgataatcggaccatatgcacgtagtaacatgaagtgataatacgcaatcaaaaaattagcttctgccttatatatgattttcagttcttcttccatacgtggtacagcatcgacattgtttatcagcgtataacaacgacgtataccggcatacatacgactccaatacgcgaactcacctatattggccgcggtatgggttccctcaagaaatttccggtcataatcggtaagacaatcacctccttgatataaatagcaccccctgcgttctttgggcataaaagcataacaagaatacaaatagcgttcagctgcatttttatctttaaatgcagcttcctcagtcggacgttcatcaggaacgatgtccaaatagtcgcaagaacttatccctgctaccagaaaaataagcaatagagcttggtatagtttgtttttcataaatccggtttatttattgattgaaaattgaacacccacattaaacactcgttgagtcggataagacaatccactaccgcttcccatttcaggatcccaatatttgaatggagagaatgtcaacaagttagatcctctcagataaacacggaaaaacttatggttgaatccgacctctaagtttttcaacttaaggaatgcaccgttacgttgccagtatgtagatgcttttgtattgttttcattgtcacgtttactgagacgcggatattcagcatagatattttggttagtttcactccaatagtcatcagctatgaactgcaatacattacgtataccttcagcaccaaaaggatggataccattcatcataatagacacacgagctgcaccttgaaagaagaaagagaaatcaaacttcttgtaacggaatgaaggaccgaaaccatatactatttcaggagttgtcggcatacctgtatattgacggtcgtttgaatcgataacattatcataattaccgtttacgtccggcaagttcttgtatttgatatcacctccgctcacccagcctccaaggttttgtttcggattacgttgcacctcggaatcatcgataaagagacgttcggcaatgtacaaaagctgttggtcaacagaatgtcccacacgtgagatattgggatatttctggaaatccggctcgtcatattcaagcactttgttatgggcatacgtaaatgttcccttgaatgacatatcgaaatcgttattgaacctcttcacatagtcgatagagaaatcaagtcccttattttccactttaccaagattaccatacatttttgtcgcaaggttcatccatttatcctttccattcgtaccccagtagtccggaatctgttgacgctccataaagatatcattacgtatttccttgaagatatcgaacgttatgttcagttcattcttgatacccaagtcgataccaaagttccatttgctacctacttcccatgtaatatcattgttggcataacggatatatttcggaccattttttgaaatgttttgatctcggcctgttgtatatcccaaatcaccgttttccaactctatgtttgaaagataaatgtaacgttcacctccaatttggtcattacctacaagtccccaagatgcacgcagtttcaaattactcaccacatcagagaacttttcaaagaacttttcacgactgatattgtatcctattgccacggaagggaagaaaccaaaacggtttcctttagcaaagttctcgctaccattgtatccgaagttcaattcagccatatagcggtaatcataagcataagtgacgcgaccggcaaatccttgcttgcgttgcggaagcgactcaatgagatcctcaggagcgttaccgttgtattggtcttgattgtagaggaacattccggatacattgtgcaccgtattgaacgtacgattataattaatcattgcctgaatatagagtcgacggtcaccactcgatttattcgaggtctgcaatacagtactttgttcagaaccaattcgattcaacgtgtagtccgataaattgtcagtattatagtttattacctgaaactgattgtaaccggccgaacgatcggtgttagtactactccagtttttgaacgagaacaaagcttctgcagaaaggccttcggtaatgaaatcaagtttttgctcaaatttcaggttggccataactgtactttcaaattgtgactgatatcctcttgccatttcagcgtatggattacggaagccactattatatttaccaccggattttccaccccaacgaatgtaatccacatttgggtcatccgggaaacgtaccggaaaatcaaccggattggattccataaccataccaaacagatcactcgtattagaggtaggaccagaatagtccctcagttgcacattcaagttcaacgacagtttacttgatttagataaattcagattgaagttattttggaacacatatcgcatgatgttgaggttatttttataactaaaatcatcggtattacgcaacacaccactatcatggttgacagacacactgctaaaataatctaattttttggaaccaccgcgaatagtaacattgatattttgattcatagccccgctacggaacaattcatcataccaattcacgttaggataaataagcggatccaatcctgcccttgtaccggcaatcttattgtcggaataaagcacctcacctgtaccacgtgtcaacacggcttcattgtacatctccatataacgcacaccatcaacaaacttcggcgttttggtatgggtggaatacgcgttttctaaacgaatattaacgatagctttgtcactttcacgtcccgatttggttttgacaatcatcacaccgtttgcaccacgtgaaccataaagcgctgtagccgttgcatctttcaacacggagaaactctcaataacttccggatcgatagcattcaagtcaccgctcgaagcttgcacaccatcaatgataatcaatggactccttgtgccattgaaagtagaaataccgcgaatccaaaagtcggccccatcagcccccggttcaccggaacgctgtacggcaaccacaccagccaaacgtccggcaaaacctgtagacaactgggaactgggaactttcagttcgtcaggcttcaccatctgtaccgaaccaactactgattctttcttttgcgtaccatagcctactacgaccacttcattcaacgtttgtgaagattccttcatgactaccttaacaaacgtgcctaccgtagcttccacattgaccggatcatatcctatataagagatactcaatgtcactttcttagcaggtactgtcaacacgaagttgccatcaatatcagtgatgacaccggtctcagtatgtcccttcaaaactacggacgcaccgataacaggttctccatttccatcccggacagaacccttaatctggtatttctcattgcttacattacttacttcttctctccgcttcaacacgatatctgtgccatttatcacataatccacctgagaattcgcaaatattccattaagaacttcggacaaattcattcctttagcagaaaaagaaatcttccgcttaacgttaaaatctttcgtattataaaagaaattgtaccccgtttttttttcgatttccttgagtgctttttcaatagtcacatcctgaaaacggaattccatagccgcattttgagaatgaacggtctcagcatacgaaatcccaatggacatgaacataaacataataaagaacctcataaacaaagggattttaccaattgcccataaaaaagtattttttcggacatttttttggttgtaattacataaatacataactttaaaatgtgatttaagattggtaaaaaatgattgttgcttgttggcagacaagcgatctcgttttttcaatatagaaaagcatggcagtgcttttctatatttttttgtttcttttttcaagttggtgctttcatagtacgtcaataattaagatgattaatataattctattgttgctttagctccgtcgtttcccggactattattctttacaatacgataattaaaccgacaagaaatagaaagattctttataatctgttccaccccctgatttttaattgtgccggtgaaacgactattttgcaattcgtcattgataatacggaatgtcacgtggtattttttagataagatatcaagcgcttcttgaagcggacaatcttcaagaacaatttttccgtctttccatcctatttctctttctatatcaacttcctccactttagatttccccgtttcagcatcataagaaatcttttgtcccggctgtatcaacacagctctttcttttttatcagccgttcggctaataaacttaaccgccccgctaaccagtgtcgtacttgctccttgcctgttagtcttgacattaaattctgttcccaacacttcaacttcagcctctgaaacagtatgaacaatgaaacgtttaccattttgcttacgcaccacgaagtaggcttctccatctaaatacaccctgcgttccttagcaaagtgagtgggatactttagtttcgcttgagaatttaaataaaccgtactgctgtccggcaaaagcacagtacaaacttcactgtcatttccgcgagcttccatccacacaatggcatcatttccatcactgttatctgaaaaccaataaatagtagtcagaataagaacggggagagctaatatggcagcaacctttcctatatatcgccaaatgcgtttgtgtttccgccgttccacttgtctccagaaattctgtaacgcctgctgaggggatgcctctttcgagttatgaagcagacgtgtagctacaaagatctgtgccacttgcttagccatacggctattggcctcggaactgcgtatccactcctctactttttgtttctcttcttcgctgacctctttttcaaaatagcggagtagcaaagattcatctatcattttctgttcttgcataattgacatcgtaaacgttttattacccgcctacatatacaatacacagaaaccggaggatgtactaaacaaaaaatgatttttttattgctgttcgataaaaaacttagcagatgaaaaaaagaagggagggagattataacataaaaccgtaaataaccaatatgggaagataatctttcaatctctcccgcagaattttgagagactgctgaatgcggtaatcaacagtcttaatggacacttgcaatgcttcggctatctcttgacgggttttgttttgaaagcgatgcatagcgaaagcctgatggtaggaaggcggtaattcgtcaatagcctcttggataagtgattgcagttcattgacaacggataaatctataaactcataaaaagcatcctgctcttgctcaaaccacgatgattcttcaagcatttccttttcttgtctccgaagtatattaaagcacctacgtttgacagaagtaatcagatattgtcgtaaagaagaggaagtagtatccggcacaaaagtcgtcctgttttcccatagccacatcatcaattcctgtaacacttctttggcgtcttctgctgacacataataacggccatacccatataataaggtatagtacttcataaaaaagtcatcgaaggctttcttatctcctctactgatagaatgccatagcactatatcctcatctaccgtcaggtttatatcaggttttatcgacattgcttggtcattttgaaacgatccagattacaattatttataatttgcaaatatacacttcttttttaagcaaacatcaaatatcgttaatttaatcaataaaaatatatactaaaaagatgcaaatctattacattcatatctgcatcatttacttttcattataaatctcccataaaggacatctcattccataacaaaaaagaaaaaagcagactcttctcattaaaacaatctcttcgtttttaataaactattgaagagtttattataaacggtatccaagtttattataaactataaattccgaaatcaaggatagaaatatgattttttgcaacaaaaaaggctacaaaccctataaagattcgcagcctttagtttatacgccccccctcacagcttaactactgcaagaaactactattatattgttataatattgcactattttatttttcattatttttaaatttttcctttatccattgatagttggatctacaaatatacaaaatcaaaaaggctttgtcaagagtttcctgcccataagacgttttttttgcaatccattgcgacaaattttattcttgtcgcaatgagattctctcataacggagagaatactttgaaaatatcataaccggattataactttataatcctatctattattaaccgcctgcgttaactgtttcaaggcctgttctaatgtagcacgcggacaagcaatattcaatcgcataaaaccttcgccttctttgccaaaggtagtgccctcattcagagccagatgagcatcttccacaaacagacgattcagttcttcccggttcaatcctaattcgcggcaatcaagaaagattagataagaagcttgcggacggatcatcttgatagtgggaacctgttctttcagatagtgttcggtgtaatcaatgtttccctgtatataggcaatgacctggtccagccattctgttccgtgactgtaagcggcagccacactaagataagcaaacaaatgcccttcactgaactcgcttgcttccatataggtctgaaaacggtgacgaagttcgtcattctcaataattgcataagaacttgccagccccggcatattgaatgctttactcggagacataaagacaagtgaattcatccgtgctttttctgaaatcaaagcaaaggtggaatgcttgtaaggaggtaaggtcaaatcggcatgaatctcgtcagaaataaccaatgtgccgctttcataacagatatcagcgatttgagaaagttcctctttcgtccatacacgtccgcccgggttatgaggattgctcaaaaccaacagtttacatccttgcacatctttgcggaaacggttgaagtctatatgatactggccatctttcaatatcagcggactgaacacgacttcgcgctcattcttctgtgttaccagaaagaaaggatgataaacaggaggcatgaccattactttatctcctttctccgtgaaacaatggatggcaaaagccaatccacgcacaatgccgggagtaaatgtcagcatatcttcgctaatcgtccacccgtggcgttctttcagccagttaatgatagactccgcccattccttgcaggcaaaagtatatccgagcacttcgtgttccaaacgtttcttcaaagcatctatcacaaaaggagccgtacggaaatccatatcggccacccacatcggaatcaggtcattgcgtccccaacgaccttccacggcatcccattttacggaatccgtacctttacggtttattatttcatcaaaattatagttcatactgcatgatgtttttttatattatgtgaaacagaagtagcatatttataattaatactgattattaatcacttacatagaattaaatcagaacttaacccattttgctaaccgggaacaaaaatagagatttccattgaattgtatagttcgaaaaagggaaaaattattattcattacactttctattccacccaagttaacaaactgataacggaaaatatagaagaaataaccaatgtaaaaatctcctttattgactattacgaacaataaaggagatttacctagaaattaaagttctttcttactgaaaagtaggcattttgaatctgtataataatccacctaccatggaagttacacggtcaggtcttccctgttcggagccatcgtatgtatcggtacggataccgattttaggttcggcgtacagatacaaagaagaagccaccttcagttttacctgcacaccagcatccagtcccggcactgctcggaacttaccataacggcgtaccagtccggccgtaactcccacaaaaggaacaacatctatcacatgattggggctgtatccttttgccaatgtggccagacttatcatataatccatacccaaaccagcataatggagattcatctttgacgacgttttggccttgtacataattgttccatttgcccgccatgcagataacggagtgtaccatttaccaatgcttccctttgcttctacacctgcattcttcaccaagtctttgttggctacaagcaagctacccaatccaagtgcaccggaaatgaagtaacgcttgtcatccagaccaaacacgctacgattggctgtttttgaataaggaacaaagagatagtgaaaacctgcattgactcctaccatcacgtctttctgcataaagcccagattaccttcaataaatttatctccataaaagcgaatctgcggttcaatgtacaaaccgagaaaatcattcacatgccataatccctgtatgcttgcattaacacccggttggaatttatggtctgatttggaagtataagcaaggttgatacctaccgaacctattaaatcaaagatacgatcgggattgtatccactcatggtagacattatgccccacaagtaatcaagactgccactgacgctggcatgtctaagtttgcccgctttaacacttcctggaactacatagttcgtaaaaaatccacctgtacccacgaggcgcaaaccggaataagggctcaaccacttacctatagaaacagaagcctgcggacctaaagaaccaaggttttcaaggttcgtcttattcaagaacatttgcacaccaattcccgaagtcataaacagattgtctgcgatgtgattgcttgagaatctgttcttcggacgtgccgcacggtcaatcgtatgataagtcaagccaaaattcaactctctgagctgatctgtattgcgacctactccgcgacctcctgcatatctcttactatacacattgaggcgaggttctataaataaatccacagaacggttgatacggaaacttccctgcacaccgactcctattcccggagcatacttggcggttttatccactcctttcgtacctgccagattaactccggcaataccgatcagactaaatattctgtcttcatcatatccccaaagaacattattgatattcaacagatagtcagcatgcagatcgacatgtttaaagtaaccgcttgcgctgcccgaaggggtgtccgaaatcccaactgtcccggacaaacgcagaccggaagaaggactgaaccatttaccgattccggcagagaactggggacctaatcctttaatcgtattcttgattcccggaactttcagtgtactgataccaccagataaagagataaacatatgattcaggaaggagctattatcgaaaccatcgaaatgtatcttagttcccattggagcaccaggcatataggtcagacctaccagaactgaaccagccattttatagtttctccaattttccgtatacgcaaaactgtcattataccatccgatccgtggctctacaaacaaatccaatgtagaagaaagacgtacatttccctgtaaaccgagatgagcaccataataaagctgaccgccacctttcaaatccggatacttttcggaacgatcgctattgtcacccaccttagaataaccggcttctatacctgcaatccctactaactcaaaacaacgatttgcattgtatccgtatgccagggaggacatattcaacaaatagtccaggctgccgccacccatttttattttagaatcgtagatacccgacgacagataacccaaattcacccctatccgaagtccgtgaaccggagtaatccactttcccataaagagatgggcggtcattcccattccatcctgactatctccacttgttaacaagctgtatggtcctattccggcagagaaaaagagatgttcattgaatctattactctcgaacttttcatttgcagggcgtttctgtaacatatattgcaatgcaccataatcctgtgcccgtaaggtaacagcaagcatcaggaagattgccactgctacatatttattgttgattctgaagatattcatcgtttactcttgttgtatatatcattatttaattttctgctcttctggcagcaagtcaataatatcaccatccaccttcgctacttccaataaggaaggatcaagttcaagggccttctcaatgctcataatcgcatcacctattttctccaggcggttggcggcaatcgcttttatataatattcgcgggcggtctctacctccatggtggaaatcttatcccatgcctcctgatttttcttcattgccaatagcatcaccacctcattgaaaggactagtagccgccaccttctcgaaagcatcattataataaccggccaatgcttgaacgatggcctgcaaatcttcagaaaccgcttcttcgggaaccaacgtcaagactgaatctgcttttgtatatttgccttcatgcagcaaggcaatagcctgattggataataactccaccggtgccgatttactgacaaacggttcgagaatatttgaatccggagtatctttctgtatcattactactgccagttcattggctgcatacgtaaagttaccataaagttcaagagcctccctacaatacttttccctctcgtcgggagtttttgccgtcgtaatcatacggtaatattcgaaacgggtaagttccttcggattctttctgtaaagttctctaatctcgtagtccgttaaagagcggaaaattgaataaccataggtatattgcacctttctcaatttaggcaaataagtagccgcaagttccttgtagaaaggtttcgatttcaagaccccattcaatcgatgaggagtagctgcgtattgtttgattaaatcctctacttctttagctagttccggcttggagttttttttcagcaattctgctacctccttccaggaggcaaccgatgcatccgatttcacttccaacagtttacgtgtttccgggtccagttgtgccagtatacgtcccagggctttatccgtacgcaattttgccagacgaagattcgtctcgtaagaaccgtccggcgaagccacccccgtaatatgaaaactcttcaaagaggcatccgggttcgtctcaatactacgtaattcctgattcaatcggtttagttccacttgattctgtggattcttatcatccaggtcggctttacctaccaaaaaggtcaagtttacctcgcctttcgtatcccgcaactgcatcacaggtttcggaagatatttctcatccgtcaggctgaaagcggagaatttatactccaaaaaacgaagtgggttgaccgttccgcgtgcaatggagaaagagtcacgataaatgatattcctgtaattctccattgccaaatgcacatctgcacggtagtcatgttgcagatattctatatagatagaatcatggtaagcaataatatcccccttgcgtgaagaagtcgttttcacacggatgtaatcatgtaaagggtctttatctatatcataatcgtacattcgattttgcgttgtattataagtatccccgtcgaatacaacaggacgcatcaacagacgctttttcagtgtcacatcataaatggaaggctgcaataccaagcgacgatgcgagttaaacatctccttaggcaccgggacacgggttttcagatggaaataattacccttgatttcgatgtccgtaggttccggaatcactttgtccttcactttggaagtaatcgttacttcgttcagctcgatgacggcatctttcaatactacattcaaaatttgctttcctgccaccttcactgttttgtcttcataaccgacacatgtaaacttcaacgagccgtttttctcaactaagacactgtaacggccatcctcgtcggacatttctatacgttcgtcattgaccggattcagcacattcacattcggaacactttttccctgcgggtttgtgatatgcccctgcacacggatccgttgggcggatacattcatgccgacgaacatcatcgccacgagaagtatacctgttaatctatcacgtttcaaattgattttcattctcttttctgactagctaatgttcgttatcgaataatatacacaaaggatacccccagtttaacaggtgcaatggtggtcttactatcgttgaccgcatccggtttcggaatacccttatcatacttgaactgacggtaacgcaacacacccactccggcagttgcttcgatattccaatgatcgcccagcacccatacatatccataggtcaaaccggcggcgtatgcatcacctttgtgatgcacatcttttaccatcatattaaaattattcacgaaagcggtgattccaagaaaatggctcaccatcggacgatttagccagtaacgaacttcaggctgaaaatgcgtgaaagtcgttttaaagttgtctgtactgattggattcgcagcaatccctatgttcaaggagacatgactacccaatacaaattctgcttctacattcggactggcggtcagccaacccaatgcatttgtcttcacagccacccgttgtgcgtgcacatgtacaccacaacataataacagaaatgataacgcaactattaccctgcgaccatttctcatcacatataccatcatttatttcccactaaatatttcccactaaatatttcccactcaatatttccccacaaaaagggcctactgtccaatttatacactccttgggcagaaagccacaaaattagaaaaaatatagtattaaaaacgtttaaacatgttttttttgttttttattgcaacaatttccatcttagaccatcatataccatactacagataaaataaactacagtataatagattgtagtcgctctctttgtatccgaattaaacagattaaaatccggtctaaaatcaaaaaaaatatttactcataattcagcataatgattaattttcagggttaattattatggttatttttcaggattaaaggtgacacaacccgaacaaacaactgattatcagaattatacataaaatatctggttatattttaacttttggaataaaagtagtacatttgtactcaattcaaaaaggaatttatgacgaaagctctattttttgacatagacggaacgctggtcagttttgaaactcaccgtatcccgccttctaccattgaggcattggaggcagcccacgcaaaagggctcaaaatatttatcgctaccggacgcccgaaagccattatcaacaacctttccgaattgcaagacagaaatctcattgatggatatataaccatgaacggagcctattgttttgtcggagaacaagttatttacaaaagcgctattccacaggaggaagtaaaagcaatggctgctttctgcgagaaaaaaggagtaccgtgtatctttgtggaggaacacaacatatccgtttgccagcctaacgacatggtaaaaaagatattctatgatttcctgcacgtgaatgttattccgactgtttcgttcgaggaagcaacaagcaaggaggtgatccagatgacacctttcatcacggaagaagaagaaaaggagatccgcccgtctatccctacttgtgaagtagggcgttggttcccggcatttgccgatattacggccaaaggggataccaagcagaaaggcattgacgaaatcatccgttacttcgatatgaaactggaagagactatggcattcggtgacggaggcaatgacatcagtatgcttcgccatgctgctatcggaattgccatgggacaagccaaagaggatgtgaaagctgccgccgactatgtgacggctccgattgacgaagacggaatcagcaaagcaatgaaacatttcggaattatttgagacaagcaaatacgaagatgagcgtagacactgacaatgctgcatttcaggatgcactgaatctgattcagtacacccgacagtcggtctttctgaccgggaaagcgggtacgggaaaatctacatttctgcgttatgtctgcgagcataccaaaaagaaatatgttgtacttgctccgaccggaattgctgcaatcaatgccggaggaagtacgatgcatagtttcttcaaactccctttttatccgctattgccggacgatccaaatttaagtctgcaacgcggccgtatccatgagttcttcaaatatacgaagccgcaccgcaagttattggaacagatagaactggtcatcattgacgaaatttccatggtacgggcggatatcattgatgcaatcgaccgcatcttacgggtatattctcataatctgcgcgaacctttcggcggaaaacagttactattggtaggcgacgttttccaattggaacctgtcgtgaagaatgatgaacgggaaatactgaaccgtttctatcctactccttactttttctcagcaagagtattcggtcagatagatttagtttctatcgaactgcaaaaggtttaccggcagactgatccggtttttgtcggtgtacttgaccacattcgtactaatactgccggagcagccgacctccaactgttgaatacccgatatggaagccagattgaagaatcagaagcggatatgtatatcacgcttgctacccgaagagatacggtagattcaatcaacgaaaaaaaactggccgagcttccgggagaatcgattacttttgaaggagttatcgaaggagattttcccgaaagcagtttacccacctcacaagagctagtgctaaaacccggtgcacaaattatctttatcaagaatgactttgaccgtcgttgggtaaatggcactattggcgtcattgccggtattgatgaagaagaagaaacgatatacgttatcactgatgacgggaaagaatgtgacgttaaacgggattcatggcgcaatatccgttatcgctacaacgaaaaaacgaaagagatcgaggaagaagtattaggtagtttcactcaatatcctatccggttggcttgggcaattacagttcataagagccagggcctgactttcagccgggtggtaatcgacttcactggaggagtatttgccggtggacaagcgtatgtcgcactcagccgttgtacttctctggatggtatccaactcaaaaagcctattaaccgggcagatattttcgtccgtccggaaatcgtcaacttcgccggacgatttaataaccggcaagctattgacaaggcattgaaacaggcacaggccgatgtgcaatatgccgcagccgcccgcgctttcaataaaggtgatatggaggaatgtctggaacaattcttccgtgccatccattcccgctatgatattgaaaaacctgttccccgccgcctgattcgccgaaaactcggcattatcaacaccctgaaagaacagaataaaaagctcaaggaacagatgcgggaacaacaggaacgcctacgccaatacgcccatgagtatctgttaatgggaaacgaatgtatcacccaagcacatgatatacgtgctgcccttgccaactacgataaagcgctcagcctcgatccaaactacatagacgcatggatacgtaaaggaattactttattcaataataaagattatttcgacgctgaaaattgctttaataccgcagtaaaccttcatccggcaaattttaaagctgtctataaccggggaaaactccggttgaaaacagaaaacacagaaggtgcaatcgccgatctggataaggctacaagtctgaaaccggaacacgccggtgcacacgaactttttggagacgctttgctgaaagccggaaaggaagtggaagctgcgttacaatggagaattgcagaggaactgaagaaaaagaaaaaacaataaatatatacaaaagggaggaaacgggaaccgcccgtttttccctcactgaccaatacactgttcctcaccgagaaagagaccgttgctcaccgaagaacgaatctcctccactacaacccttgaagagccattgcctcaaccactccctgccataattccgtgctttggattcccctaattttaaaataagaatccctaaaaaaatctcttttatcccttattatcaaaaagttttattagttttgttccttacatattatcagactcttaaaatagaagcaaatgaaaaaaggtttgaaaatcgcagctatcaccgtaggagtaattatcattctaatgctccttcttcctttcgccttccaaggtaagatagccgatattgtaaaaacagaaggcaacaagatgctcaatgcgcaatttgactttaagaaacttaacattagcctgttccgtaactttccacaggcttctgtcactctcgaagatttctggctaaaaggcactggtgaatttgccaatgatacccttgtacaagccggagaagttaccgccgccatcaacttattctctcttttcggagatagcggttacgatatttccaaaatattcatcgaagacacaaagctgcatgccattgtgttgccggacggacgtgccaactggaacattatggagccggatacgacagccgctgccgagactcccgctgcagaagaagaatcttcccctttcaaagtgaaactccaacgtttcgtcataaaaaacatgaatctgatttatgatgaccaacaaggaaagatgtatgctgacatccaagactttaacgcaacctgcgccggagacttaggcagtgaacgcaccacactgaaactggaagcggaaacaaaatccctgacttacaagatgaacgggattcctttcttggcgaatgccaacatctccgctgaaatggatgtggacgccgatctggccaataacaagtacacattaaaggataacaccattcgcctcaacgctattcaggcaggtattgacggctgggtagccttgaaagacccggctatcgacatggacttgaaactcaataccaacgatataggtttcaaagaaatcctttcgctaatcccggctatctatgccaccgaattttccagcctgaaaaccgacggaaccgccacactgaacgcaacagccaaaggcaccctgctaggagataccgtacctgcgttcaatgtcgatatgcaagtcaaaaatgccatgttccgctatccggctttaccggcaggagtagaccaaattaacatcaatgccaacgtacagaatccgggaggaaatatcgacctgacgacggtggatattaacccgtttagcttccgcctggcaggtaacccgttcagtctgactgcctacgtgaaaacgccggtcagcgatcctgacttcaaagtggaagcaaaaggaattcttaaccttggtatgatcaaacaagtatatccgcttggagatatggaactaaacggaacaatcgacgctgatatgcaaatgtccgggcgcctttcatctatcgaaaaggaacaatacgaccgcatactggctgctggaacgattggtttaacagacatgaaacttaaaatgcaggatatgccggatgtagaaattaagaaatcactctttacgtttacacccaaatatcttcagttgagcgaaacaaccgtcaacatcggtaagaatgacattactgccgacagccggttcgaaaactatatcggttatgcgttgaaaggcactaccttgaaaggaagtctgaatatccgttccaactatttcaatctgaacgatttcatgtcggctacgggtgaagaaatgtcttcgtccggtgatgtaacaactacggattccgttagttccacgggaattgttgaagtgccccgcaacatcgacttccaaatggacgctaatctgaaacaagtactgtttgacaagatgtccttcaacaatatgaacggcaagcttactgtcaaagacggtaaagtagacatgaaaaatctgtctatgagcactatgggaggaaatgttgtgatgaacggatattattccaccgccgatgccaagaaacctgagttaaaagctggattcaaactgacgaatataggttttgcccaagcttacaaggaactggatatggtgcagaaaatggctcctatctttgaaaatctgaaagggaacttctccggcagtatcaacgtgttgacggatttggacgcagccatgagccccatattgaatacaatgcagggaaacggcagcctctccacacgcgaccttagcctaagtggtgtgaaagctatcgatcaaatagctgatgcgattaagcaacccaacctgaaagagatgaaagtaaaagatatgacactggacttcatcatcaaagatggacgggtagaaacaaaaccgttcgatattcaaatgggagactacaacctgaatctttccggtagcacgggtctcgaccagactatcgattacacaggaaagattaaacttcctgcatctgctggtaatatctccaaactaatgactcttgatttgagaatcggaggttcgttcacttcacctaaagtcagtgtcgataccaagagtatggccaatcaggctgtggaagcagtagccgatgaggctatcagcaaattaggccagaaactcggacttgactctgctgccagtgccaacaaagattctatcaaacagaaagtaacggaaaaggcggccgagaaggcattggacttcttgaagaagaaacttaaataaaaaaataaggaaaagaaattatgcttctgaagctatatgataaaaataacaatccgcaggacttacaacggattatcgacattctgaatgatggcggacttatcatttatcctactgatacgatgtacgctatcggctgtcatggactgaaagagcgtgctatcgaacgcatctgccgtatcaaggagatagacccacgtaaaaacaatctgtctatcatctgctatgacttgagtagtatcagtgaatatgccaaggtggacaataacgtcttcaaacttatgaaacataatcttccgggaccgtttactttcatcctgaacggaacaaaccgactgcccaaaatcttccgtaaccggaaagaggtaggcatccgtatgccggacaacaatattatccgggaaattgctcgtctgctggacgctccgataatgaccaccaccttgccatacgatgaagatgaggatctggaatatataaccgatcccgaactaatcgatgaaaagtttggcgatatagtggatctagttattgacggaggtatcggaggaatagaaccttcaacggtagtaaaatgcacagaggatgaaccggaaattgttcgtcaaggaaaaggttggttagaagaaagttagtttcttcgacagaattcattacaaaatgggctgctatcaattcaacattgatgcagcccattatttatagagtctgttctatattatttaatcaaagattccggatccaaatgaccagcttcaatgtccttgaaataacggtaagttcctactttcaattcttcagtcgcagcatcatcacatacgataatacctttttcatgcatctgcaatgcactgattgtccacatctgagtgatagaaccttctacggcatgatacagtgcacgggccttgttgtgtccattcacgataatcatcacttctttggcagaaagaacagtacccacgcctactgtcaaagcagttttaggcactttattgatatcattgtcaaagaaacgagagttagcaatgattgtatccgtagtcaatgttttctgacgagtacgtgaagtcaatgaagaacccggttcattgaaagcgatatgtccatcaggaccaataccacccatgaacaagtcgataccgccataagacttaatcttttcttcgtaacgtgcacattctgcatccaggtcaggagcattgccattcaggatattcgtattttcagccttgatatcaatatgactgaagaagttattccacataaaagaataatagctttccggatgttctttcggcagtcctacatattcatccatattgaatgttactacattctggaaggaaacgattcctttcttattcagatcgatcaaagctttgtacatgcccagaggagaagatccggtaggacaacccaatacaaacggtttttcaggggttggattggcagcttttatttttgcagcaacgtaatgtgcagcccactgagatacggactgatagtccggctgaataataagtctcataagtcgattgttttataggttagttaataaattaataatcttattcactgttttaacggtctttcttcaagcgctctgccatggcatgtgccagattctcgcattgagtgtaggtaatatccctcatcgcctgcttcatctctaccggatcgcctaccagttcaaatttactcttttctgcaaactctgccatacgtttcaccgcagcacctgcccatgcgaaagaaccgaaataacccagataacgtcctttcacctcacgcaccagaatctttgaaagcaatgattctacctccgggaaaatctgattgctatatgtaggagaaccaataatcaatcccttataacggaaaatatctgctataatataggaaggatggctcttagcaacattatgcattacgatattcttgactccttgtgcagaaagttcttcagcaatagcctcagccatttgttctgtatttccatacatacttccgtatgcgataactactccctcatcagcgtcataacggctcaaacgatcatatataccgatcactctagctatattttctgtccacaccggtccatgagtagaacaaatagcagaaataggaagtccgccaagtttctgcaaagccttttgtacaggacttccgtatttacctacgatattagaatagtaacgaaccatttctccccaatacttatccagattaatacgggtatccagaaagccaccgtctactgtaccgaaacatccgaagccgtcgccggagaaaagaactccgtcagtctcatcaaatgtcatcatcgtttccggccaatgcaccataggggtcatgtaaaagcgcagtttatggcgacctaaagccaaaaaatctccgtccttcaccagatattgttccccggtcacaccgtagaaaccttcaatcatgccgaatgtctgcttattacccacgataataatctccggataatgctgttttatcaatcggatagatccggaatggtccggttccatgtgatttattattaaataattgataggacgttcaccgatcacttgcttgatcttacgcaggtatacttcaaaataacagatgtctactgtatccaccaatgccaccatttcatcatcaatcagataagagttatacgaaactccatagggcaacggccacatcgcttcaaaacggtgtttattacggtcattcactcccacgtagtggacatttcctttaattcttgttttctccattcttcaactttattaatttcactttcaccaccggcttcctctaaaaaacaggtaattattcagtggcaaatttatcacctgcaaaaataattcttttttccgaatccctgtacttcttcccttgataagcacctctttctttcattcttttttgcaaacgtactacaaattcataatttttcaatccccagtccggagctattaataaatctttaggagattgagagacaaaacgttctacaaccatatccggacgaagatgttcgacatagtcaatcaccagatcaatatattcgtttacctccgtgaacagatgaaaatccgccgggtttatatcatattcgtgcgccatacgggtcccgcgaatcaactgtaactgatgaattttaagagttgacaaaggaaggtcagacaggattcccgcttgcgccaccatagcgtcagatgtttctcccggaagtcctagaatgatatgtccgcctacgagaatgccacaagcagccgtccgcccgacagtttccacggtatcctcataagtatgtccgcggtttatgcgctgcaaagttctatcacaagtactctcaataccgtattctaccattagaaaagcgtgtttgttcaattcctccagatagcgcaacaacccttccggcatacaatccggacgagtaccaatcaccaaccccactacgtcttctacttccaacgcttcctcatatttacgttttaatccttctaactctgcatatgtattagtatatgcctgaaaataggccagatatttcatttcaggatatttacgggcaaagaaacatttaccttcctccaactgagcagtgaccgacttctctgtccggcaataatcaggattaaaggtctggttattacaataggtacaaccgccccaccctttcgtcccgtcacggttaggacaagtgaaacccgcgttcaacgaaatcttttgtactttatagggaaaatacttacgcagaaaagttggaaaatcattatatagaagatgagttgacatattcattactgttcattcattatttaatctacaaacataagaaaaattagcgaggtaaaaaaagatgccccaaaatatcttcaatatattaaaataatcataaataccataagataaattaataaatattgcaaaaggagaaactatttaactagatttgtcttgattttaggcattgacgggaggacacttgtgaaagtattgtgcaatttattccccaattatgatttcatctcaccataccccatgcaactcacgtcaataaaataatcctctttgtattctttaaccagaatataaagaggattttatatgaggatactaaacaatagtatatgtatgcttatttttgattaataaatgaaagttttatcttcagtcataaaatcagttttataatcccagtctttctttcaataatctgtaaccggaaaggcttacccggagcttaaccccgttttttagtaataattgatatgtttctttcccaaacagttcaacccgtgatatctgtgttacgttgacaatagtcgaacgatgaacacgaacaaatgtttcaggcggcagatgcgtttcaaaatatttcatagtttgttctttcaggtattctcctgaaggagtgattaacatcacataatcaccacaagcttgtatgtagattagttcatccgctttaatcaaatgaatacgtgaaccgtctttcactgtgattcgatcaattaatccagccggaacttccaccggtgcctcaactacctgatgcgcaatcagttctttttcaagttcctgattcaaaacttcttctttagcggtaatcaaacgataccaaagagttaccgcaatcagaaccggtaactcgaacaataaccggaaagggattgtctgtgtaaaagggatataggatatacctgctatccgtaccatactatcacaaaccataaaacaacctgccagccaaagcagacttcctaccactatcatgataatatctgtctgcaacaacgaaacgagcccgacaacataccatgccagataggctaaggcagctaaccaacccatcgttgctatcccatctaccaaggcaggaaggtaatcagctccggtgtataggcagactaatgctacctgagccgcaaccaacaccagcaaaagcagcagtatcggaatccaacgataagggtaatctataattggatgtgctttcatacactagtcttttatctccagacctccaaaagaaagcgtacctcgaactactaatatgctctcatagttaatatccccgttatgccaacgtttatcatcacagccaccgaagaaagtattacatttgaatactactttccaatcggaaggaacataaatctcaactcctccccagctacagtccagatcgatataagtttctcccaacgcaatatgggtatgacgcaaatcaataactgtacccccgaacgaagtacgaacaatagctcctttgaatagctcatcaagtacgacatgacgtgccgctccccaaacattttccgaatgcaaaaagccatcgacagactcgcattgttgctgttcttctttaaagttcatacccagacctctccgtttcatccattccttgcgatgatgtgccatatggctatgagaccaaggccctcttcttcgggatttgaaaatcaacaaaacacccgctattatcaaagcaagaggccagaccattgcctgagaattctcaggcaaccatgaaagcccacccaataagaaatagacaccaatcaacaaaagaattattcctcctacaaaatggcgacgtatcatcgaatatatacctaatataataaaaagagaataccaggatactatcgtgctaaacaattcagcagtaatccatcccatattgcgggcaaacagtagtatccccgaaaggataaaaagtgaagctaccagatatttaccggaaaagcctgtagcagacaaagttttttgtttctcttccattatttctattattaattgattaatggttcaaagatacgccatttctttatgcttttacaggcttttctgctgatttacggtcaataatccgatgaataccggataaaaaccgatgaaacttatcataatactcattgttttacctgctttcacaagcaaatagaactaagaaatctaatcattaaaaaacaattatttggaatgacttgccggaaaagtattctccaccaagccattcagatacacctctagatttgtataagcagcactcaaattatactttgccccgtcagacgcatcattaggatttaagccttttgctatttcccatccgtccggtataccgtccttgtctgtatcgacaagagaagaggtttcagttatatattcgtcccacttttctatagtatcctcctgactgtctatcaaaccatatccaccacctttagatgcattagtactataagtaccattagcagtttcacttacaatacgcctatcaatcttatctcgctccggaatgatatacttattatccttccagccacatgtccatgcccctgcatacgccagcacagtttcgtaagcgtctgtagcagattgcataaaactgtaatcagaaaggatatcaatgcgcatgtccaacaataagtcagaagatgttctttcgtcattctttaccttgaatgcagtagaagaagtattattggcgttggcgctggcaatctccttctgctgttcgcctgacaagtccacacatgtattgtccattatattgccattcacataaaagtaaccaaatactccggcatcttgggcattctttccatcatctatataagcggtgaaaaaacgtgcatgagttttatccttggcggaagcaggacctagtttataatagttgttcataatattgtaataacctccctgagctccataagcaccttcattagtccaattataaattacattattacataagtccaccttttccacatctgcccgattcgaataacgacttccacaaagacgcggagtccgattactgtgatgagccaacaaattatgatggaatgtggcaggtgagccaccccatattccaccataaccatgagcctctttttcatgtatcgaatgccacaagctttcgctgagaatacaccactgcattgtaaaattagtattcccataaaatgaggcacattcatcagtgctccaactcatggaacaatggtcaataataatattctgctttccgggataattattctgataaccattcatcgcatcatcctctattcgtttttcatctcccatacgacaacggaggaaacgaataattacattattggcattcacccgcaaagtgttgtccttcaaacagattcccttacccggagctgtttgacctgcaatagtaatgtcatcgttggtgataactagttgtttctgcaattcgatcactcctccgactgcaaagactattgtacgtcttcccttctgctgtatagcatgacgtaaagtacccaccgccccatcatcagctaatgaagtcactatatatacagtacctcccgcacctcctgttgtatactttccggcaccataagctcccggaaaagcaacaatggtggtacggtcgggggtaggatattccggtagccccgattcatctgtcaactgtttttctgttgcctgttcgaatgaacaggcaactactcccccaaaaaagaaagccgacaatataattcccaatatattttctttataaacccaaataacaagttgtccttttattagtcttttcatgttcctgatagtttaaagtgattatcctttttattacgaacgagttcacctcacaaaagtatggaaacagaaatatactcatgtgcaatatttgtttttcactttgtatttattgttgattaattatggttgaattaaaaaaaagacaagtttcaaataacaataaatactatgcgaataacaattattacacacgtagctacctaaatattcatacctttacgccattaaaacgaaaatcagaataaagttccatatcaaaacaataatcaactaaagaaagagcatgaataaaaaactaccggcagcactgtgcattttactcactatacctataatggtaagtgcgacaacctatatatccattgatatacaggataataaaagtgtcaataatgagaagaaagactatccgacccctgatcgaaacaaaattatagcttttcccggagcagatggtgccggaaagtatacaacaggaggtgccggaggtactgtatatatagtgacttcactagccgatgacggttccgaaggaactttccgttgggctatcaaccaaaaaggtactcgcacaatcgtttttgcagtagacggaatcatagagctgcaaaaacctctgagagtcaacaatggagacctaaccattgccggacaaacagctccaggtgacggtatctgcctaaaaaactatactttctccattcaagccgacaatgtaattgtccgttttatccgctcacgcatgggagttgacatcaaacaaaaaggagacgacgctatgaacggcatcaaaaaccaccaaaatattatcattgaccactgctccatgagttggagtaccgatgaatgcgccactttttataataatcgcaatttcactctccaatggtgcatcatcagcgaaagccttgccaactccattcatgaaaaaggagctcacggctatggaggcatttggggaggacagactgcaacttttcatcacaacttattggctcatcacaccaaccgtactcctcgtctttgcggaagccgctatacaggtaaaccggaagaagaaaaagttgatttattcaataatgtaatctataattatggtagtgacggagcttatgccggcgaaggaggttcctacaatttcattaacaactattataaaccgggacctttcagcgctacaaaaggttcttttaaacgtttgtttaccgcatacgccgatgatggaacgaataagaatgaagccggtgtccacggtatattctactttaatggtaattatatggaccctacttgttctaaactcaccgataaacaaaaagaagctctttacaaagtgaacagagacaatgcctacggactggtaatcaagaacgactttgcacctgaaaaaaagttgttgtcctctaaagctttcaatatagccgaacgtacttccttgcaatctgcgaaaaaagcatataaagacgtgctcgaatatgccggtgcttcgtatcgtcgtgacataatagacaaacgcattgtagaagaaacccgcaaaggtaattatacttatgaaggttcccacggtagcaccaacggcatgatagaccagccatcggatgtaggaggatggccggaatataaatcggaagtaactttagtcgataccgatggtgacggtatgccggatgaatgggaaaagaaaaagaatttggatccgaacgaccctgccgatggtactaagtatagtttaagtccggaatacacaaatctggaagtatatatgaacaatctggtcaatcatttattccccacaaagaaatagaattttgacacataacacttccaaacagacacaggaaagcggaaagtatatagcaatacttccgcttttttgttactcagaggtggaaaaacaatatttcccatgataaaaacaattattgcacatagatagcgctgtcgatgacttatttttgcacaaacaaagccttacaagtaaccgaatgtttataatattaacaatctatatattaaaagaaaaatgatgtctaaaagaatgaaaaacatgcgagttttactgctaatgatattagcagttttttcgctaagcgtatcagcgcagactattaccgcaaccggtaatgtgaaagatgcaaccggagatccaattatcggtgcttccatcgtagaaaaaggaaatacctccaatggtacgattaccaatctggatggtgatttctctctcaaagttcctgccaatgccactcttattgtttcatacatcggtatgaagacacaagaaattgcaatcaaaggaaaaaacaaaatcgacgtaactttgtctgacgacaccaaagcattagatgaagtcgttgttatcggctatggtacagccaaacggaaagatatcacaggttccgttgctacggttagttccgaagtattgagcgccgttcctgtagcttcggcaacagaagccttgcaaggtaaaatggcgggcgtacaaatcaccactaccgaaggttctcctgacgcagaaatgaagattcgcgtacgtggtggtggttctatcacaggtgacaatactccgctgtttatcgtagacggtttcccggtagagtctatcagcgacattcccgcatccgatattgaggatatgactgtactgaaagatgcatcttctacagctatttacggttcccgcggtgcaaacggtgtaattctggtaacgactaaaagcggaaaggaaggaaaactgagtgtatcttataatacctactattcctggaaaaaaatggcaaagaccttggagacattgagcgcaactgattacgtaaaatggcaaagagaatacgccttgttgcgaggtaatgaaagcaaatttaccagtcttttcggcaactggcaagatgcagacttgtatgaaaacgccccaaccaatgactggcaagaccaagtattcggccgtacaggaaataccttcaatcatagcttgacaattagcggtggttcggacaaaactaaattcaacatgggatatgcccacatgaatgacaaagctatcatgctggggtcttctttccgacgtgataatttaagcttaaaacttaaccacaaggtaaatgataaagtcagcctcgacttctctatgcgttatgccaataccacagtaaacggtgcaggtgccaatgaaagcaagagtgaagtatcttcagccgactcacgcatgaagaacgttatgatctacccgatgtttaactttcctgatttgagtgacagttatgacccggattttcagttgacaaacccgattacatcagtatatgacacagaccgcaagcagaaccgtcagactttcaacatgaatggaagcttttcatgggaaatcttcaagaacttcaagttcaaaacagagttcggtctggactggtactacaataccgataagaaatattatggtccaagtacttacaatgcacgtaccaacagttccgatacagaaggtgttcatccgatggcttattttgccgacacgcagcgtaagactttccgcaataccaatacagtaaattacaacttcaaagatatcatcaagaataaagaccacaacctgaatgtattggttggtgaagagactatcaataaaaaaagttcattgaatgatgaccgtctgagcttctttcctgtcagctttactgcttctcaggcttgggccttgtcttcacaaggtactccttatagtgtagacaaatatactaacgcagacgacaacttgctttcctacttcggacgtgtcaattacgatttccaaagcaaatatttgattagcggtacattccgtgccgatggttcttccaaattctctaaaggcaatcgttggggatatttcccttcagctgccgtagcatggcgtatttcctcagaaaagttcatggagaagacccagaattggcttgatgatttgaaaatacgtttttcttatggtaccgcaggtaataacaatattcccgccgaccagacttctcccgtatggtcttccggttctactacttggctcaatcaattcccttcttattggacaagcggcattgcctcaggtcaaagtggttcctacgcatccaatccggacttgaaatgggaaacgaccgttacccgtaacgttggtttggattataccttattcggtggcaagctgaccggtagcatcgaatattataagaatacgactaaagatttactaatcgcattccctgtttccggttccggttatgactaccagtaccgcaacctcggtaagactgagaacaaaggttttgaaatatctcttacctggaacatcatcagcaagaaaaactatgagctgagcttcaatggtaacgtaggtttcaataaaaacaaagtaaagaacctgggtacattatcacaatatccggcatcatccggttgggcctcaacacagattcaggatgacttcatcgtgaaaccaggccattcagtaggtgagatctacggatatgtaactgccggacgttatgaagtaagtgactttgaagactattatgccagcggtgaaaaatgggtattgaaacaagatgtagcaagcaatgcaggtgttatcggtgccagttatctccgtccgggtgccttaaaactgaagaatatagacgacagtgacaatgtcattgatgaaaaagaccgtaccgttatcggtaataccaatcctaaagccagtggtggtttcgccctttcaggtcgcgtatatggttttgatttgagtgcaaacttcacttacagtatcggtaatgacgtttataatgccaataagattgaatatacttcgtcctatcaatactattaccgtaacatgatcgacattatggccgaaggcaaacgttggacaaaccttgacgccaacggaaacttggtaaacgatcccgcacagttggctgcattaaacgccaatactaccatgtggtcaccctataccagttatgtattgaccgactgggctgttgaagatggctccttcctacgtctgtctacattaacagtaggttatactctaccgcagtccctgactagaaaagtgggtattaacaatttgcgtttctacgccacatgttataatgtattttgtctgaccggttattcaggcttcgaccctgaagtttccacccgaaacaaaacagctcttactccgggagtagactactctgcatacccgaagagccgccagtttgtaataggtcttaacttaaacttctaaaacgaaaaagaaatgaaaaatataacgattaaatcattgacagctgtcgcccttcttgctagtctgtcttcttgcagtgatttcttagatcaaagttctccttcatctttagacggtaagaacattttcagtacttatgaatatgcacaaggcaccattgccaatatctatcaggaatttggagagcaaaactatcgtgcacgtgctatttggtatggatacaatacagatatagaatactataacagttcggacaaggccgacggaaaggcagacttggcaacatacaatgccggagtcggaaacgatcaaatgaacaccagtaccgggaccgacctttgggctaagatatatgccgctatcgaacgtgccaatctggctattgaaggtcttcgtgaatatgcagacctgacaaatgccaatatgaaacaattgttgggggaagcgctcacgctacgtgccttacattatattgacctgattaatatgtggggagatgttcccgcacgcctgacttcattgaacgctgacaatatgtattcaggacgcgaagaccgtgatgtcatctacaagcagctcatcattgatttgcaagaggcacaagacctttgcgcgtggcctaatgagatagacgccacaaaaacagtggaacgcgtgaacaaagtcttcgtaaaaggtctcctggcccgcgtatgcctgcaagcatccggctacgctcagcgtcttgacggagaaaaccgtttaagtacggatccggaactatccaaagcacgtctctaccctatcgcactgcaagcttgtaaagatgtaatggaacaggaaggcacttacgtggctttaaaatcaaattttgaagatatcttcaacaacaacggaatctcaggagatgttatcaatgcaggcagtgaatcattgttcgagataggttatagcaataaccccgcacgcggacgtatcatgtacactttcggtatcaagcataccactgccgacaatatgacaaccatgcttcagggaagccaggttggtcctacaccaactttcttctttgactattcagtaaaggacttgcgccgtgatataacttgctgcccattccaatggacaaaaggcgtacaaactcttcagtctttcaaaagctggagtttcggaaagttgcgttatgaatggacgaaccgtatgattcctaccggaaacgatgacggtatcaacagacaatatatgcgttatgccgacatcgtactgatgcgcgccgaactggaaaacgagttgaatggtgcatctgctgccgttccttacctgactaagattcgcaaccgcgcttttgcgacctccgaccgtgcaacagaagttacagcttatgttgcagaagcagctctcagtaaagaaaagatgttccaggcaattgttgacgagagagcttatgagtttgccggagaactgatccgtaaagctgaccttatccgttggggaatgttgaaaagtaaaatggacgagacaaaaaacaagatgaaagctattgtgag

SEQ ID NO: 2989 - DNA, 71733 bp, Unknown
  gut microbiota DNA sequence
gaaaaagcttttttttgatgtactggtaatttaaaagtgctattattaataatatttttaattaaaaatctaattatttaaacaatcttctctatctttgcaaatgaaattagattttataaaggcttttttagccgctaattgacggcaatgtattactaatagtatataattaaattttatgatatcacaaggaaaaaaagtaatagaagaacgtttacagcgcaaacgggaacagtgcattcatcaaaaggagaaactggaacaaatgaaatgtacaatgcagaaaacagaagaagaagtagaacaattggaatatgtcctttatgaaatagagcatatagagaaatcgaaacgtgaaccacgggtgattcctaatgccgaaataagtaatgtctttgcatctctttgtcgtgaatttgattatttgcagcataggttaaagctgttttttaaatataagctggtatgtgaagttatatttgctcgttatcaattccgaagccggtcacatgttcccggacgggaatatcttagctatgccaccgtgctgacttattttaaacgtgaaagggggatggtgaactcatgatttcaaaaatatcgaaatataaagataataacatgaaaaacaaatgttttaggaacagaaatgactaaattgatattttttccttatttttgtgtgtccatttttgaatgatatgatgcagataatacaattaaaaggaaaagacaaacacttatatcggcttttggcaccgttggttatggatcctgaagtaatacgcgccaacaataattacccttttaagacgggtgaggagtatgtctggtttattgcaattgaagataaggaagtgttgggtttcgttccggtggagcaaaaaggtcggaagaaagctgtaatcaataattattatgtgaaggcagaggggacagaacgggaggagcttttgtcgttgttgttaccggctgttattgctgaattcggatctgagacttggttacttaactctgtcacgctgatacaagacaaagaaatctttgagaaatttgaatttgtatccatggataaaaagtggacacggtatgttaaaatgtatagatgatttatgggcaaaaagaagatagcgggcacaaagaatgtatatgaactagcacaagagcgactgaaagttatatttaatgaatttgataatatctatgtatcattttccggaggtaaagatagtggggtgttgctgaatatgtgtattgactacatccggaaaaataatctaaagatacgtcttggagtctttcacatggattatgaaatccagtataaaatgaccattgactatgtggaccggatactggaagctaataaggatattctggatgtataccgggtatgtattccttttcgtgtagctacctgcacttctatgtatcagtctttttggcgtccttgggaagatagtaaaaagaatatatgggttcgccccatgcctaaaaaggcaatgactaaagacgactttccgttttataatacaacgatgtgggattatgaatttcagatgcgttttgcgcaatggatacataataagaatgatgctgtgcgtacttgttgcctgatcggtattcgtacgcaggagagtttcaatcgttggagatgtatttatatgagtcgtaaatttcagatgtaccacaagtataaatggacttcgaaagtgggaaatgacatttataatgcttatcctatctatgactggaaaacaacggatgtgtggacggctaacggaaaattccagtgggattataatgtgctatatgacctttattatcgggcgggagtcaatctggagcgtcagcgtgtagcaagtccttttatcaatgaagcacaagagagtcttcagctctatcgggtacttgatcccaatacgtggggcaagatggtaggacgagtgaacggagttaactttacaggtatgtatggtggtacccacgcaatggggtggcagtcagtgaagctgccagaagggtatacatggcgtgagtttatgtatttcctgttgtctactttgccggaacgggcacggaagaattatctccggaaactgtcggtaagtgtaaatttttggcggacaaaaggcggttgcttgagtgacgctactatccggaagttaattgatgccaaaataccgataattgtcatggataacagtaattacaaaacactaaaaaagccggtacgtatggaatatcaggatgatatagatattccggagtttaaagaaatacctacgtataaacggatgtgtatttgcatcctcaaaaatgatcatgcatgcaagtatatgggattttcaccgacaaaggaagaaatgagtaagagaagtcaaataatggaacaatatagaattatagtatcatgagtgtagataaaagtcctgtctacgaggtaaaagcggtgcccgtagaaaaagtatatgcaaacgattataatccgaacgtcgttgcaccgcccgaaatgaaattacttgaactttctatctgggaagatggctttacaatgccatgtgtatgttattataataaagaggaagaccgttatattctagtggatggttatcatcgctatacggtattgaaaacttcgcagcgaatttataaacgtgaaaacgggctgcttccgattgtggtgattgacaaggatttgtcgaaccggatgagttctactatacgtcacaaccgcgctcgtgggatgcataatatagaattgatgtgtaacatcgttgcggaacttgacaaagcaggtatgtccgatcaatggattatgaagaatatcggtatggatcgtgatgaattattgcgcctgaagcaaatttcaggacttgctgatttgtttgctaatcgtgaatttagtattccggatgaagtagcacccacagaaacggaacgaaaaacgttataatctgatagctatttatatacaaaaattgaacattctaccatttaggcatagattatataagttttcggcttttttattgtgtaaaatagtcgtttctcttgtctgatttatgcctggattgtatctaaatgatatgaaaatctattagtattttcctatctctttattttgatattcgaaactgttgttttgaaaaatatgcgaatgtcgaaaaaatatctccgattaccactttttattttatattccgtaatcccctgatttgtagttcacattaatagtcttgttttcagactcggattatctgtaacagaaatgaatacaattctgtatctcctttaatattccgaaatttgcaatatgaaatttaagtatgttttggaattggctaaaagagataaatgaatgattgttagtgagagtagaatttatataggtttagtttgctttttattattactgtctttttcttcttgtattgatgagacttttacaaataataatgaaacggaaagtacttttatttcgataagaggaataggagtgcaaggtaatacacatctgggaacggatcctgatgactatatcgttgaaacccttcgtgtactggcatttgataaaacaactaaagatattgttaccaatgtgcgctatactgcatcagaaggtgatattatacgtcatactattaatccgggaacatatgactttgtttttcttgctaatgaacctgctaatatccccgttttaaatcaattgaagagtatttccaattattgtgatttagataatattgcctatcctgaacgtttcttcacgtccgatcaaattatacccatgaaacaggagattaaacaggtcactgttttatccaacgggcaaggggcccgattgagtgacaatacggaagtaactatattgcaacttgctcttgaaagattggctgtgaggatagatgttgtattggaatcagatgatgaactggaggatattttttctggacttatatttcaaaacattccggatgcggtacctcttactaccaattatcagggggtgatagggcagagtaatatacgtacttttaaaaaggatacggatggaagttatttttcagctgagactcctactgaggggagagtatgggcaaagagagtaaaccggattattttacctgccaaagaactggaggtgacagaggacaaggcgaaggctgtggtactcactgtagatatgggaaaccactatagcccttcttgtgaactgaagattgtttcggaaccggtgaattatagcctgccgataaatacaatgttgtcattcaagggaattgtaaaagaaccgttggaggtaaatatcaaagcttccaagtggacggatgaaaataataactggaatatagatgacttgcgcatactgaatgtttcacatacgaaagtgtcgataaccgattttaatggtgctcggatttcattttcgtcaaacatgcctgtagtcagagtactgcccgaagtgtataatgtaacaacgggtgagatagtggaaactaatcgtatctttaatagcttggtagctcaaagtacgacagactggactactgctcctgaacggtttatgtatgccgccaacggacaagaggggacgggatatatggaccttctggctgacggatggttgataaaggatgagatatttgactatataaagaagtctccaaatctgaccggtacatataaactgacgttatctgctgaaaatacagatggcagtaatgctttgcaaagggatattactgtcacgatagaacaaaatggaacacgtcttcaattctatcatccggctgtaaatccggcgaatggagcaacaggatatgccggagctttttggaaaaatgaccagtgtggagagcgcatcattacgggacagcttgccagagaaggggcagatgccgtaacgatagtaaattggagtgcgcgagtagatgaagaccctgataatatggtaatcctgagcactactcccagttttgatcctaatgtcggaacggctaatccgggagttgctgaaaatttccgtgtaacacccaatttgcagaaaggagaggatggcaagaatgtttccggtaaaggacgtatttacttccgtatcggactgacagaaacaaatcctgatccggctactccaaggtatgcgactgtgaaattgagatattggttatgggggtggggggatcagcctgtagaggcaactctttatttgagacagggagaaaccccggattatttatatcccggacgggtagggtcgagaaaatttgctgtttacaatatgactcacaaaaattttctggctactccgatgacaaacgattttagtatcgttgtgaatagaaataatgcttcggaagttgatttcccgacaaaagcaggggcacatttccaatgggggcgactaaaagaaggagattatggtagttctcccgaagatgcagaaatggatgaggcatataacgcgcttggctatagggcattgaatccacatcctggcatgaatgcgattgggcttgaaggctggggatggagctattacaaaaactatcagtatctgacatgggataacggaattccgtcagaaagctatagtacaaacctggaaatttgtcctgaaggttatcatcgaccgaatgatggtagcataaccggaggattagtggcttcacataacagtacaactacggaagcggaggcatcagaatggagagcatccatatttaaaaatccgatgacaggtgacggtaaccaagggtataaatcggttagtccggagtctggaactcaagctagttctccttcatattatgctcctgtaactcttcctgataatatgacttttgggttctatgcagacgggtattttgatagacgtcccatagagcagaatttgattaatggtgatttgatacaatatggagttactataaaaagtgcgaatgccgcatattggggatgtatttttttcaatggagttaagtcattgttttttccttccgcaggcagacggaattacggtgtgggaggagcaaatgaagcgggggtattggaacatcctagtgccggcttttatatgacagcatcagcggctgatatccctgaaccggaaggtgctgattatgttgattggagttctgtgtggaatatagaattaagttatgaagggacagcaccagtgagcacttcatttaaaaacgggttgtctttgagatgtgttagaaataaatagagaatgaggttacagattaatatatatataatcctttggttgcttctctgcatgatttcttgtgtgaaggaagaagatttttactctacggagaccgaaaacattgagcaagtcagcatagaactgtttacaaggttaaggtcatttgatactcctgtgtccagggcaatagcgctggaagatgatgtagacaaagccccctggatacttgtatttactggtggcgacggtacggctggcaatgcggtatttgcagaagcggcacaggcaaatattaatgttggaaataaaagttatgttttgcttagaccacagagcggcaaatcatgggtattgatattggctaatcctcaggataaattttatgtgggcagtatgtcttacgacttttcggttgacaattttaatgacctgttcacaaacaagacgcttactaatgtgacagccttgctttcagctatgccaatgactgctggagttgtagttaatgctccgccattcgtaaacaagatgttgccgatgagttatttgtatgaagctactgagggaattaacgtaaatacgaaaatcggtacgtctactgtacctttggaactaacacgttcggtagccaagattgtagtaaaaagtacagttgctgatttcaccttatcagggatacattcggtgtacaatatgaataaaaatacagtattgcataatctttccggcaatttggaaactgcggcaagtatggtagattatattagaaatgatgcaaatgaggattttgtttctgcaacggctaatgtaactgaccctatatatgtatatgaagcgaaaagcggaaccggtgcctatatgataatacgtgcattttataaagggctggaatcttattataagatagcgatcgctgatgatgaactcaagtatatagacatcaagcgtaatcatgaatacagatttacaataatatcggccaattttcctgggttcggcagctatactgatgctcttttggctgagcccaataacttggctttgaaatgtaaagttgaaataatagacctttcttcttttgagattaaagccaatagcgaatattaccttgctgtaagcaatcggctttgtatgatatatgatgatatcaattcagaacatcaatatcttgcttttacgttgacaacaaattgtacttatgcacataagttttccgataagagcaattatataagagtgacgaatggtacgatgactattgttgccccggcatcccaaagaatatcttctgcctcggatccgaatacaccgttcactgtggatgtggtagtcaaacttcctaccggtagtattgacaattcgagcattaatataaaacttggtaacattgaacagaaggtcagcgtgataagaaaggatattattcctgtagcaggaatggtcgtaaattattatacgcagaattcaggtatctatgattttgactattatcttctttcggctaaaacagatacagatatatcatggattacgatgaaaaataagtatggtggcattagtggcgatcctaatagtattcaagtcggtgacggaataattgatatagatatagcatcagcttcttccgcaagaaatgccgttgtctatcttacgactataaagaatccgaaagaacctctggaagatgataaagatataccgaaacggatcaagatatatttttaccaaaacggatcttgataataaaataataaatgcattaatattaaaactaggaaatttggaaaaacaggtacacatcagacagagagatgcagtggatgctgccggaggaatatttaagtatatgcctgcttataatcataatccggcggccaaagagataaactatttttgcctgaccgggtacatagaagatggtgatgataatcctaaagattggattaaattacgtccgtcaacaatgactcatcgagataatacggaccatatcattgtggaagacggaaagatatttattgagatattgcctaataacagtgttgattcgagaagtggtattgtgtatttgacaacaataatacccaacggatcatctgtaaatggtagtactatgcaacgtatcaagattgatattactcaattgggcatataaaacagtaaatgtaagataaatgaagaagattcttatactcatattattaatgtccgggtgttttattcttgaaagctacgcccaaaaggttgcgttgaaaagtaatttgttatatgatgctaccgctaccatgaatcttggtttagaattcgggctggcacgtaaatggacattggatgtaccggttaattacaacccgtggaaacccgataacggcagacgtctccgccattgggggattcaaccggagattcgttactggttctgcgaacgttttaaccgaacatttatcggactacatggtcattatgctgatttcaatatagggggctggcccgactggtcttttgtgagtgggaatatgcagcaaaaccgttatcagggacatctgtatggtgcgggattctcggtagggcattcgtggatattgaaaaaacgctggagtattgaagcgtccttaggattggggtatgcatatattgtatacgaaaaatatccttgcacaacgtgtggtacaaaatcgaaggatacgagtaagaattacttgggaccgacaaaggctagtgtgtcacttatttatgtcattaaatagtataatcatgatgaaaagaaatatatattgcgctgtatgtctgctgactgttttgtgcttggacatggttccggctacagctcagactcgttcttatgacggtactatcattgtgaaaccgatacagctggaacagaaaggagattttcttcatattgatattgattttgatttgaaagatgtaaaagtaaagtctactcgcggggtggattttatcccacagttggtggctcccgaacgtatgctgaatcttccgaaagtctctattaaaggacgtgatgaatatctggcttacgagcgttggcttgcggtgatgagtatcaaagaaaagaagaactatgataaaccttatgcggtagaaaaaggaagtaaggtgaaaaatggtgttcttccatataggtatatggtgcgttacgaaccatggatggaaaatgcacgtttggatgtgcaacgtgacgagtgtggttgcggtgagataaaatcgatgaacgtagagcgtttggtggataaagttacgcttgaacgtgtattactgccttacgtcgtaactccccatttcgcttatttgcagccgaaggctgaagaaatcaaacagcgggacatacaagcggaatgtttcttagattttgaggtgaataggataaatatccgtcccgagtatatgaacaaccctcaagaattggctaaaatcaggaagatgattgatgaattaaagtcggatccgaatgtgaaggtcaatcggttggatattatcggctatgcttctccggaaggaacgttagtgactaacaaacgtctgtccgaaggacgtgccatggctttgcgtgattatctggcttccaaatatgatttcccgagaaatcaatattacatcatttttggtggtgaaaactgggacggtttggaaaaagcactggatacaatggaaatagagtataaagatgaagtattggatattatccgggatatacctattgaaaaagggagagaaacaaaacttatgcagcttcgtgggggagtaccctatcgatatatgttgaaatatatatttccaagtctgcgtatagctatttgtagagtgaattatgaggtcaggaattttaatgtggatgaagcaaaggaggaaataaagagacgcccgcagaacctgagcctgaatgaaatgtttctggtggctaatacttatccggtaggttcacaagagtttatcgatgtgtttgaaacggctgtccggatgtatccgaaggatgagattgcgaatataaatgcagctactgctgctctttcgcgcaatgatcttatttctgccgaacgctgtctgagtatggtagattcgatgaaaaaattaccggagtatagcaacgcaatgggagtattaatgttactgaagggggaatatgaacatgcggaagaatatttaaatgtcgcatacgaatcgggactcaaagttgccggatataatttggaagaattaactagaaagaaggctaatgcctctgaatttagaattaaaaatagggataaataaattaattacaaacgcttttattaaattgtagaaacaatgaaaaagaagaatttttttatgttggcacttgctgctattgcatttgctgcttgtagtaatgaagacatcgttcctggtgggaaggataataatgatgtagtgaacttagatggtgatgcatgggttgcgttaagtgtccaatcaactaaaacgcgtgcgttgaatactccgaatcaggacaatggtacggctgatgagagtaatattactgccgtaaaagctgtattctttgatgggcatgttaacacaagtgtagtaacaaaaattgtaacgtttagtgatgaagatatcaataatttgcccaacagaacgagtgcatttaaggtaccttctacgtctaaagctgtattaatcattgctaacccgcagaatctggcccggacaattaaggaaggtgataagtatgaagatgtaaatgagattgtaacactttcaacggaagcagaagttactacaggtgttgccaaatccggtgggtttgttatgacaaacgctaaaggtgatctggaaccttcggaaagtgatgggactgcgaagaacttagccttatacagtactgcaatagcagctactaactcgcctctgactattagaattgatcgtatatcggctaaagtacgtgtatacgtaaaagctgatagcggtgatgatgatgatcttagtgacaatgccactattgataaggttaatactaaatggtatttgaatgtaaccaataagaagttttttcctgcgtctaagagaattaagacagcaatgaattcatggactccatatgatcagtatagcattggttcatatagacaagacccgaattatgaagatagtaatattggtaagtgggtatcttctactaatcattcagattatgatttaaattatttttatgtaacgtccgctacaaattctatcacatggaatgatctggctactgctaaatactgcttggaaaatacacaagaggaaggctataatgtacatgcttatacaacacatgtattgttgaaggttttttatgctcctacaacaattaagaatcaagatgggtctaaggtgactttgcttaatggagaggactggttcaatatgaatggtgtattttatactccgacttctgttttaacgtatattgaagaagaattgactcgtaaatataaatctggtgaaccggccgaatatccaacgggaataacagacctttacaacgaatttatagaagcacttggcgaaggtgatgatactcttaatccggtaaatattcccgctgctaaggatgatgctaaaactccggagcagatggcttcagacattaaagatgagtttgcagcattagcaggaaaaatagccacaaaaagtgcaggtggcaagactctgaaagctgttgaatattactcaaaaggtatttgttattacaaaattatgattaaacatgatgatagtcccactataatgaataaattgggtgagtttggtgtagtccgtaattcggtatatgatattactgtaaataagattgataatcctggctatccttctattccggatccggacccgattacaccggatgaagaagaagaccgttatttgtccattaaaattgaggttaacccatggacttggtattcgcaagttgaacctctgtaattttatattcattgttttattgcgacttgaggtaaagagggggcgctctctttacctttaaaacaaacaataggaagaaaaatcgagagctatcaataatttcaaaatttatagcttgatagaaattagaagaatagaaatatgaacctaaaaagccttatatgccgtgttaccttggggattctcattgttagttcctgggcaatggtttcttgcgatagctttaaagaagatttgccggaatgtcgcttgtctgtaaagttcaaatatgattataatatggaatttgctgatgctttccatacgcaagtcgataaagtggaactttatgtttttgataaagacgggaagtttttattcaaacaggcagaagaaggtggttcgctatcgacaggtaattatctgatggaggtagcattgccggtgggggagtatcagtttgtagcatgggcaggtgcacgtgattcatacgatattacttcgttaattcccgggacttctaccattacagatttgaaattgcagttgaagcgtgaggagtctcttattattgacaaagaattggaaacgctttggtatggtgagattatcaatgtaaattttacaggaacaattcatcagacagagactattaatcttataaaagatacaaaaagggtgcgttttattttccagagttatgcgaataactgggaattaaagatgaatgattatgattatgaaattcgtgagtctaacggatatttgggacatgataattccttactggatgatgatgtgttgagtttccgtccttatcatatgaatcagttgaattctttttctgcttcggtagacttgaacacaatgcggctgatgaaagatagaacaactcgtctggtgattacggaaaagtcgacgtcaaataaggtatttgatatcaacctgattgattatcttgctatgactaatatggaggataaaaagatcggaatacaggaatattttgatcgccaaagtaattatcatattgttttctttctctctggttcatggcttgcaatgaaaattgtcattaatggttggactgtgtattcgcagacagaaggagatttctaatagaaagagttagacagagggagaattagaaggggccgggttattatcaacctaaccccttcgttatttataaagcttcaataacttcatgctgtttctgcatgaaaacgatgcgttgtgcttctccgctttcagaaattagagtggagtgacgttttaaagacagaatccagtcacgttgcatctgacagatatgcgaattgatagaatatacccgtagcagactgattcgataatttgctttttcgatataactataagtagcttcaaagtttatgttagacaaatagaaatatacctttcgtccattactaaactctcctttacttgacagatgttcgataagtgaaagcaattggtgaagttcttctttcagatgacgtacatcctccggtgttatgagattcagactggcaaaatacttgatttcattgacgaatgaatgaaaaatgttagtgtcccagataaaaaaagttttcgggcattgtttcacactttcactcaatcttttatgcgcctgttctattcgtttttctacacacatatccgataaggaatggggagttttaatctgcccgtgctggtatagccaccgacaaaggcggaatttggataaatattcgtaagaagaataaagtgtgaaaggcaagaggttggaggctgtgtatatctctgtactactatcttctttcacatagtcaaatatctgttggtaacgattgagaatctcataataattctctatcgcattaggcgaatggaggagattcaaatcaaaagtaactttattggaatgatggctaccaacaacctggtcgatagaaattcctaatttggaagatatagtagctatttcttcgatagaaaaagaaacttcccctcttagtctgcgatagacagcttcttttcccatgaacaagatatccgccaggacgctggcaaggttttgtccttgcggaactctttctttcataactgcaatcaattcattcaaaataccatttttcattgtttgttcttcgtttttaatatgaataatattcgtgatacatttaatgcaaaattaaagtttgtatttgaaagatttgtgtggaaaaacaggtataagacaggagtgaattttctgattaaatataacagataggggtgacggacatataatgaaaaaaagtagataagtattttatctactttcatttattgtaattatggattttacatctttttgttttacgaaaaaaatgaatttaaagagtatcaatgatttccctctgctgtttgaagaattggatacgttgcatttcaccgctttcagaaatcaaggtggagaatttctttaaagactgaatccattcctttaagctacagaagatttcattgtccattgtggtcagagaattaatggagtaaacgcgtatcaggcttagttggatgttattagtttctacataactgtacgttgcctcaaaattaatatgcgacacatagatacgaactgtgttaccattctctgttttacctttagtggcaagatcttccagttcgtttgtcagtaggaataattctttcttgatatcttctttagcttcatttgaaataagatgaatgctggaaaagtattggatatcgttgatgaggtgctgaaagatcatactgtcccagatataatcaatagaatggaaatgctttgtcatatccacatagtccttttggatattaatcaatttctgcggaagttccagttcctcaaaacttttacattggatatatttattctgatacatccacttgaataaacggaattttgccagaaggtcatgtttcaggtaaagcgtttgtggaatgatgttggaagaagttcccaaagaagaattcggatcgtcttccaatgtattaattagtctgacgtatttatataatatattatagtagctttcgaaagggtcatcgtaatctacaatattcatatcaaacatcgcattggatttgaaactgattcctataattttatccagagatatccctaactttctcgaaacgagagccgcttcttgtaaagtgaaaggaacctcaccacgtaaccttctatatacggcttctttgcctatatagagagtatccattaacatatctgccagttttcctttgagtggaagcttttctttcatcgcttctatcaggtttgtattcgggtcatttgttatcataacagtttgaataagttgttctttagtattataaacatttctcagtgatgagttgtttcggaaagtgaaactatttaattaatcttttttcaaaaatatccttctttaaaattgtatattttgagcaaatcggttacatttgtgtccataaacaaaacggagagacagtgtctctttagtaaacaatagaaaaatatataatgaaaagaatattggttagtggcggagccggattcattggctctcatctctgtacccggcttataaacgaaggtcatgacgtgatatgccttgataatttttttacaggatcaaaagataacatcatgcatttgatggataatcatcattttgaggtagtacgacacgatgtcacttacccttattctgctgaagtagatgagatttataatttggcttgtccggcatctcctatccattatcaacatgacccgattcagactgccaaaacatctgtaatgggagcaattaatatgttgggactggcaatgagattggatgctaaaatattgcaggcttctaccagtgaggtatatggagacccaattgttcacccgcaaccggaaagttattggggaaacgtgaatccggtaggatacagatcatgttatgatgaaggaaaacgctgtgcggaaactttgtttatggattatcatcgtcagaataatgtgcgtgtgaagattattcgtatattcaatacgtatggtccacggatgttgccgaatgacggacgagtcgtttctaatttcattttacaagcgctacataatgaagatattactatttatggagacgggaaacagacacgtagtttccaatatattgatgatttggttgaagggatgatacgaatgatgaatacggaagatgaatttacgggacctgtgaatcttggaaatccaaatgagtttcccatattggaattggcagagagaataattcgtatgaccggttcttcttcgagaattgtatttaagcagttgccggatgatgatccgaaacaacgtcagccggatatcacactggcaaaagaaaaactcggctggcagcctactattgaattggaagacgggctgaagtatatgattgaatattttaaaactgtctgatgcataaaataagataattatgaatatggaaataaatccttctgaatataaagtccttattgtggacgatgtaatatcaaatgtccttttgttgaaggtccttttgactaatgagaaattcaatattgtaactgccggtaacggcacgcaagcattggaacaggtgaagaaggaaaaaccggatttggtgttgctggatgtaatgatgccggatatcagtggatttgaagtggctcaacagatgaaggcagatccggaaatgtctgaaattcctattatttttctgactgcgctgaatagtacggcggacatcgtaaaaggattccaagtaggaggtaatgattttatttcgaaacctttcaacaaggaagaattgataattcgtgtaacacatcagatttcgctagtggcggctaaacgaattattgttgcacaaacagaggaattacgtaagacaattatgggacgtgataaactctattctgtgattgcgcatgacctacgttcgccaatggggtctatcaaaatggtactgaatatgttgattctgaacctgccgagcgaaacaatcggcgaggagatgtatgagttgcttacaatggcgaatcaaactactgaagatgtattttcattacttgataatctgctgaaatggacgaaaagccagattggcaaattgaaggtggtttatcaggatatcaatatggtagaagttgtagagggggtaagtgagatctttacaatggtagtcggcttgaagaatattaagattgtgcaggatatacctgttgcagatgtagctgttcgtgctgatattgatatggttaaaacggtaatccgtaacctgattagtaatgctatcaagtttagcaatgagggggcggaagtggtggtatcgttggctgaggaagacggtatggcaatcgttagtgtgaaagatagcggatgcggcattgatgaagaaaatcagaggaagttgcttcatacggatacgcactttagtaccttcggtacaaataatgaagaaggttcaggactcggattgttgttgtgtaaggactttgttatcaagaatggtggtaaactctggtttacttcaaagaagggagagggatctacatttagtttctcaattccattactggataaatagaatataaaacggtaatttataaatcatgaacggtgaatgttttgtgcttgtatgtagcattcaccgttcatttttttattcaatcattatcatatttatgctcatcgtttgcagattgctttgaaatcgcagtaactacactttttaatatcttctgtttgagtgaaaggttcgttttcactgaaaatctcttctaataatgtttgtaatcgcttgcggaactcgtcttcgaaaaaggtgaagttattgaccggtatctttggctggcggggttctcccatttctataacaggtgagtaactatcggaagctgcccggtgaatatagagcagggcaggagccactttcaatgtttgttgccggcacataatggaggcatacaggaaagtttggaagatatagttcggacgtgtttccgaaggggtgaacaattgttcgatattagccggtgtcttgggggttcctccggttttatagtcaacaatccgtaatgtgttttctttggcatccatgcggtctatggttccgcccaagcgaactgtgaagggacctaggtcagtttgaatagttatcttttcggaaacagcttgttccatagcaaccatttcgaaaggggcatattggaggtcattgcgtaatagttgtcgcagataggaggtgattactttggaattaatgagttgtacaccgttatattccggtttttcttccggtttaaccttgaaaaattcttctttgaaagcctgatcaacgtaaccttgtaatttaacatcgttacgtaataagcgttcaagatcctctttctgtatcatttgcccattggatgtcagttcagtataggctagttcggcagagcggtgaaagattgttccgaataacgcggagtcaatttccgcactcacttcttccggtgtttttaatccggctatatagcggaagtagaatctcaaacggcagtcgagatatgtattgagggctgaaggagagagaatgagggacttaggattggtaacgtcatagatatggtataatcgttctaatattttctgtgtttttggtatttctatttttggggtactttggggagattgtccggcctctaaatattcacgagtaatctcatgaggaccttctactaataattgtagcatgaaacgggactcctctccgcgattcaggccgtcggaagaggtattgtagagcaaggtgatattttctgcccgctgtatcaagcgatagaaatagtatgcgtagactgcatttttgtgctcaatagtcgtcatgccgaaggctttccgaaggttatagggaataaaagaagattctccaccggttttaggaagttgtccttcattgagcgaaagcattacaagattacggaagtcaaggttacgtgtttcaagtactcccataacttgcattccaatggcaggttctccgtggaaaggtatattggaacttgtcagtactttactgattaatcttttcagtgtatgggtctgtatatttaattctccactttcaatcaaactatataaacggttgattttcaaaaagctttgaaaaagagattcacgatatagttggttgaatatatcgttgtattctccttctttacggtatagggtagagatatctttgataagtccgataagataattacatagctccttgataccgttacggggagtgaaaagattagctagaaactcatcttgtttcaattccgagggaagcggatagaaacggttggtttttgtaagttcccgttctattatatctgcttttgtcgataattggcgggtatatggatgttttagtatagctgatacggtttcgtaggtgaaacgaccggtatcaaaacggtagccattggtttgtagttccatagccgcattgataaaactataaaccggagtttgtgccaatgggaatcccattgtgatattgacattcttcacttcttccgggatagaatggagtacgggaagcaacaaggcttcattgcaaagaactacggcattttctttttcattatcggatgagaaagtagtacgtatccattcgggaaggaaacgtgcttgcgcattctcagtagaagcggagatgtaacgtatcttcttcggtttctttagggagtcaaagtagctggcaggcagttcgttcgggaaatctttcaggttgcggttaataaattctccggcctcatgttttttgatttgttgggtatagaagatgtcataatcccaatagaatattgctttatctgctttttgcagttttcggaagaattctttttctactttattcaacacattgaagccgacaaatatatatttgtcgtatttaagttgatctgtatcaagttgttcgataacattgcgataaagcattccttcataagcaatgcctaactcagttaagtttttccggtaatggtgatagattgtgcctaacttatcccaaagagatatgaatttctctttgagctccgtgcggcgctcaatggagaaattccggaagaattgttgaattgcttcttcctgttctttatctagaaattcgtagtcatccattagactttttaagtcttgcagattgctgaagagcttatctgcatccaccaaatttttgtctacatcatcaaagtcactgattaacagttctccccaaaaatagaagtcatctaatgtctcctgactttctgtttcttccttgaatactttgtagagttcacaaaccaatcgaatcggatcaccggttttctgtacagatagcttctgaaacagatcactgatactcatagcggcaggtgaccatatcggttgatcggattctcccgccagatattcattgaagaacaggttggcacgtttgttagggaagatgagtactgtgcgagagaggtcatttcctattttggcatataggtcatgagctactaattggagaaatgattgcatattgattaaatcgtttttctaattcatattattgtaatcggagttctgtcttatactttttctattttttcttcatctacataccacaggtatccggtaatattcttataacccattttcgtcaacagttgcatatatcctttcacttgtttattgtatttaggattttctttaccaaacttaaaatcaaccacaacaacctgcccgtctttcatcattacacggtccgggcgacgagtttgtaatattcctttttccttgtatataatggcacattcattaaacagggtccattctccggaataccaatcttgtatttcgggagatgaaaacgctttctgtacaacttcacgtactgtatcttctttttcctggtctctaataactccttcaaagattaatcgttcgatagccggatcaatatcatcggctgtttcaatggcagaaaacagagtatgcaacatacgtccgcgattgatgaaacggtcgtccgaatcttcttcttcgattccttggataaagtccgcagaacgattggattgccggaactcgatgtcgtgccgcatggactccatttgaatgggcaatttttctgctttttgggttaatttattagtggaggctttgaccttttctttttcggacggacagagttctccttgctcataacaatcttcttcccattcgattccttctttgagggcaaccataggaagagtatttgctaatagttcggacattgttcctttttgcccttttctgctccagattattagattttttccggcacgggtaaacgctacatagagcaggttcaggttatccacccaaagttggaggcgttcatgcagataatcgtttccatagatagattctgccatttgcgtggaataattaataggaagaatatctaaagcattgaatggcgcttcttgaggagcacaccataccagttgattattcgtttcattctctaatttccagtcacagaaaggaagaagcacggtatgaaattccaatccctttgatttatgtatggaaaaaatccggatcccttcgatttctccgctgggaattgttttgctacacaaagtttcgtcccaatagcgaatgaatccgtcgagttcagaagaattattttgcaaataatctgttactgcatcaaaaaaggcaaataaataagcatcttgttctttgatgcgattcatctcgaacaagctgaataattcttccaataactcgtagagaggcattaaccgaaactcttttattttatcaagaaatgccgtaggaagatagctttcggcgggaagaagcaagagggtattccaatccagtcctttctgtaagacctcattctgataggctatggcaagttgggcccgtgctatcttgttgttttcatccgagaggtaacgaagagcatccagcatcatgcagatagcaagggaagcgtcaagacggaaggcttcgtctgacactattttgtaatgcagctccttatcaaagtaatctgcgatgcggggaatacttttattctttcgtactaaaatagttatgtcgttcaggtggataccggaagcgagcagatgttcgacttcttctcccaggctgataagtgtctgttcggtatagtcatgttcttcgtccggttcgaggaaagaggctttgacataacctttttgggtgtttaagggagattcttgtacgacgtctgcatatgccttttgcagatcttgacaatctttgttgagctgttttttataaactccattcaaataatcagtagcggccgtaaatatatgattgttaaaccggatgatgttcgtttcacttctccggttggttgccagtgttttgacgcgaatcgggaagtggtcgatatggtcatttaacccgttgaggattccccagtcgccattacgccaacggtagattgactgtttgacatctcctacaatcaagctgtcggctccctgggataatccttcgagcaataacagtttgaaattaccccattgcatccggctggtatcctgaaactcgtcaatcataacattgcggatgttcgttcctatcttttcgaatacgaaagaggaatcaccgtcttttactaattggtggagcagggcattggtgtctgagagtaggaaccgattattttcccggtttaactcgcgtacttcttcgtcgatattggcgagaagttgtactttgttgagatgctgcaaagacagtcggcaactattcagtaacaggttattttttgatcgtaacttttctgcatcttccaaaatctgcataaggctggaattggctaaagcaataatgtctgcatagcgtggagacgtttttgtagcccagtttttggcatcttccagacacttttctactgtaacattgcgaacatcgttacctaaaataccgttgttgagcttacggaaataacttccgattcctcgtgaaccgtttttcagatcgtcagcagttaacgcatgtccgtctaattctccttcaaactgatcatagaatcccttcatttgttccaaaatctcagtctccagtgctttcaactgtttacggtattctttaatggtatccggattgcgtagccgatgacggagtccttctcctttttctatatatccttcatcgaatatattacggccgaaattcttgacttcgtccgatacgttccaacgtttgtcgtctgcaatccgctcattgatataatccagtagccatgcgaggacaggagaggtagggcctaatttctcaatcatactgtctaccgcttcactaagcacttccgtattgttcagttcgatattcaggttagggcttaattccagttcgcgagccagattgcgcataacagactggaaaaaagaatctattgtttctacccgaaaccgactgtagtcgtgtaacatataaccaagggcaatgcttgctgcttcccgtatttcctgctctgtttttcccgtttcttctttgatacggttgagataggcttcggatcctttgtctcctgtctgaataccgtacagctgactaagaatacgttctttcatttctgctgtcgccttattagtgaaggttacggcaagaatctgacgataggctcgcgggtttagaattaatagtttgatatattccacggccagggtaaatgttttacctgaaccggcggaggctttatagactaagagttcactcattatttaatgattgggtgttatataagacaaaaataatgaaagtagtagaagaaacgaaataaaaacatgataaaaagatttttccttagtatatttgtgctgttgactatatcatcattagtagacagagtgataataaaataaaaaatagaggagaggcgttagtagttttcctcttttagttgtattatatataaatggattagattttttttcatctatatactatgatttatgcagcagaataaaacagtttctcaacagaaaactatcaacccggtttactgggtgcctaccgcttactttgcaatggggattccctttattgctattaatctggtttctgtatttatgttcaaggatttagggatttcagatacgcaaatagcattttggacttctcttattatgatgccttggacactgaaattcctgtggagtccttttcttgagatgtatcggacgaaaaagtttttcgtattagtgacagagttgttgagtggggtattatttgggatagtggctttttctttatttttcgattacttttttgctattagcatttctacaatggctgttattgcttttagtggggctacccatgacatagcttgtgacggtgtatatatggctgaactgaataaagaagaacaggcaaaatatattggagtgcaaggtgcattttataatgttgctaagttggtagctaacggaggattagttgctatggcgggagcactggcagaatactttggggcaatagaaggggcttctttagaagcaaataaaggagcatattcttatgcatggatgattatttttgctgtgattgcggcaataatggtattaataggtctctatcatataaggatgttgccgtctaatcagataccgtctacaacaaaaaagacgacctcagaagtagggcgggagttagtagcggtaattgctaatttctttactaaaaagcatattttttactatatctgctttattatattatatcgtttggcggaaggatttattatgaagatagctccacttttcttacgtgcttcaagagaagttggcggattgggattgtctttaaaagagataggtacgttaaatggagtttttggttcggcagcttttgtgctcggctctttgctggcaggtatctatgtctctaagttcgggttaaaacggacactttttacactttgttgtatttttaatcttccgtttgtggcctatacttttctggctgtaactcaaccaaccaatgtttatctgataggaacctgtattactatggaatattttggttatggttttggctttgtcggtttgacactgtttatgatgcaacagatagctccggggaaacatcaaatgtcgcattatgcatttgcatccggaattatgaacttgggagtaatgcttccgggcatggttagtggctatttcagtgatttattaggatatcgggatttcttcatctatgttttgattgctacaattccggcttttctgattacctattttataccattcacttatgatgattcaaaaaaataaataacataaaaatttaatgattatgagtaagattcaaatgccttgggaagaccgtccgtccggatgtacagacgttatgtggcgctattcacaaaatccggttataggacgttatcatattccctcatctaacagtattttcaacagtgcggtcgtaccttttaaggaggggtttgcaggggtattccgttgtgataataaagctgtgcagatgaatatctttacaggattcagcaaagacggtattcattgggatatcagccatgaacctataaaattcaaggccggtaatacagaaatgattgaatcggagtataaatatgaccctcgtgtcacatggattgaagaccgttattggataacttggtgcaacggttaccatggtcctacaatcggtatcgcttatacttttgattttgaagagttttttcaatgtgagaatgctttcttacctttcaatcgtaatggcgttctttttccgcaaaagataggcggcaaatatgcaatgttgagtcgtcctagtgataacggtcatactccgtttggtgatatatatatcagtttcagtccggatatgaaatattggggagagcatcgttgcgtaatgaaagtaactccattccctgaaagtgcatggcaatgcacaaagatcggtgcaggttctgttcctttcctgacagatgaaggctggttactcttttatcatggggttattactacttgtaatggtttccgctatgcgatgggggctgccatacttgataaaaatcatccggaaaaggtactttatcgtactcgcgaatacctgcttggccctgctgctccttatgaacttcaaggggatgtccctaatgtggtatttccttgtgcagctttacaggacggtgaacgtgtagccgtttattatggtgcggcagataccgttgtgggtatggctttcggatatattcaggagattattgattttactaaacggacaagtatcatttaataagatatgaaacgtattctattaacttacacattagctttcatccttcttcccgtttatgggggagagggaggaagctcccctgctgagaagaaaagtcttttgatagattatgttgatccttttatcgggacaacaaattttggcactaccaatccgggagcaatttgcccgaacgggatgatgtctgtggttcctttcaatgtaatgggatcttcagaaaataaatacgataaagatgcccgctggtggtccacaccttatgagcataccaactgcttctttaccggatatgctcatgttaatttaagtggagtcggatgtcctgaattaggttctttgttgctgatgcctactaccggagagttgaatgtagactataaggagtatggaagtaagtataaggatgaacaggcttcacccggttattattccaactatctgacaaagtataatgtaaaaacagaggtttcggctactccacgtacaagtatcgcccgttttactttccctaaaggtaagagccatatactactaaatctgggagagggactgacaaatgaaagtggtgctatgcttcgccgtgtaagcgattgcgaagttgagggaatgaagctgcttggtacattctgttataatcctcaagctgtatttcctatttattttgtgatgcgggtaaagaaaacacctgtaacaacagggtattggaagaaacagagacctatgactggtgtagaggcagaatgggatccggaccagggaaaatataaactttatacccgctatggaaaagagatagcaggagatgatgttggtacttatttttcgttcgatacggaggaaggcgaacaggtagaagtgcaaatgggcgtttcgtttgtcagtatagagaatgcccggctgaatctggatcgtgaacaggagggtaggaactttgaacagattcatgcagaggctcgggcaaaatggaatgacgatttgtcgagaattactgtagaaggaggtactgatgctcagaagactgttttctatacggcactatatcatttgctgattcatccgaatatattacaggatgtcaacggagaatatccggcaatggagagtgataagattatgacgacaaagggagaccgctatacagtgttttctctctgggatacctatcgcaatgttcatcagttgctgacattggtctatccggaacgccaaatggaaatggtacgtactatgcttgatatgtatcgggaacatgggtggctgcccaaatgggaattgtatggaagagagacattgactatggaaggtgatccgagtattccggttatcgtagatacatggatgaaaggattacgtgattttgacgttgatttggcttatgaagcgatgtataagtcggctacattgccgggagcaaagaatctgatgcgtccggataatgatgattatatgtccaaaggctatgtaccgcttcgtgagcagtatgataactcggtatctcatgcattggaatattatattgcagattttgcgttgtctcgctttgcggaagctttgggaaagaaaaaggatacggaaatgttttataaacgttctttaggttataagcattattatagcaaagagttcggtactttccgtccgattcttcctgacggcactttttacagtccgtttaatcccagacaaggggagaattttgaaccgaatcccggtttccatgaaggtagtgcatggaattattcattctatgtgccacatgatgtttatggacttgccaagttaatgggaggaaagaacccctttatcaaaaaactgcaaatggtttttgacgaaggtctttatgacccggccaatgaaccggatattgcctatgctcatttattctcttattttagaggagaggaatggcgcacgcagaaagaaacacaacggctgttggataagtactttacaacgaagccgaatggtattcccggtaatgatgatacagggacaatgtctgcatgggctatttttaatatgattggtttttatcccgattgtcccggattgccggaatatacattaacgactcctgtattcaataaagtgactattcgtttagatccgaaatggtataaggaaaaagaattagtgatagaaagcaatcgcactcaaccgggaactttatatattaacaaggtgttattgaacggaaagaaattcaatcaataccgtatcacgcatgatgaactggttcatagtcaacgtatattatttgatttaaagtaacacacagtgtttcataggtatcgtttttgggttgacagggctgtcggacttttcagggttcggcagcccattttttattacatttatattgattgttgttcccgataaaaaagagtgacggtatgtgtcgggtatagtgtctctatatagctggaacagcgtcactatgggttcgttgtcgataactcccgggataaaagttcctaatccctggggtaaacagtgaaatgctgcaaggcgaatagtaatttgcgataattatatgtttccaaccgacttttttctccggaatttgtttcctttgtagaaaatggatttattatgggaaaacagaaagtagcattagtcctttctatgggtggtgcgcgtggtattgcacatattggagtcatagaagaattattacgtcacaattatgaaataacttctattgccggaagttcaatgggagcaatggtgggagcgatgtatgcttcgggaaaactggaagaatgcaaagaatggctgtatagctgggataagcgcaagatgtgggaactggcagacctcacattaagtcgggacggactggtgaaaggagatcgcttcatcaaagagttaaaggagataatccccgatatgaacatcgaggacttgccgattccttatgttgccatggccaccaatattgtttgtgatcaggaggtgagattcgatagtggcagcttacatgaggctatccgcgcatccatttccataccaatgcttttccgccctttgcggaaagacggcatggtattgattgacggggggatcttgaatcccctcccgctcaatcatgtacatcgcaccgaaggagatattttgatagcagtcgatgtgaatgcaccggttgattgcggaaagagaaagaagatgagtccttataatctgttgacagaatcttcaagaatgatgatgcaacaaattactcgttatcagatagaacgctgtcagccggacatattaatacggatgtccggcaatgcttatgatatgctggagtttcatcatgcagagtccattgtagagacggggattgagattactcgaaatgcattagatcgcattggcgtgacatcccaagaaggatagacttattccacataaatcatctttttcgtcattcctccgtcaatggttatgttctctccgttgatgaagtcattgttttcctcgcaaagaaataagcacatacgggcaatgtcttccggtttgcccactcgccgggaagggtgttgtgaatggtcttccgggcggagctggttgtagtcatgtgtctgtatccaccccggtgcaatagagtttaccgtaatgtgccattcggataatgatgaggctaatgcatgggttaaagaatagataccaccttttgaggcggcataaccttcacttccgggctcgctcatcagataacgggtggaacagatattgataattcttccgtaaggattgggaaaggaaagggctttacgatgaatggcaagtaatcgtgaagtgataaatacaggacgcaggttgacagagagaatcttgtcgaaatcctctatacttgtttccgtgataggagaaaagttgctaatgcctacattattaataatgatatcaagatcgccccattccttcagaatttgcaggacacaattctccaacgactctttattgcttacatcaaccttgtggaatatgcttcctgtttcttttgcagtttgttgaccggatgcatcattcgtatcacagaaagcgaccaggcaatccgcttgagaaaatgcttctacgattgctttgcctattccttccgctccgcctgttacgaaaactcttcttttccgtctgtttgcatcggaaggtatcttgtcagcttgtcccgttctcacctgatgcgttgttccggttttctttttaccatacttctgtgcttgtttccaagctgcttttctggcttcatattgttcctgctgtctttctatataattatctgccataatttcttttttactggcaaatgtaaaatataaaaaggataaatgcaaagaatcgcccgctcctttttgtccaaacgagcgggtgattctattccatataccatggcccctaaacggccgtttcccaatggtaatgcttcggtccatacttgtgccgggcgatcgtaccagagtttatattcctgcacaggtggttacttttcttgtgcatgaatactacaggcaataaggtgtagaaataattaaaagttatcgggcataaaaacgaatttcaatatccggctgaaaaggacttactatgcataggtgaaaatacgttggaagtgtaaatacaataatgtgtacttatctattcattataaacaaataactaaaatgtatagtttaattattggaccattattgttccgcattgatccggaaggttggcaaagttatattcgttcttttcttgtaaattgaaatatacttcttatatttgtcgttagaacatttaacgaaaaaaattatgaaaagtttaaaggttacatctatgttggcagtactgatgttcttgtttataacaggaatgcaggcacagaccgtaactcccagtaagaagtatattacaaaggagttgaataacgtaagcaattttagctcaatcaaggtgctaggcagtactgatgttgaatatcgacagagtagtggttctaaaacagagatttctatatatggttcggacaatttggtcgatttgctggaagtgtctactgcgaatggagtgttgcaggtgaatatcaagaagggggttaagattcttagtggagaacgtcgtttgaaagtgattgcttcttctccttcattagatgaagtagatattaaaggttcggcagatgtatatctgaagggtactattaaaggtgctgatttgactctgaacataaccggttccggagatattgaagcggagaatctgcaatatactaatctttctgcttatataaaagggagtggagatatcgatgtgaaaaatgtgaagggcactactgtaaaaacgatagtcagcggttcgggagatgtgaatatcaaaggcactgcgaaatgggctgcattgactgtaaacggctccggtgacatcagtgctgataagttggcggctactgaagtgattgccactgtttcaggttccggcgatatctcttgttatgcttctaaacagttggatgcaaaagttagcggtagcggagatattgaatataaaggaaatccaactattctaaataaacaaggcaggaaagattctatttccagaaaataggaattctcgattataataggatgcgggtaaatatgcgtgatgtattgcatatttgcccgtttttgttttgtacctgtatgctttctattgattaatttcatagtaaaaatatatattattgtatgtaaatcggataaaaatgtagctttacatttacatttgcttatattagagtaataaatgaaaatgttaccattttagatagaaaacaccctttgtttttgtcagaaaccacctcgtaaaccggtatcgaaaagtttatacttgcatcggattttaatacgtcaaagaatcatcagacgtgttttactgaaagtgtaaaatattaattaaattaatctgatattagtatgaatgattgtttcctgaatttattatttagttttcagcttttacttcctttaaaggagggagcagattttgtgggcagtaaacagactattgatgtaattttgtctgatttgtctctgcttggatatgtaattcccgtagggggacttggtattggactatttatttgcctacttgcctatcttgcggcagagtataatgtccggtttcaatctcatgaaaaatataagattgcaatgaatatgcttcattcgatacatacacccttgacattattacgaaatcagttggaagatattaaaactgctagtctgtctgaaccggtttctctgaaaatagaggaagtcttgaaatatgctgaacgtataatagactgtaatcagaatgttatgacgcttgataagattgaaggtagtattaagcctaagacagctactgtcgattttgaactttccacttatatcacttccattgttaatcaatgtcggccatacgcaaacatccgtcaagtgaaattgaaggtcaacgaatgttcggattgcgtcagttgcaggataaatgagaacataatgacagccgcacttcagtatcttttatacaagataatcttgataacaaattcgggttgttgcatatcaattagcgtaacgcatacaatggatgcatgggaattacatatcagcaataataccgtaacggagaataaagctgaaagtttattttcctttatttccgctctgtttcctgtatatggatatagtggtttgaggactgtcagaaaaatcattcgtttgcatggagggaaaatgattggctacggacacggcaaattcgccactttcaggattgttatcccgacggactgtcattgccagaatcaagaatgtcccgttataaaatcctctcgaattcataaggatgaaaaacaagatttgaaagcaaaggatgctcctcatatcttattagtaatgaaggataaaccgttcagtgattatttgagaaagtctttgtcgagatactatcagatttccattcttgaagatcctgatttgataatacatactatcatccggcaaattcctgacacaatcattattgatgataatgtaaacggcataagtggcgattcgctctgttttcaagttaaagcagataaaacaatgggagagataccagtcgttctgctgataaggtcttttgataatgaaagctatctttctcatttaggatgtggagcagatcggttgaaattgcgtacagagagtatctgtaagttcagggcggatatttgcatgcttattgagaatcgtatagcgttgcgtgaacgaataaaaaactttttatctgatgccattttccctttggtgcctatgaggcaggaaatggaaaacacagatttgttatttatgaataaagtcaatgaaatattggaaaagaatctctcaacggagaaatataggattgataaactttgtgttgatatagggatgagtcgtactgctttttacagtaagataaaggatattataggtatgtcaccggaagattacatctattcattcaaaatggataaagcacttaaattgttggcttcccaacaatttaatatttcggaaatagcaggtatgttgggatattgtgatgtccaatattttaggaagaaatttaaggatttctatcatgtatgccctacggattatataaagagtattattggctaaaaatctattctccggaaatttctcacggtttccgtaattttgagattgcaacacgtggataataaaacgaaggaagtaaaagctacggaaggcaagggatatctgacaatcaagagccgccgccaacccaaagcgaatataggaaccgtagagaaagtcttagaaggtatctggcgtctttgaattgactcttccgaagaaagaacggttacctatcgcttgtaatatatttgttaattagttagtgaatttagtccttgattagctatagaatctccaaacaattcctatttttgcttcaagaagtatggtctgataaaaaaagaaagaagtgatagtaaaaatgaaatagtataatcatcagaaataaataaggtatatgaatagaaaagttgatttatccatatcttgttatggagaagtaaaagatgggagatatgatattgtagcgttaccgtggggggctaccgaacctcataatctgcatttgccctatatgacggattgtatcctttctcatgatgtagcggtttctgccgctttgatagccaaacagaaatatggggtaaattgtatggtcatgccacctatcggcatggggtcgcaaaatccgggacaacgggaacttccgttttgtatccatacgcgttatgaaactcagaaagcaatactgacggatattgtttcttccctttatgttcaaggtatccggaaattagtaattatcaacgggcatggtggcaatacttttaaaagtatgattcgtgatttatcggtagactatcctgactttctgattgcatcaagtgaatggtataccgtattaaaggttaaggactattttgaaaatccgggtgaccatgcagatgaagtcgagacatctgtaatgatgcactatcatcccgaactggtcaatcttgaagaagcaggaagtggagaatataaaacctttgccgtgcagtctttgaatgaaaaagtagcatggattcccagaaactggggaaaagtatcgaaagataccggggtaggtgatccgcgtggagcctctgccgaaaaaggtaaaaagttcgcagaagcagtcgcagagaaatatgcaaggctctttgacgaattggtgaaccagaaactttactgaagaataaaatacgaataggtgaacaatagtgatattatctctattgttgagaggcactaaatgagtaataagtgaaaaagaaaattagttgtaaaggtcgtttattgtcttcaatgtatagatatatttgtgtatgtcccattgctgtcttttctactcttaaacagttttctttttcttatacaagatgctaataaactcattttgtgtttttaataaataatggaacagtttattataaacgggtctcacgtttataataaatgatattcagggttatttagtaaatgaaactgaatatattaaacaaaacggggtaaaatctctacagattttgccccgtttctattcttacggacatatatctatgccttcaaagtctatctttatgtctttatttttgtatatctcattcttgttccagttggttctttcggacaaatatacaaaataaaaagagcaaagtcaatagtttctatgtttacctttatttcttttgttttaccaatataattgccggattgtcttcttcatccaccttcacccgtcacggttggtgtgttaatcgttttaaaaggaatacaaatcttccggataatgctttcatcctgttttgatatgatataacacgtgtttgcataatggatggtcagcaggaacaagcggatggtcgaactctttcattcgtgtcatacctatcttctgcattacacgttccgaacggagattcggcagggaagtaaatgaatacagttctgtaatgtccggttgtttacgagtatattccagacaagctgttgctgcttcaggggcatagccatgtccccaatactcatgtgccagccgccagccgatttctatacccggtgcaaaatctacatcgaatgttatctgatgcagcccggtatagcccataaaagcatggtcttctttgcgttctacggcatacaaaccgaagccgcaggtttgaaattccttttggatacgatgataaaaattgagtgattcttccggagttaatggttggagaaagtactccatgacgtgagggtcagcgttcatgagggcaaaaagaggaatgtcttcctctttccaatcgcgaaggatcaatcgggatgtttcgatataagtttgcataaaattaaaaatagtaattcgcaaatatatgaaataaataaaaaaggtgctgacacctgacatgatatttaatcttaaaagtcatacaaataaagcagaacaaagataataatcattatctttgttctgctttatatattctgattaccgaaacgttataatactactcacacatgatgaaacatcttttttcttttctgataatagcttctttgctgttatttggttgccgttcaaaaacacaaagtaattttcagcctgaactttctgaacaagcggaggaaagctattctttacctgaagaatacgctgaagaagtgattgttacaggcaaggtgctgaaccgggatttttatcctaatgaaaaagatttgactcttattattcctttttttagaaaaatggagaatcagtactgtgcacctatccaaaaggatggatcattctctttccgttttcctatttttgcaaaaataagggagatttctattcgtaattatgccgaacatttgtatgtgcacccgggggatagtgtatacgtagagattgattttaaggatatgtttcatcccaaagtaacgggtgatgctgaaaaattaaaccaagaaatattggcttttactgagaatgcttattactatatacagaattatagtataggatctaatttgaataataatgattttgaaacagaacttaaaagggagtataatcttcgtttggaacgtaggcaagagtatatacaaaaatataagccgtcagaagaagttgaatttctcacagaagaactattgaaacaggattattattacgctttgctactttatgcttctcacatccaagatgaaactggtaaggagttggagcgctatcatgcgttgttgcctgaaattaacgggctttaccataaaggcatactatcagcacgtttatttgatattgctgaaagtgtagaaaactatattttatttggaatggctttgaaaaataggaaatatccgaagatagaggatatgatgtctctaattggggagaacacattgaatcagtatttgtatacaaagatgatggctaattgtttgacggctaatgatacacttgctttagcaaaacgacacgcacagtttgattcaatagtgaagatgccgcatttacgtgcacagattacccaaatatataatcggactaagtcatatttggaaaatcctcaatcggtttccgataatttattgtatggggtatttcatgaaaatgcaagtcaaaaaacgtctatgtcatttatggaacctatttatgaaatgctcgagaaagatcgtggaaaagtgatctattttgatttttgggttaagtggtgccctccttgtttaacggagatggaaccgttgaagcagttacgcagtaagtattccacaaaagatttggtcatatattctatatgtggcagcgaaccgaaagaggagtgggaggagtgcctggataagtattcattgaggaaccggggaattgaatgtatttatgcaaatgatttttttggaaaagaaaattatcagaagatttgtaaccaatggaatgtgcatgatatgccatattatatcttgataaacagaaaaggacagattattgattttggtagttcggcacgtccgagtaatccgaatttgcgatctagaattgaggaggaggttaaaaatataaaataactttttatttattttactcagaagtagaggatagtgagtacaaaacggccggatttccgtctttattttagtaaaaatatagattggaatggaaagccgactgaaacatcgaatatttgtattttctttattggcatggactgttatatgtccttccggtactcaacaaacacattcgcttcacgaacaattcttgaatccgtccgatgaatcccgatccggtggaactttcaccggaagtgaaacagaagattaatgaattaaaagaggcaggcgtgttggttcccgttattccatctaaggaagacgatttatttttattgctaatcaaaggattgatgcagtctttcacagtagcttattttttagctctgtgaaaggctgtgtttttgttttcggatatttaatgagaaaatattcaagaataaggtttctgctatgactcttttttgtacttttgcagccgatttaaaataccacatgcatgaagacaagcgaatctttattatcaaaaggaaaattcattgccgaatattctgcccacctaatgggagccggagtacatacttcgcgggttgtccgtaattccaaacgtatcggtgaggctttcgggctagacgtaaaattaggagtatttcataaaaacatcattcttacgattattgacaaacaaaccaatgaggcttgtaacgaggttatagacattcctgcacatcctattagttttgaacataactcggaattaagtgcattgagttgggaagccgtggacaatcgcctctcgttggaagaactgacggaaaaatacaggaaaatagtttccgctccgatgatacatcctctttttgtattattgctggtaggatttgccaatgcttctttctgtaaactgttcggaggggatttgatttctatgggcattgttttctcagccacaattacaggattttacctgaaacaacagatgcagaaaaagaaaatcaatcattatataacatttattgtttcggcgttcgtggcttccctatgtgcatccacagctttgatatttgatacgacttccgaaatagcactggcaaccagcgtactgtatctcgttccgggggtgcctttgattaatggtgtgattgatgtggtagaaggatatgtcctgaccggatttgcccgcttgacggaggcgtccttgctgattgtcagcattgcgatcggcctttcctttacattattaatggtaaaaaacagcttaatttgatatggtagcactcgatattctttccgatggattttttgcagcagtggcgggtataggcttcggagctatttccgacccacctttgcgcgcatttaaaatgattgcgattttagcggcattaggacacgcatgtcgtttttgcctgatgacttatttaggggtagatattgctaccgcttctttatttgccggtttggtaataggttttggtagtctatggctgggaaaaagggtctattgcccaatgacggtactctatattccggcattgcttccgatgattccgggcaagtttgcctataatatggtattttcactgattatgtgtttacagaatatgaatgacccggagcaactggataaattcatgggtatgtttttctccaatagcttgatagccagtactgtaatattcatgttggcggtaggagccacattcccgatgttcctgtttccacaccgggctttttctttaacaagacattaattaaactacttttatggagattttttggagaacaatcgcatattataattcagccacctggcttttgcagatagttattattcttattggtatcgtgctgacagcattgctcatctgccggccacgtccgtgggtgaaaatgggaatgaagttctacatgatagggctgtattcatggatttcagttatctattattatatttattgtgaggaacgcagctataatggagtaatggctatgttttggggagtaatggctattatctggatttgggatactattacgggatatacaacttttgaacgtacacataagtatgatatcttatcgtatatcttgttggcaatgccttttatatacccactggtttcgttggcccgcggacttagtttcccggaaatgacctctccggtaatgccctgttccgtggtggtatttacaatcggactactattgctgtttgctcataaagtgaatatgtttctggtgctttttctttgccactggtcattgataggattatccaaaacttatttcttccagattccggaagactttttgttggcaagtgcaaccattcccggcttgtatcttttcttcagagagtatttcctgaataacctgcatgccgatacgaagccgaaagcaaaatatattaattggttattaataactgtctgtatcggattggctatattactgaccactacaatgtttctggaattagtacccaaaaactaatctgaaacagagagaatagttttttctagaaataaaaaatcgctttttataactattaaagttatagaaggcgatttttgcatacctgcctattgaatggcatagaatattcgaagagcatattgcatgacaacgtcaggcagccatttcttactcttagcgaatgtgacttgtatccatggtccgactttcgtacggaagggaggatttttgcatgctactattttacagattgcatgccccaacttcttcgggtgacatccgttacgttcttccttttctataatttccaatgatttcaggaaactctccttgtaatcggtatttactcttgttgcttccgaaatattccggttatctgtaaatccggtattgaaatctcccggttctacaatacaaacttttatatgaaacggatgaacttccaaggctaaagcctcactatatccttcgaccgcaaatttagaagcggaataaaatccctgataggggatacccattactccaccgatagaactgatattgatgatttttcctcttcgtgccttgcgcatataaggcagcaccactttgcacatgttcactacgccgaagaaattagtattcatctgcccggatatttcatcttctgttgcgagttccaaagcgccgccgatacccattccggcattattaatcaatacgtcaatccgtccttgttctgatataatctgtccgacagcttcgtggatagaaagaatattagtgacatcggcaacaagcatttttacattgttcatgtttccggaaggctttctacttgttccgtaaacaatgtgcccctgttcagataacatttgcgctgtgactttcccgaacccggaagatgctccggtgataagtatgacttgtggttgcatgttttttcagaaagtgatataacggccaattattactcctctaatatagcagtcagttctgctctccaatcagttccgttccggggttggaaagtttcgaatcccagctctttgcccatgtggatatttgaagttccgtcatctacaaataaagtttcggaaggaattatattacaatcctttatcataaagtcgaatatttccggtgcaggttttgtatgtcctacctgataagatagatacggtttgtcacaataatcattcaatggcttcttccttgaggaaaattcggggctacaagcccatgacatgacaaaaggattggtattactaagaatatatacatgataagacttccgtaattccaacatataatcaagtttgcgcaaatctacttcgttgaagaagcccagccatgcctgtttggtttcttccatagtaagctctcgtccgcataaatctcccagttgttttctaaattcatcagcgctaagtttaccttcctccaattcctgaaatattccggtttgatgatatttatccaaccgactgtctgcatccgtcaatcccagtttgataaatgcctgaacggctttatcacggtcaatgtctacaataactccaccaaaatcgaatacaatgttcttaatcatgatatattttttattgctacaaagatacagcttatcttcctaattaactgcttgctgttccttgatatttatcaagaaaagtatagaaagtaaatttagacgaaagaataacagttatcagacgattaattttatactatatcaagtttagagtttactaaaagaaggaagaaatattcgctactctagcaataatcttataaatttgtcgcatatttgtatgtagagactaaaaattgagactatgagtaatcttcgaattttattgtatgtatttgtcctctctttggccgcatgtcatccggaggggactaatgtgaaacaaggattagataaagctgctcaattaatggagcaagatccggatacggcatccattattcttgaaactattcaaatgaaccaaatgaatgaggcgcaacttgcagaatacaatttgctttgtactcaattcaatgaagataagaatatacctcattcttctgatcatcagattcgtcaggccgtgtcttattatgagcaatacggaaatgaaattcagaagtcaaaagcctattattatctggcatgtgtagaaagtgatttgaatcaggagaaagacgctgaaactcatttcaaagaagcaataagactagctgcgcaaacagaagaatatgaacaaatgactaagatttgcaggagatgtagtctttattatcagaaatatggcaactttgacgaagcgctggaaatggaaagaaaagcgtatgccagccaattgatgttgattgacagtaaagaccgttctaccgtgattctgtcttccgctttgggagtgttcggtgccatgtccctcttgcttggattgctatggaagaaacatctgtctgtacactcgcaactggacacctttaaggaagaaatgcagatgaaagaggttgaatctgacaaattggcgatgcaatgtaattatctcgaagaaaagtatcaatcccttcaacagcatatttatgaaaattctccggttatctcgaaagtccgtcagttgaaggaacgaactgctttgtctcccaaaataccgtctttttcagaaagagactggacggaacttttacgacttcaggaaaacgtttatggccttgtatccaaattgaaagagataagtccgaaacttacagaagaagatttgagggtatgtgcttttttacgcgaaggtgttcagcctacttgttttgcagatttaatgaaactgactgttgagactctgacccggagaatctccaggataaaaacggagaaattaatgctggcaaactctaaagaatcgttggaggatattgtgaaatcattatagtctgcatttgtctgtgcttgtttatgtgacgctgttgaatatcaactgattataagtataaagtgtccgtattcgtccgataagaatcttctcttttatatgcttgttctataactttgcaaacaaaaaagttacagagcaatgaacaacttattatttaaaaaatggaatgattttagtgggtggattgtttttctaatagcagcttttgtatatggaatgacgattgaacctactgctagtttttgggattgtcccgaatttatttcgtgtgccgaaaagttacaagtagggcatccaccgggtgcacctttctatatgctcgtaggaaacctgtttacccagtttgcttccgaggcatcgcaagtgtcttggctggtgaattttctgaatgcgttgttgagtgccggttgcatcctgtttcttttttggagcatcacccggttagtaagatccctgatagtaaatgaagagcagaatttatcaacgatagatgttatcgtcattctgggggcgggatttgtcggagccttggcatatacattcagtgatacattttggttcagtgcggtagaaggtgaagtttatgctttctcttcttttcttacggcattggtcttctggatgattcttcgctggcaagatgaatcggattcagtatatggtgaccgttggattatcctgatagcttatattatcgggctgtcaattggagtgcatttgcttaatctgctctgcatcccggccattgtgctggttttctattatcagaagtatcatgcaatatcgtttaaaggagtagctgctgcaattgtcatatccggtcttcttatcgtatttatcctttttgtttatattcctggcatagctgatatgggagggtggttcgagctgctctttgtcaatgtgttcggacttcctttccatacggggctgatcgtctttttagctttaacatttctcgtattggtcggagccatttatcgtttccaaaaacgtatgttgcatacttctttatggtgcttgcttatgctcaccgtaggctataccacctatgcggtgatactgattcgtgctaacgctaatactccgcttaatgagaatgcgccggataacatttttacacttaaaagttatctgaatcgcgagcagtatgaaagtgctcctctgctttatggaaaaacttatgcatccgaaccggaatatgtgcctgaaggtgactattacagagtaaaaacgacaaagggaagtgctgtatatcgtccggataaggaaaatggtaaatataaaataatccggtataaagaagatgtgtgctatactcagaatatgttgtttccccgaatgtggaatgagcgaatggctgcttcatacaaaaactggacgggaggaagcgaagcggctcccacgcaaaaagaaaacctcacttatttcattacctatcagctcaattatatgtattggcgctatttcttatggaactttgtaggacggcagaacgatgtgcaagggagtggcgaaccggaacatgggaactggataacgggaatttcctggttagataatttaagattaggtgaccaaagttttttaccggaatctttacgtcagaacaaagggcacaatgtgttttacggactgccgctattattaggactgttcggaatctattggcaatggaaccgcagtaagaaaggcaaacagcagtttagtgtactgttcttccttttctttatgacgggactggctattgtactttatctgaatcaaactcccggtcagccgcgtgaacgggattacgcatacgccggttcgttctatgcttttgctatctggatagggataggagcggcaggattatgtgatatgcttcgccggaaaacaacttcgacggtgcaagtcagtgtgttaatgacaatctgtttattgattccggtgcaaatggcgagccagacctgggatgaccatgaccggagcgcccgttttacttgtcgcgactttggggctaactatctgatgactcttcccgatgaaggaaatccgattattttttgtaacggagataacgatacgttcccgctatggtataatcaggatacggaagaagtacgcagggatgcacgtgtttgtaacctaagttatgcgcagaccgattggtatatttatcaacagcaatgcccgttgtataatgctcccggactgcctataagctggaataaaaatcaatatcaggaaggaaccaacgaatatgtggccgtacgtccggaactgaaaaaacaaattgaggaactgtaccggaagcactcggaggaagctcgtgacagcttcggagaagacccgtttgaggtaaaaaatatcttgaaatattgggtgttctcagagaaaccggagtttcacgtaatccctacggatacgataaatatccacattgataaggacgcgctgctccgttcgggaatcatgctccccaaaacaatccgacatttgaaaggggaggacttgaaggatgccataccggacaaactgtatattcctttaacggatatacgtatgttgactaaagtcgatttactcatgctggaaatgcttgccaactgtaattgggaacgtccgctttatcttgcaatttccgtaggaagtgtcagtaagctgaagtttgacaattactttgtacaggaaggattagcatttcgctttacaccttttgactataagaagtggggagatgtcggtgaaaacagactttatgcagtagatgtggaaaggctttatgacaacgttatgaatagatataaatatggtggactggatactccggggctctatctggatgaaacaacactacgcacgtgttggtatcatcgcaggctttttgcgcaacttgccaaagaactgatagcgcaaggagataatgagcgtgcaaagaaagtactcgcttatgcggaacaggttattccgggatataatgttcccgaaacacatgaaagcggttcttatgatatggcaacggcctatgctgctttgggtgaaaaaacgaaagcagtgactctggctgtacatttgatagctgaagcggaagattatattaactgggctttttcattaaaaggaaaccgtatagaaatggttcgcaatgattgtatctataaattctggcaatggaaccaatataatgaactcttgaagaagatagacggagaaaaatataaagagagcaaccggcggtttgaggaaaaatatgcgctattcgctccaactatgaattacaaaaactaaaacggaagaagaatatgaaatcaaaaataatgaaacagaaagagacagaaacagtatttagcagaagaaattatataattctgctaattggttcggtagtaataatagtaggttatctattcatgagcggtgaggggagtacccctgccgcctacaaccctgatatattcagcggattgcgtataaaggtagcacccgtagtatgtctgacaggatatttgataaatatattcggtattctataccgccccaggcggagttaattatctcaatgttttccatgcatacatcatcaccactatgaatgaaagcaacggaacgatgaatgagaaggacattgtagtctggtctgctacatatcccatgagcaaggggccgacagcccctccaatgggagacatcattaaataagaggatgcacgtttggtatgattgcccagtccccgtaatgaaagtgcaaaaatagtaggaaacataattgcttcaaaagcgtaacccaagaaaagagctatcagtgatatgatccccagattcagtacaattaaagaacttgttacgactgtaccgacagcacaaaagaacaatactttctctgcccgtatctgccgcatcacccaactaccggcaaatcgtccgcacataaatagccccagaccaccgaacgaaagaatcacagaagcatcgcgggcgttcatccagccgtcatctaccacataattaataaaaaaactattaatagagatttctgcaatttcataacagaataaagctgcgataccaaaaataaaaagcttgtgtgaccagagtccctgtgcctgcccctgtttatccgtgtcttcttcatgggtaatctccggcaaacggactttgttaaatactaaagcaactgccagtacaatgattcccattaatgtatatggcaatgagatattcgaactaccttcttccgaaaacaataataaacctcctataagcggcccgcagatacaacccaatccgttaaatgattgtgccagatttaatcggctggcggcagtttcccgttcacctaattccgtcatataaggattggcggctgtttccaaaaataccaaaccgcaggcaatgacaaacagggagaaaaggaagaactgaaacgacatccagtattcaccgggaataaaaagcagcgaaccgataccatagagcaacaaaccgaatactactcctttgcgatagccatatttattgataaacagtcctgctgggatagccatgacgaaatatcccagataaaacatgacttgtacccatgccgaatgagcacggcttatattcatcacatcctgaaaatgcttgtttaacacatctaaaatagcatgtgcaaatccccatagaaagaaaagggaagtgaccagaataaaaggaatctgatattccttcttgactaatttctgcatagtgagtttattaaaaaagagcgttctttgccttcggggcacaaagataggcaaaatgacgataagatgttcatatcatgatatcgcttttacaaaaaagaataataggtaacaaaaaaagatttagcccgtctataaacagtgattctgtaatattggtataataatctgtaatctatctactttgcgaatatttaaaatcgagtatatttgctgcataaattattagtataaataaagtatatgatgctaaaaaagtaatgagtgcttgattaatctgtaatatagatataaactactataaaaagaaaacaatttaattatgttacgtactatcagacttacagccgcgattgtgtgttttacacttgtcaccctgttatttctcgactttacagggacattgcatacatggttcggatggctggcaaaaattcaattcctgccggctgtattagccttgaatataggtgtggtattattccttatcatacttacaatcttgttcgggcgtatttattgttcggtcatttgtcctttgggagtatttcaggatgctatttcgtgggtatccggcaaacgtaaaaagaatcgtttccgttattctccggctatgaaatggctccgctatggcgttttagcagtgtttattattgcaatgattgtaggcttgaatgctttggcaattctgatagcaccttatagcgcgtatgggcgaatggtctctgctttgttcgctccggtttggcagtggggaaacaaccttctggcatactttgccgaacgggccggcagttatgctttttatgaagtggacgtatggataaaaagtttttctactttggttattgccgtggttactctaattgtacttattatattggcatggcgtaatggacggacttactgtaatacgatttgtccggtaggtacggtattaggattcatatcccgatattctatcttcaaaccggtgattgatacttccaaatgtaacggatgcggattatgtgcgcgtaattgtaaggcgtcctgtattgatgcgaaagcgcataaaatagattatagccgttgcgtcgtttgtatgaactgcttgggaaaatgtaagaaaggggctattaaatacacaagacgtatccccgaaatagaagcggaacctgagatgataactacctccaaagctaaatccgttactacggagcaagtagacaatgctcgccgcagttttctttctgcatcggctatcttcgcaaccaccgccgcactaaaagcacaggaaaagaaagtggacggcggactggcaaccattgaagacaagaagattccctatcgggaaaatcccattttacctcctggttcattaagtgcacgcaattttgcacagcattgcacagcctgtcaattatgtgtttcggtttgtcctaatcaggtactccgcccttctggcaatttgttgactttgatgcagccggaaatgtcttatgaacgtggctattgtcgtcctgaatgtgcaaaatgcgcggaggtctgtcctacggacgctattcatctgactagccttgctgataagtctgccattcaaatcggccatgccgtatggattaaggaaaattgcgtaccgttgaccgatggagttgaatgtggcaactgtgcgcgtcattgtccgaccggtgctatccaaatggtagtttccgatccggatatggcggattctcccaaaattccggttgtgaatgcggaaaaatgtattggctgcggagcttgtgagaatctatgtccgtcccgtcctttcagtgctatttatgtgacaggacatcagatgcatagaattatataatctaaattgagatgagattatggaagaaaagaataaaaagaacataaacagaagagattttattaaaattgtaggtatcagtgcagctacatcaacagccatattatacggatgttcttctaaaggtacttcctcatcaagtagtgtatcgggagaaggggaaatacctactgacaaaatgacctaccgtacttcgccaacaacaggtgaccgtgtttcacttttgggatacggttgtatgcgttggcctcttaagccatctcccgatggtaacggtgaggtaatcgaccaagacgcggtgaatggattagtagattatgctattgctcacggagtaaactatttcgatacatctccggcttatgtgcaaggtttttctgaaaaggcaacaggcattgcattaagccgtcacccgcgtgacaaatattttattgccaccaaactgtccaatttctcgccggacacatggtctcgtgaggcttcacttagaatgtatcataaatcatttacagagcttcaagtagattatattgactatatgttgcttcatggtatcggtatgggaggaatggatgcccttaaaggacggtatctagacaatggtatgctcgacttcctgattaaagagcgtgaagcgggacgtatccggaatctcggattttcttatcatggggatattgaagtttatgattatctcctctcccggcatgatgaaataaagtgggactttgtgcagatacagctaaactatgttgactggaaacatgccaaagagacaaatacccgaaataccgacgcagaatatctgtacggtgaattggctaaaagaggaatcccttctattattatggagccgttgttgggcggacgtctgtctaagttgaatgataatttagtagcacgactcaaacagcgccgtcctgaaaacagtgttgcatcgtgggcattccgttttgccggttcttttccggatatattgaccgtactaagcggtatgacttatatggaacatttacaagataatctccgtacctattcaccattggaaccacttactgatgaagaaaaagaatttcttgaagaaacggcgcaattaatgttgaaataccctaccattccttgcaatgactgtaaatattgtatgccctgtccgtatgggttggatattccggctatactgttacattataatcgttgtgtcaacgagggcaatgttcctgaaaacgggcaagatgaaaattatgcgaaagcacgccgggcatttcttatcggttatgatcgcagcgtgcccaaactccgacaggccagtcattgtatcggatgtaatcagtgtgtgtcacattgtccgcagaatattgatataccgaaagaattgcatcggatagaccaatttgtagaacaactgaaacaagggactttataatggaagaattaatcaatctactacatacaggaggatattcctgtgtgatagccaacgaaggaaagattcgcacttttacccaacgcggagtagccgatttatacgatttgctgacccgggagccggagttcctgaaaggagctctgattgctgataaagtagttgggaaaggagctgccgccctcatgattttaggtggtataaaagagttatatacagatgttgtcagttcaaacgctatggacttgtttcagacatcagatgtaaaagtagactttgtacaggaagtgccctttatatggaatcgcgaccatacaggctggtgtcccgtagaaactatgtgcagtgaagaggaatcggccgaagctattttgcagctgattcgtggctttctcgaaagaatcaaaaataaagagtaaaaatacagactaaagtatgagaaagaatacagctcgtttatttctattcagtagtctgttgtccatttcgggaatggcagaaaacagaaaagacagtacgcaagtaggacgaaattatgttattgatgaggtcgtagttaccggaacacgcaatgaaacggatatacgccatttgcctatgactatttccattgtcaatagacaacagatagaaaaaaggtatgaaccttccttgttgccattattgaccgaacaagtaccggggttgtttactaccagtcgtggtattatgggatatggtgtgtctacaggtgcagcaggtggcatgagtttacgggggattggtggtagtccgacagcggggctattagtcttaattgatggtcacccgcaatatatggggctaatgggacatccgatagcagatgcctaccaatccatgctggcagaaagggtagaggttctacgtggtcctgcatctgtcctttatggttcgaatgcaatgggcggagttatcaatattgttacccgtaaacaacaggaagaaggggtgaagaacaatatgcaagtaggttatggttcttataatactttgcagacagaattttcaaatcgggtgaagaaagggtgtttcagcagtgtcgtgacaggttcatacaaccggacggatggacatcgtcccgatatggagttcgagcaatatggaggatatgccaaactaggctatgactttagtactttctggaaagtatggggagatataaatgtaacgcatttcaatgcttccaatcctggaacggttcaaactccgcttttcgacaatgattcacgcatcactcgcggcatgacttcgtttgctttagaaaatcattatgaaaagacttcaggtaccttgagctttttctacaactggggacggcataagataaacgacggatataaaactggagaagaaccacaaaagtcacattttaattccaaagaccggatgctgggtatatcgtggtatcagagtgccactcttttcacgggtaaccgtgtgacaacaggatttgattatcaacatttcggaggggaatcttggaataaagttctggctacgggcgaacgcaaatcgggagtagataagcaaatggatgaatttgcagggtatattgactttcgtcaggatataaatagctggttatctctggatgcaggagtccgtgtagatcatcattctcatgtcggtacagaatggattccacaaggaggtctggcatttcattttccgaaaaatacggaagtaaaagcaatggtaagtaaaggctatcgcaatccgactatccgggaaatgtatatgtttgctcctgccaatcccgagttggagcctgaaaagatgattaattatgagttttcgtactctcaatgtttattggaaggagcattgtcttacggagtgaacctttactacatcaatggcgacaatattattatgagtaatggattgacgcctcctttgaatatcaactccggagaaattgaaaactggggcattgaaaccaatgtcggctatcgtattaactctcattggaacatctatgccaattatagttggctgcacatggaaaatcccgttctggccgctcctgaacataaactatatgcaggtatggactatacctccggtcgttggaatatttcaacaggttttcaatatgtgagcggactttattcctccgttacaaaggggcatgagcaacaagaaaattttgttctatggaatcttcgaggcaactatcgtatatgtcattttgcagatatctttgtcaaaggagagaatttgttagcgcaacgatatgaaataaatgcaggctatcccatgccaaaagcaacatttatgggtggcattaatgtgaatttttaaaataatgaagatatggaaacaacaaccgtgaaactctattcgttggattacagcaacgtaaagacctattgggcagcctcgttattcatcattggtaacatcctttttcccaaactctttcatctcattccacaaggaggaataacttggctgccaatctacttctttacactgattggggcttataaatatggttggaaagtcggtttactgactgccgtcttatcaccggctataaattctctactgtttagtatgccggctcccgccacattacctgtaattttattgaaatccgtattattggctattgctgccggatggacagcgcaacacttcagacgtatttctgtcataatgttgataggggtagtatttgcctatcaggtagcaggtacattaggagaatggatatacattggtaatttttataatgctatccaggatttccgcattggaattcccgggatgtgtctgcaagtattcggaggttatcttttcattaagtatctgatacgtaaataactcatccgatgactaaaaaggaggtaactttctcctaaaacgagaaagttacctcctttttagtcatcggataaatcgtcttccgttataataggagaggagctacttccttcttttgcatatttagtcggactcatcttataatgtttcttgaatacctcccggaagtatttgctttcagagaagccggtcatatctgagatttcggcaatagtatgtccaccttcttttaatagttgtgtagcacgtttcaaacgggtaattcgaatcagatctgtcggagactgtcctgtcaacgccttcagtttacaatagaaactagtacggctcatgtgatgcaactcacaaagtacatcgacagagaaacctgtattatccatattttcctcaatacttttctttacagcggatataaactgccaatcaagactagtggttccgtttgctgacggtatcataggttccgaatcaatatccagattagcatatctgctacgtaacaacgccctgttagccaataagtttgcaatacttgctttcaatattctcacgttgaaaggtttgacaatatatgcgtctgcaccgattgacatcccgtcaagaatgttgttttcatctcccaaagctgtaagcagcagtaccggaatatgtgatgtctcaatatcattttttatagcgacacatagctcatcgcctctcatctccggcatcatgatatctgaaagaataaggtcgggccagaattcttttgcaataattagtgcttcccgcccatttccgcaagcttgtacgtgatacatcgaagataatgaactgaccagataggaacgcaattcatcattgtcttctacaattagaatacgttgtgagtttgttgtttctacggtattcaccggtgtggcagaaatattgggaaccgtcagttcaggagtctgttccaacggtttggctggtggaatcaaaccggcattctgaaaatgcttattacttttcgggaaaacaatcctgacagtagttccttgatgttctatactttccacattaatcttaccaccatgaagacgaactaattttcctaccagcattagcccgatgccactacccgtaactttggaattaatagcattactggctcggaaatggagcttgaacaacttactctgctcactggatggaattccaatgcccgtatcctcaattattactttccaagaatcattactttcggatactgaaacacttactttaccattctccggagtgtattttagtgaatttgataaaatgttttttagaattgaatccattttctccttatcaaaccacacattcaaataactgaaagaactctcataggtgaagtcaatatgtttgatagcagcataggaagaaaaagtttcatatacttcgtgcatataggtgttcaactcatattcggaaacacacaattctgaagaatacacatccgcacgctcaaaattaataagattgttggttaaccgtaaaagagtccccacatttcttaatgcagtatttgcacgaattattccgttggcggataaaggttcttcatccagcagttcctctaaaggagctttaatcagagttagcggagtacgtatgtcatgagctgtattaatgaagaaactcgtcttttcatctgaaattttcttttgctttcttaaattcataacccgtagaataaagatgaatcccaaaattactaataacacgtaacaagtgattgcccaccaactagaccaaaaagggtgcgtaacgacaattctcattgtacgctcttcaaaaacaatatcatgttcttcccttgaaatggcacgtacataaagagtatattttcccggtggcaaattggtatagcgaatcagattggctgttcccggttcggtccatttttcgaagaaaccatccaacttccatgcatagagagcatttcccggagaatcatagttgatagtggaaactctaaatgagaatgtattctgattatatttcagctccaacacatccgtatcattgatacttttctccaatggagaatcttcttctcccggatatacaggctggtatgaaatattcaaatcgctgaatatcatctttgtatatacataatcggggaactttacattttggggaagttcgatagctccgtccgtactaccaaatacaaagttcttatttttacgtaatactccggatgaagcattgaaataggcaggcaataatccttctcctttggtccagttatggaatattttttccttcgtatgaaaactggtgaccccattttccgtactcatcatgattcgtccgtcaacttcaggcaaaatagtaaaaatgctgttggaaacaagtgcggaatttttagctatataatgctcaaatttcttattttgtgcatcatatataaatactcccgctccattcgtaccaacatatagcagtccgttatctgcttgataaagcgtattgatgtaggtcgatccggcttccaacttaatatattcgtatttcccggagtctctattcagcaaatacaatcccattgccgttccgatccacatattatgactatctttttcggcaatagctgtaatagaacttactcccggatataggcgaacactgttagttgccaaatcaaagcattttaaattatagtatcctcccgaccatatatgtccttttgagtcttttatcatatcacggatatatttatccgggcgcatatttatgtgtgaaagtaaataaggagagaaatattccacggataaatctgctttatttatcttgtatataccggaagtatagcctcctgcccagataatgccgggtgaaacctcacataaagttatgaatatatgatttttgtcttttagctgatgattgaaagaactcagaaaagaatgccattctcccgttcccgaattgtaaagactaatgccgttactcgtaccaaaccataaatctccatcactgtcttcaatgacagcgtgcacctggtcattgacaatggactgcttgttgcccatagagtgtttcatccaatgatagttttcataacgataatctataactgtaattcctgtgggataattggcaagccgtattcgttttgattcatcaacaaatacgtcattgatgttgtcaccattcatttcattatagctctggtaatttgctgatatgtaacgttctaatatgcatttgttcatgtctagcttatatacgcccatgccttcggttgccactaatagttctgtttcatttaatggtctgatacgggttatattcacatcactaagatctgcttcaggccggataatctcttgggaaagcatatcatatacaaaaatacccctctcaaatgagccgatatataattttttttgctgttgctggaaatacaacacacttacttgcgtatgaaaataatcaagcgtctcggtagggataatttgtaaagcaccgttttccagtttagcatacctcacgcctgtttctgttgctataaagaaatgattgtcatctatctgctctatggctgtaatattgctgtgtagtatattagggaactgaaatgtatgagcatttttgatattgtataatacaatagaatcattgcagcataaccaaatattattgttgtggtctacataaccataactaatcgttttcgatatatccggtagtttatatcctatcgtaaaacgatcatattgcttttcatattgaaagagacgtccttttctgccaatcacccataaacctgcctccggagtagcatataaccaaccgaggtgtatttgggaagcaacggaattatcatctttgttcagtttataatgctttatatctttaccattataacgatccattccttcattggtgagaaaccacatatagccttgatcatctttctgaatgttgaatatccttcgattacttaatccattttctattcctatatatttgtaagtttgtgccgtgaccagaataggaaacaaaaggaaaatatatacaatgtatttcatataatcatttatttttaaattgtttttaactgttatttaaaaataatagtttacgaaactatacaaaagcgatgagaaaaacaaagaaatgtagcacattcttatagaaaactttcgtttggaaattttttgtttcctaagttgattatttacttaacgaagttgacttttctgaagctttttttggtatacccatatacttaatataaaataaacgagtacttgaatccataaagtaatatattctggtcgtatatcagccatacttgctcccattgaatttaattgtacaaaagcaagtgttgcaggagctgccggaagaatataatgtgcagctttccaataccaaggcattaactccattgggtaagaaactccggaaaggaaaatcaatccgactgaaaagaaagctatcattaacaaaggtgcttccgaatcggtaaaataacgggaagcagccagtccgaggaaagaagtagctatcaggtaaggaatcattaatagcacaatatacagaccatttccaatattgggaatactgaaaaaataagggagcaatcctaataagaagaaagaaaagatagcatacaatccgcaatatacaaatgtctttcctgctacaatgcgtatggcggctgcccaagtatggccgaaaggagcataagtacggattccgtctgaactatattcttctccggtcaccataccgataaccattagcaaagtttgaaatataataatcatcataacggcaggaatcaggtaggagccatatccttccgtataattataaagtgcggtcccttctacattgatcggttttgccatagttacagccaataatccctgtgggggcagaaacacagcttcatcgggtcggtatttatcgttaatcgccaacatcacacgtgacgaagctccttgtaaggcttcaaagtacaaaaatgcatcagttgttgcataaagggaaaaaatagattcatctccacgaaatacccgtgcctcaaaatcgtgtggcagatacagtattccttgtactttgcctcgtttcatccattctttggcttcattatagtccattgcctgactgtaaacatcagcttgcggagtagcatctagccaacggataaaattacggctcaactcactgtgcgaattgtcgactatggcgatagggacatctgtcacaatgttaggggcatacatataattatagagtaacccgtatacaaaaatacctcctatcaatactaacaatactgcatagctggtactgatagccagaaattcacgctgaatgatgaatgataactgttgtaatttacttaatgttttcatacttatgactttctatggctctttttaaatgaggaagcaacgaaaaagcgagcagggggaaaatacaaagaaacatggccgatggccaaagctgggtaaaaccgccactcccgtaaagcatattctgcatcatttccgtgaaatgccggactgggaaaagataggaagcatcccgaaccaacggatacatattgggaacaggaaaagttaccccggataaagtagctcccaaagagcctaccatagatactatgctaataatcagtgaaatggcaggaaataatgaaaataggaacaatcccaatgattgtgtcgcaataatgaaaagcattgtcattatattcattagccaccaactcccttgaaagggaatatgtagaattccgaacatcacataattggccagccaacctatcaggatatatataatagtataaggcaacagttttcctaatatcgccgttaccatattcccttttgcagcaactagccaatcagttactgtacgaaacttgatttcaatgccgattgcgtatactgtagtcaataaaattaatatttgaaataagacaaagaaaaatggctggctcaaataaacggagtaatccagacttggattatatattggatgattgcttgcctgtactggcaataagaaagttgtaatctgatcttgttccactcccagagcaacagcttgcatcacaacaggagagagtgacactggagccaatgctgtttcgaatgcagccattaactcgccacctacagacaataaagcataatgatagtagtaggaaagagttgcatcttgtcctgtaatggcgtcttgttcaaatttgggaggaatagaaagataaccataaatttcttttctttgtacggcttcccgagcggctgcttcattcacgaaatactttgttactttaaaagtcggtacggcagatatatttcgaataatactacgggaagtagcggtattatcctgatcgataatgccgataggaatattttccatttgtccgttgccgaaaatagttgccataaagaagagtgtgaataatggcaggatgatgcagacaccaaaataaaggcgtcgcgaagtcattcgtcgccactcccggagtagtacggtacgaaagggtgaatatgtttgtgatggactcattcttttattaatttaacgtcagtaatacagacattcccggacgcaaatcttttatcttttgagtagggcgggcgtggatctcaaacgtgcgcaggtcataactaccaacttgtttggttgatttccaggttgcgaaactacctaacggactaatataatagattttaaattctatattctttttatcgatagcaggtacatctgcaacaaacgtttcacccattttaaattgtggcattaagtcttcgcgtacattaagtacaacatgaacgtcattcatgactaccagattcataataggagttcccggtgcgaccaattcaccgcgtttagggaagattgtggctatttgtccgtcttccggtgcagtcaaccgggcatctaccagtaaggctgagacttcatcaacagtacttcgggcagcatctaccatactggcggcagatgctttgtcttccgtctgtgcaccatccactgccatttgatattgttcgtaagcagcgcgttcggctgctaatgctgccttatacatagcttctacttcgtctttccgttgagaagtaactacactgtccttgtataaagtaagtatacgattataagttattttcgcaagtgacaggtcgctcttagtcttattccagagttgcaatgcagtggctacaatctgtcgtcgggtgccggcatcaatttttttgttttgcagtactgctacttgctccaatgcattgacttgttgaaacttggcgtgtacttccggactattaattactacaagagtgtctccctgacgcacccaatctccctcttgaacgagaaacgtatcaatgcgtccgggaagttttccgctgatacggatttctgtggcctctgcttctccttgcagaaccagtggttgtttgtgcatcaatatcattccaagggcggtaaagataccgacgactagcaaaataataacaaaagcccatgaaagggttctactagttggtttcattgttcgttacggtttaggttgatagtttataaattgttcaggtgtaccacaaagtgaaagtaaattcattagtgctacatcatactcataataggctgctaggcgagctacttttacactggcaagcattgtttcggcatcaataacttcggtggaagttgccattccctctgcaaatgatttcttccggatacgtacaagttcctcacttaaagcaatcgtagcattcaatgcttttgcattatcctgtgctttttgcaattgcgtatagagtttatctactccaactgctagatcgtcacgggctttcatctgtccgagggctaatgtttgttgagttaacttcgactgccggatcttcttttcacgatctaatccgtcgaatagattccatgtaaagccaatgcctatcattgtacgtggcagtaaattactctgaatgccatgcgaatataaggtctgttttccgaaaagggctatattcggcagatagccgctttgagcaatcttcacttcctgtttggcaatatgttcttgtagctgtaactggttaagcatatagttcccactgttaacagataggtcgaaaagcattttcggcggcaaagagtcattcataaaaagtggagaagtgggaacaatgttttcatccatatcttttttattcagtaataccttgagcgtattttgaaccacagtttcatcttttcgtgcagcatccagtgtacgtttggcttcgtccatatttacttgggcaaaaagccgtcctgctttgtcaatcattccggcagcttccagtttcagtgcattctcataatgtttttgcagtcccttataagtttcttcccgaacggttacgatttgctgtgccagccgtaatccgtaataactttccgttaacagattttgttgggtagcagcagtctgtgcccggttttcacgtgccaagtccaccattgtccgaccgatattagttgcatgaaatcgttttcctccggaaaagagtacccattctgcagataaatcaatagaggttaaattacgtggagtcagggggaaaacaagagtatttgcccctatctgatccagaatcgccgaaataacttgatcgtccggaattatggaatgtacaaaattctttgccggatctgtaaattgagacaacggctgtttcacctcgatcttctccgacatatgtacaaatgcacccgaagattgaagactgggataccaaaaagcattcaatttatctcgctctgccttagctatttctatacttttatcggctatctttaagctttgattttcttgtcggagtagacgtaatgattcctcaaaactcaatgaaacctgtgcatctgcccaaatagcagagaaacacaaagcaagtagtacaaaaagtgatttattttttttcatgctggttaggttaaatctaaatttgagactttctaacagatgaaggaacaggtttgttcactccaataaatggagaaacaactttttaaactcaatgaaagagttatcgattattctgatttagttcaaagttatgtaatatttcccctattaaaaaatcaaggattttatttgagatataaaaattatatttacctttgcagtgtaatttaaaggaagatcctttaaactggtaaaaatgcggtagtagctcagttggtagagcattagcttcccaagctaagggtcacgagttcgagtctcgcttaccgctcacgataaaagtcagatagttattttttagctatctggctttctttttgtgactgaaagataacaatgggcaaagtctctttctactatgaaaataatgcatgaagaatagggcagttcatgcatttttcgtatttttgcaccctgttttgacacttatgagtactttaaataaaaaaatataatggcaaaagaactgaaagaccttaccaaacgtagcgagaattactcgcaatggtataacgatttggtggtaaaagctgatttggcagaacaatctgccgtacgcggatgtatggtgattaagccttacggatacgctatttgggagaaaatgcaacgtcaactggacgatatgtttaaagaaacaggtcacgtaaacgcatatttcccattattaattccgaaatcattcctgagccgtgaagctgaacacgtggaaggtttcgcaaaagaatgtgccgtagtgacacattatcgtctgaaaaatgcagaagacggttcgggggtagtagtagacccagccgcaaaattggaagaagaattgattattcgtccgacatcagaaacaattatctggaatacttataaaaactggattcaatcttatcgtgacctgcctattctttgcaatcagtgggcgaacgttttccgttgggaaatgcgtactcgtctgttcttgcgtactgctgaattcttgtggcaagaaggacatactgcccatgctactcgcgaagaagctgaagaagaagcagtaagaatgctgaatgtatatggtgaatttgcagagaaatatatggctgttccggttgtgaaaggtgtaaagtctgccaacgagcgttttgccggtgcgcttgacacttacactatcgaagctatgatgcaggacggaaaagcactgcaaagtggtacttctcattttctgggacagaattttgccaaggctttcgacgttcagttcgtgaacaaagagaataaattggaatatgtatgggctacttcatggggtgtttctacccgcttaatgggtgccctgattatgactcattcagatgacaatggactggtattacctccgcatctggctccgattcaagtagttattattcctatttacaagaacgatgagcaactgaaacaaattgatgccaaagtagcgggtattgttaccaagttgaaagcattaggtatttctgttaagtatgataatgcagataataaacgtccaggcttcaaatttgcagattatgaattgaaaggtgtacctgttcgtctggttatgggtggacgtgatcttgaaaacaatacaatggaggtaatgcgtcgcgatacacttgaaaaagaaactatcacttgcgagggcattgaagcttatgttcagaacctgctcgaagaaattcaggctaatatctacaagaaagcattggattatcgtaattctaaaattacagtagtagacacatacgaagaattcaaggaaaagatagaggaaggtggttttatcttggctcattgggatggaacaactgaaacagaagaaaaaatcaaagaagaaacgaaggcaactatccgttgtattccattcgagtcgttcgttccgggagataaagaaccgggcaaatgtatggtaacaggcaaaccgtctgcttgccgtgttatatttgcacgctcttattaaactgtgcggttaaacagttgaaagaaaggtctatttatttaataaagatattactttctcatacaagagtccgaagtttcagattaaatttcggactctttttttatccatttcagttttttttcagaaatatcctctttctttgtatcatgtaagaaagaaaggagaagattttatgaagatattaattgtagaagatgagccctctttaagggaactaattcaacgttcactggagaaagaacgttatgttgtagaagcagcaggtgacttcaactctgctttacgcaaaattgaagactatgactatgattgtatcttattggatattatgttaccggacggaagtggtcttgaccttctagaacggttgaaagccttgcataaacgggaaaatgtgattataatttctgccaaagattctttggaagataaggtcttgggattagaattaggtgcagatgattatttgccgaagccgtttcatctagctgaattaaatgcccggataaaaagtgtaattcgccgcaatcagcatgacggagaaattgatatccgtcagggaaatgtacggatagagccggataaatatcgtgtttttgtcaataatcaggaactggaattaaatagaaaggagtatgatatcttattatacttcataaatcgccctggacacttggttaataaaaatacattggcggagtctgtatggggagatcatatcgatcaagtagataacttcgattttatttatgcccaaatcaaaaatcttcgtaaaaagctgaaggatgcaggagcagatcttgaaattaaagcagtttacggattcggttacaaaatgatagtagaataacagaaacaataggagtcatccatgaaattaatatattacatcattctccgcatcactttagccctgacacttatcctgacaatttgggccgtatttttttatgttacaatgattgatgaagtaaatgatgaagtcgatgattcacttgaagactactcggagacaattatcattcgggcattggcaggagaggagcttccttctgaaaacaacggttcaaataatcagtattatcttactgaagtaactaaagaatatgctggaaaccgcaatgatatccaatataaagattctatggtctatatcgtagaaaaaggggaaacagagccggcgcgtatcctgaccactatctttaaaaatgacgaaggacgttattatgaactgactgtatctactcccagtatcgagaaggatgatttgaaagatgctattcaagtatggattatctttttatatgtagccctgttactctgcatcataatcatatctgtatgggtattctatcgaaatatgcgtccattatatgtacttcttcattggttggacagttatcagacgggaaagaaaaacgaagcattgaacaatgatacccaaatcacagaattccggaaactaaatgatgcagctgtccgatatgccgaacggacggaacaaatgttcgaacaacagaaacaatttatcggaaatgcttcgcatgagatacaaacaccacttgccatttgccgtaatcggttggaaatgttaatggatgatgattcattgtcggaaaatcaacttggagaactaatgaaaacgcatcagacattggaatatataaccaaactgaataaatctttattattgcttactaagattgacaatggacagtttactgataccaaagatttggaactgaacacacttctcaagcaatatttggaagactataaagaggtctatgattaccgcaacatagaagtaaatatcactgagcaggatcgttttcatattgtaatgaacgagtctttggcagttgctctattaactaatctcttgaagaatgcattcgtgcataatatggacggaggacgtatacagattattattacaaaaaacagcattactttccgaaattccgggtcaggacatccattagatgaagaacatatttttgaacgtttctatcaaggaagtaaaaaagagggttctaccggactagggctggcaatagccgattcaatttgtcgtctacaacatttgaatatacgttattacttcgaacaagaggagcattgtttcgagattttgaaatgatcgttttcgtcacagagaacacaaaggacacggagtgagagtgaacaagatatttatcggttattataaactgatcgttcaaactatttctccgtgtcctttgtggattttgtggtgcgaatctctatcgggatcgaatttctcttctcataaacataatataagagatagcaaaacagataactgttgctgcaattaatcccgtgagttgtggccatactaccagaagactttgtcctaatggaagtgggcttggaatagctccctgaacttgttccattgtaagtggtcctagacttcttacagaaggcattaacagcgtcgtagtagcttcattaaataactcgctaggtgccagacgcattaatccgagaatgaatttttgataactgatgatctgataaggcgacgccatttgtgaagggctcaatccttttgccaccagatttacaatcattgtgtagaatacgctgaaaaacaaccacactgccacagatgccaacgctgatgtagctgcctggcgaaaacgcaatgaaaataggattgccaaattcaaccaaaaagcaacatagaaaatacttgttataatgaagaatacaattctccaaaattcctcagccgtaggaggaataccgattgcaatcagtccgaatcccattaccagaaaaccgagtacgaatagcataacacctattactatcaaagcagccataaacttcgcattaattatgcaatcacgatgaataggctgagataacatacggcttaatgtccccttattttgctctgaattgacggcatcaaatcctagagcaatacctaatagaggtcccaaaaagttgataaacaacgtaaaagaggggagagttccgtccgaagctgtaaataatttcaaaaacagaaacgaaccatccggatcattcggttttattgctgcgccaatattagtaagggcagtgtatagagaacccatacaggtcagtgcaataataccgatcaaaataataaaacgccaacttttgacatgatcggatatttctttattgacgataacccaaaaaggatgattgacttcattcatgttgttctcctccttcctcaaaataatgattatagatatcagacagttcctgtttcttatctttcagttctgtcatatcaatcagtgcgagtattttcccattactaaataatccgacccggtcgcatactttttgtacctgatccaggtgatgagaggaaaagagcacggtcaatcccttctccttacttagccaacggatcagttcgataaattcctgaacaccagcaggatcaatacccgaagtcggttcatccagaataataatttccggattcttgataagtacatccgcaagtcccaaccgttgtcgcatcccgcgtgaatattttcctgctttctttttcagttgatcttccaatcctgtacgttttattaactccatggccttttctctcgcttccttatcaggaataccattcaagcgtgctgtgtatatcagattttccagtcctgtcatatcatcataaaatcctacatcttcgggcaaatagccgatttttctttttacttcgatagggtgtgtagtcgaattgatgccgcaaatctcaacggaacccgatgtcggttctgtcaaccctaacatcattaaaatggtagttgattttccggcaccgttcggacccagtaatccgaatatttctcctttttgaatatgcaggcgaatatgatccacagcagtaaaattaccgtattgtttggtcagatcggtaagtacgatcacttgttcgcccataatttacctccttccatatttacggaacagatagtaaactacaccgatagcagccgcaataatcaaaacgcctacccacccccatatcatcggagtttttactgcgattctgaattgcgcatcagcgtttacttcaggagtttttgccataatggtagtcacatagtcacctgggagtgcttttttagaagcttttaatatagcggttaccgtcgatgtttcgccggcttttaatgcatcaatttttgttggttcgaaagttacttcccaatcagctggtttgctggcagataactggatatctttcaacaatgatgaacctgtattttttacttccagttcaattcgcttcacgtctccggcagtgatatcggcgcttagtaatcctctcggagtagttagttccatttgaaaagaaccggtcacaactacttccaattcaagttcagccgaagtagttcccgtagcagcacgtaccgggattttatagcttccggcttctacattggcaggaggagtaatatctatgcttacattctggctactgttgggttccacttgtgcagaggtagcttgcttgtagttaggtttaaaaataacattccatcctcttggtgcattagccattaaagcatacaactgttggtcggcagtctggttctttaaagtggtactgaaggtaaaggttgacttggagttaccttccatattgggctggtcggtagtaaattcagtctggtaagtaccttgttgagcaactacaacatccaaaggaagtttagcatttccggcatacactacaaaatgatagtttcctttatttaccttcaatggaacatcgactttcagattaaaagtctttttttctttgggaagtacggacaattgactaaggctccaaccgccggatttcatttcgtgtttccaactgctgcccaatccgctaacagaaaggtttgcatttgtcaattcatccgtattgttaatgaggtcaatactgtaatcaattgacgctcccggtgatacagaaattttggtgtagggagtgtacagaattacgcttttaggaattgagtcgtttgcgtgtgtgtagttcaagggaattaatcccaatagaatagctactaataaaaaacaatttgttctcatagtcataaaaaagttcttatggttatttaatatgaatactgtcaaatttgtgtttgcaaaaataaacgatgtgtttattagtagttttaaaagaatcataaagaatctaattctgtgatgaaatatatagtgacgttatttccattcgatagtgacgatattccatagatatggtgacactatgttgagggcatagcgtcactatatttttatgagatttattttttcggaaattctcaaaattcccaaatcttttcagattttcccctcatctttgcaatataaattaaatgataacagtaaaaccaattaaaaaaacaacgattatgaaaaagttagtattcttattagtatgtttgtttactttgcaaacagtagcacgtgcagacgatgacaaaccaatccaggttactcaaatgccacaaccggctcaacagttcatcaaacagcattttgccgatagtaaagttgctttggcaaaaatggaaagtgatttcttctataaaagttatgaagtgattttcacgaatggcaataaagtggagtttggcaagaatggaaactgggaggaggtgaattgcaaatatacttctgttcccacagctattatccccacaactattcagaaatatgtgacaactaattatcctgatactagagtgctgaaaattgaacgcgataaaaaggaatatgaagtgcaactttccaatcgtgtggaattaaagttcgatctgaaattcaatttgatcgatattgataactaaaccttaaaaaattagaactaatgatgaaacgaaagatttttacctttttattggtattaggtgttgcatggagcttacatagttgcgataataatgatgatgaatcaatagctgttcctgttgaattgcaaagtacattttcggctaaatatccgaatgccacaaacgtagaatgggaaaacaagtacggatattacgtagcagatttctatgacggacatgaagcatctgcatggtttactcaagaaggtaagtgggttttaacttcatgggaggtacatttcaacacattgcctgatcctgtaaaaaatacgattcatgctacatatcctggacgagttgatgacgacgacactgaatatgttgaagaagcaacgggtgttacatactacttgattgacatagaaaatagtgagatagatgtaaaaataagagctgacggacaaatacttgactaataattatacaataatcttattatggaacggtaacgaactattcatttatagtttcaggtagagtcaatcatgcgattattttttatgggtttcatgaaggtgtgtcgtaatacacgatgcgcctt

SEQ ID NO: 2990 - DNA, 42159 bp, Unknown
  gut microbiota DNA sequence
tattgggtgaacttcatgttggtggcctaaccaagaaggcaaccgaacaaatgatcgttgaaaagctgaaaccttatattactgaaactcctattgtaacagtacgtatggtaaattataagatttctgtgatcggagaagttgcccgtcccggtacattcacgatttccaatgaaaaagtgaatatcctggaagctttggctatggcaggtgatatgaccgtatatggtttgcgtgatgatgtaaaactaatacgggagaatgctaatggcaagcaggaaataattccattggatctgaataaggctgagactattctttccccttattactatctgcagcagaatgatatcatatacgttactccgaataaggcgaaagcacgaaattcagatatcggaactagtacaagcttatggttctctgctacttctatccttgtttctattgccagcttgttgtttaacatcttgaaataaaaagaaagagtcatgaaagaagaaaatcaaaacgggaaggaacgccaaatggctgaagaacaaatagatttccggacattgctttttaaatatattattcattggccttggtttgttggggcagtgttgctctgtcttgttggtgcatggctctatctgcattgggctacccccatttataatatttcagccaccgttctaataaaagatgagaagaagggaggaggttcgggagtttcttcggaattggaggatatgggattaagtggtctgatgacttcttctaagaatattgataacgagttggaagtcctacgctcaaaaacgcttgtaaaagaagttgttaatcaattaaacttgtatataacttataaagacgaggatgagtttccggctaaaagtttatacaagacatctccggtacaagtaagtttgacacctcaggaggctgagaaactaagttctccgatggtagtggaaatgatactgcagcctaaaggaagtatagatgtgaatgtgactgttggtgagaaaagatatcagaagtattttgagaaactgcctgctatcttcccgactgatgaaggtacattggctttctttcaagatgttgactcggtaactttgcaagatggcacgaaagtacctcggatagagaagaacgtacgtcatataactgcgactatcaacaaaccgatgagggtggcaaaggggtattgcagcagcttgtctattgcgccaacctccaagactacttctgtggctgtgatttcattaaaaaattccagtttgcagtgtggacaggattttatcaaccaattactggagatgtataatcgtaatacgaataatgataaaaacgaaatcgcccagaagactgctgagtttattgatgaacgtattagtattatttcaaaagaactgggaagtacagaagcggatttggaaacctttaagcgtgacgcaggtatcacggacttgacgagtgaagctcagatagccttagccggtaatgctgaatatgaaaagaagagtgtggagaaccgtactcaaatcagtctggtgaatgacttgcgtaaatacttgaaaggtaatgaatatgaagtattaccaagtaatgttggtttacaggatgctgccttgattggtgcgattgaacgttataatgaaatgttggtggaacgtaaacgtctgctacgtacatcaacagagaataacccgactattgtgaatctggatacgagtatccgtgctatgaaagctaatgtacaggctactcttgaaggaactttgcaggggttgatgataaccaagtcaaatctggatcgtgaggcaagccgctactctcgtcgtatcagtaacgctccggggcaggaacgtgcttatgtaagcattgcccgccagcaggaaattaaagcaggattgtatctgatgttgttgcagaaacgtgaagagaacgcaattgcgttagctgctactgcaaataatgcgaagattattgatgaagcgatagctgatgatactccggtatctcctaaacgctctatgatttatttaattgcattggtgttgggtgttgggattcctgttggcatcatttacttgattgaactgacgaaattcaagatagaaggtcgtgccgacgtagaaaaactgacgagtgttcctattataggtgatattccattgactgacgaaaagaatgacaagaatggctctattgctgtcttcgagaacaagaataatctgatgagtgaaaccttccgtaatattcgtaccaatcttcagtttatgctcgataatgatcagaaggttatccttgtaacctcaacagtcagtggagaaggaaaatcgtttgtttcggcaaacctggctatcagtctttctcttttgggaaagaaggtcgtgattgtcggactcgatattcgcaagccgggactgaataaagtattccatctctccaataaagagaaaggcattactcagtatctttccaatcctgaaacggatctaatggaacttgttcaaccttctgatgtcaataagaatctgtttgttcttccgggtggtgctgtgcctcctaatccaacggagttgttagctcgtaacggtctggataaagccatagaaatcttgaagcagaacttcgactatgtgataatggatactgcccctatcggtatggtaaccgatactttattggtaggtcgtgtggctgacttgtcagtatacgtatgtcgtgccgactatactcataaagccgaatatacattgatcaatgagttggctattgagaagaagttgtctaagctttgtaccgtaatcaacggtgtggacttgaaaaagagaaaatacggttattactacggctacggcaagtacggtaagtactacggttatggtaaacgttatggctacggctatggatatggagaaaagtgacagataaatctgtgatatatgaaaaagacggtagtcgaatatatcacagatacgcttgaagatattcccaagcaatctcttcaaaccaataaaaggcgtttacatgcttttttctcagaacaggaaacaatagagaagcgggggacacattttgtattcaggtatgctttctattctgttgaaaaattacgaagacctacgaaacaaagcctctttaaagaatataatatgttgtgttctgacttgaaaagcactccttctggggaaatatcggatatggaatataaagatgttgtattatatggtaatacttcctctcctgcagtacaagaacgattgactgaatatttggaacggaataattcgttaaagattcaattgtctttttgtgatgaagaaacctcagaatgtaaaacaggagaaaatattgcctatgcagaactgcagaaagcattgttttattgtaaaaggaagaagtatttgcttctgttcatttcagttcgtgagttgatacaggatattcgcttttacgatctgcttaatgaatatcgtgttgatttccgttgtgttgactttccttggttttgcagggagaatctacagttgataaaagcagttatgttatatgagaagctatcttcttaaatagtccttaaatagcatattgatctgaatattagtattatatgttacattttatattgaattgctatatgtaggtccctaacttcatattacaagatgaagaaccctacatttttcgttggttaagaagaatacagcggtatatcttaaccgacactttcatatcggtttgatttccgatatgctttttttaccccatatatcaactgtctgtgaagatcgttgatatattttttataaaataattacatttaaaagaatagaggttgtgtcaaaaatgctgacacaacctctattcttttattagcttcgtgaaacttgcagccctttgtcggaaagagtcatatcaacaaaacgtgctcgtggattaggagcatgctctgtcagtatccgtcgtatctgtcctgcggcttgcgggtctttagctaccatatataaataaccgccgcctcctgcaccgggcaatttatatcctaatgtatagtctttgattgtctcgataatggctgctaccgccggagggtttgtaccgctgtccagcgcctggttttgtgcccaggttttattaatcagaccggcgaagttctcgaaattaccacgtagaatagcctcgctcatgtccgttgcgtgtactttcatctcggctaataagctgaggtgcggaccggaattgaggaacatggagctgacgatttcggctaatattcctttcgctgtacgggtgatgcctgtgtagtaaagcaaatggcagtcgcgatagtcgggatgggtgaatagttggtcgggcagccagcgcactaaaggattctgttcgaaaccggcttcggactgaagcaacttgacaccgggaaaaacaccgccatattgatcctgccaaccaccgccggtggtcagcaactgctctaatgccaatgtataactgcaaatatcgtttctatcccatgccagtccgcagaaatcattgatagctccgagaacggtggaagccagaatggaactggttcctaaccccgaacccgcaggaattgccgctaataaggtaatttcgagtcctgcgccgaaggctttcagatgttcttccagcgaaatgtagttctcggcggaaaattccggtgcaaatccggctaaagtaagggccgctttgggaatagagaaaggagaaccgactttcttgtagtcttgcagttcctcatagttttctatgatttccacagcacccatatcaatggagcgaagtacgatgtgatactctttacatggtttcacatatacttgcaagggtggctgtccgttcaattcgatagccaggttgacaacacttcctcccgaatagagagagtagggaggggtatctgtccaccctcctgccaggtcgatgcggacggggctacgtccccatacaatctggtctgaatatacatcgagacggggctggttcttccggctgggcatagctcccaataatccgtcgcgaagaagttggaatgccgattgttcttcttctttatagttactgtcgccgtgtagcttcatgatacgtccccgtagcatccggttgtggattctgaccattggcgcggcgtcttcttttaatatgtcaggcgtggctaaatcaaaacggacaaattctttggcagcatcctgcaaatcgagttgatagaatacactcttttcgtaattgtcggccagccttttccagttgctccggcgataagcgctacgctgcttatacagtcgtttcagattcgcgcgtgcggatatttcgtcggcagagactttttctgcttttagccaaagttgttttccttcttccagttggggttcggagatcatccaacgtatcaatatacccaaatcttctacggaagctgttaccgggaaaatggaagcagactgtaaatcgtccgtgcgtccatttatgtcttcccaagtaagggctctttcctgcatccactgtgaaaaagggatattgagatatgtggtcgtttcatttttcaatgctcctttgaatacatcatccaatccgtaaggacgtgcaacgaatgcgttgtcaccaaaaggaaccacgtcaatacagataccgtccggcagatttatattccattgattttcgggaacacctgtgattatctggcgtgatccgagatgccagccttcccctacatggctgttttcaatccataggttagcgttatctgcacagagggagacttgtgtattggagttctggataaagattgccggattcggttttactttccggtgcatgatctttctttggtcacgtaccttgtcctgtatggctagcgtagaagaaatcagttcatgacttgtaccgaaatggtaaaattcgccgccgggtaacggtaatatggctacggatagttggttgacttcttcatcttccgtcttgggatgttctcccaaagccagcccatagtcggaatataagtcatagtaattgatgtcattcgttccttccttgagcgagcgcttcattaagacctctacggcacggtcacttaaaatccagatgccgatgtccattaggaaaaggtgagtcttggataaaccttccaattcttccagagagggcttctgtaacatgaagtcgagtacttcagggctttcccggtcggagacaaaaactccgtgatgagtggccagagaaggatttacccataagccgtagcatacgacgtccacattgggaatgtcctgcaaaggtttttccgaacggatatatacatctccactggctatcaatgtattcatgccggccggcgcttgctgcatgattctttcgtataacgggagttgcaaagacagcaggttctgtcccagtctttgtcctctttcccaactgaagatcgggataggggtcagtatcttaccggaaggtccgtaactgggtaagcggcggctttgtcctcctgcatgaagtaatatccttttttcgcgtcctatccaatcattgaaagactcttgtggggtaaatgcctggtggcaggcttgcaagagccaggttgttccgcctccggagccaagcttgctgcctatgggatcggatgtacaaaaccattcgttatgattaacttcttccagttcgtgaaaacagtggatcaggtttgggggtaaagataataacttttgcatgatagaatcgtcgtttgttggttagaatttctatagatcaagtccatcccaagcttcacagagcgcttgcatggacggtagtaataaatcggctccggagtccagcaatacctgtccgtccagaggtcccgtgttcacagcgattgtgaaaatgccggctttgtgtccggcttccaccccgagaggtgcgttctccactaccaccgcttcgtcggctttcagaccaccttttttcagggccataagatacggttccgggtttggctttccgtatttgacatcgaatgccgtaaccattagttctttgtgaaacattcccggaaagttatgctccaaccgttcgagtaatgaaagttgtccggaacctgttaccaccattggagtgagtccttcaccttttactttttgcaacagttcccatgcgccgggcatacgttcagcttctgcatacgagttgaataagacacttttctcctgatatatactttctatttcttcctgcgtggcctcccttcccagttcacgctgaaatacgatattaatagtggcagcccctgtccgtccttcgtgcatataggcttcttcatggctaagagtaagcccgtgtgatttcatcaccttatgccaggcttcggaatgatagggcatggaattaaaaagcacgccgtccatatcgaacaggacggctttcagttttttcttcatactttataaatagtgaaccattatctgtttagagtttaatcttcttatttcgaaacatatacgaggcaaagataactataaaaaatgagagataagacaaaacggacggatagttgcaagcgggctctttgagcaataaagtatccaattatttgtcatttagaagattatgtgtatttttgtagcattataaactcaatgatagcatgaaaaagagagtattattgttgctacctttgtttttaggtgcttgttccgatagtggggagagtcctgttatcacgatagaaagactgtatgtaaatactgatccggacagtgaggattctaaaggggaagactatactaatcagaaagataatctgccggctttaaaggtaggggataaggtgaatgcttttttgctcttggatgggaatggagctgaacttaaaacctttaaacttcagaatgacgaagcggtgaaagccgaacttcgttatgaaaaagccgaagtctctaccgaaggaaacctgacggatgaggaaaaaggtcagttacgttttaaggacggtgtgacgcaaaccagggtcatggtgaaagctactattgaacatgtagataagaacggtgatgtgaagttggctttctatctttcctccaaggctgaatgcgaaggcgcacaagaggaaatcggcttgaaaaccaaagaggtagaggagaaagattaagaacggaatgtcgatagacaacataaaaaagaagcggtcttattaagaccgcttcttttttatgtatagattctattacaatcttgattggatcgctttggattcttcctcgtaacccggtttgttcagcaacgcaaacatgttcttcttgtatgcttctacacccggctggttgaaaggattcacgcccagcagataaccgctgataccgcaagccttttcgaagaaataaagcaggctaccgatattgtattcgctcaatgaaggaagaacaatacgcatattaggtacgccaccgtctacgtgagccaattgagttcccagttccgccattttgttcacttcatccacacgtttgccggctaggaaattcagaccatccagattggcttcgtcagaaggaacttccagtttatggtctaccttatccagtgagatgacagtttcgaagatagaacgttcaccttcctgaatccattgtcccatagagtgaaggtcggtagagaagtctactgatgcggggaaaatacctttgttgtccttaccttctgattctccgtaaagctgtttccaccattcgcttacataatgcagtttcggacagaagttgacgaggatttcgatcttctttccgtttctgtacagttcattacgggtagcagcatagatagcagcagggttttctgcaaacggaacgtctgcgccacatgctttttccatgtcggcagcaccggcaaccagttgctcaatgtcgaacccggcaacagcaatcggcagcaaaccgaccggagtcagtacagagaaacgtccgcctacattatcggggatgatgaatgttttgtaaccttccttgtcggcagtaacacgtgctgcacctttcttggcgtctgttacagctacgattacctgttttgcagtttctttgccgcgttggtcttcgcattgtttcttcaacaggcggaaggcaagcgcagtttcggtagtagttcccgatttggagatattgataacaccgaatttcttgtctttcagatactcagtcagttcgaatagatagtcttcgctgatattgtgtccggcataaatcatgatcggagctgtctttttttcctgcaaccaagtgaagctattagataacgcctcgattacggcacgtgcgcccagatagctaccgccgatacctgcaatgatcactacttcacagttgtctctcaagacctttgcggtagcgttcaagtcagccaagtgttctttgctgatagaagaaggcaagtgcagccagcctaaaaagtcgttcccttttccagttcctttttccagcatttcctgtgcggcttttacctctgcttcgtaggcagaaaccttttctttggagataaatccaaaagtcttttcaatgttcaagctaatcatatctttcttgtttaaaggttatctaaaagaatcagttagtaatttaatctcgatcataggcgagatacgttcgtatagaatgttgtacacagcgtccagtatcggcatattgacatgatgatgcttgttgatttccttgatacacttcgtaccgtagtaaccttcagcgatcatttccatttcaatctgtgcgctctttacggaatatcccttaccgatcattgtgccgaatgtccggttacggctgaaattcgaatagccggtcaccagcaagtcacccagataaacagattcatctacgtttctgttcaacggatgtaccgtattcaggaaacggttcatctcctggatagcgttggaaatcagtacggcctgaaagttgtcgccgtatttcagtccgctgcaaataccggcggcgatagcatatacgtttttgagtaccgaactgtactcgatacctgatacgtcgtcactaacagatgttttgataaagctgcttcccagtcggcgcgcgaagatacgtgctttgtctttgtccgggcaggcgatggtcagataagaaaggcgttccaaagctacttcttctgcgtggcagggacctgccaatacagcgatattttcgggaggaacaccgtattccttggtaaagtattctgatacgataacgttgtcgtcgggtacgattcctttgatagcggtgatgatgaacttatcctttatcttggttttcagctttttcaggtgagctttcagataaggggaaggagtgacgaaaatcagcgtatccgattctttcacaacatcgttgatgttggaactgaaagagatacgcttggtatcgaatttcactcctgtcagataagccggattgtgccccaatctcttgaaatcagcgatgcggtcatcgcgtcgcatataccaattgatagagtcttcttgagccagacacatcttcgcaatagctgtggcccaacttccaccgcccattatcgctatcttaccgggtaatttcatttgtatggatttggatgaagaacttatttaattttctgtatccaatcagttacgtcgtttaccgacgggttggccagttctaatttgtatttcttattgatgccgcagatgtcctggtgtagcttctgcgcattgacatctttcatgtcttctacggtgttgtagccggctttctggataacaggcacccagtcttctgcgatacccagttccatatatttggcggctgcgtctttcttcaccaccttttccgggcgcatttgcgggaagaataacacttcctgaatggtagtctgaccggtcattaacataaccagacggtcgataccgatgccgatacccgatgtaggaggcataccatattgtaaagaacgcaggaagtcctggtcgataatcattgcttcatcgtcacccttgtcagccagacgcatctgttctttgaagcgttcttcctggtcgatcgggtcgtttaattccgagtaggcgttggcaagttccttgccgtttaccattaattcgaaacgttcggtcagtcccggtttggaacggtgcatcttggtcagcggagacatttcaaccggataatcggtgatgaaagtcggctggatataagtaccttcgcagaattcgccgaagatttcgtcaatcaacttgcccttacccattgtgtcgtcgatttcctccattttcagttccttgcagacttggcggatttcttcttcgctcttgccgttcaggtcgtaaccggtcttttccttgatagcgtcgaggataggcagacggcggtaaggagctttgaaactgatagtctttccgtcgacaacgctttccgtacagccgtttacagcgatacagatacgttccagcaatttctcggtgaagttcatcatccagttgtaatccttgtactgaacatagagttccatgcaggtaaattccggattgtgggtcttgtccataccctcgttacggaagttcttgccgatttcatatacaccttcaaaaccacctacaatcagtcgcttcagataaagttccgttgcgatgcgcaggtaaaggtctatatccagcgagttatggtgcgtgatgaacgggcgggcgcttgctccaccggcaatagattgcaggataggcgtttccacttcagtgtatccggcttcatcgagagcgttacgcagtgttttcactacggtggcacgcttcaggaatgtctctttcacaccgtcgtttaccaccaggtctacataacgttggcgataacggagttcgggatcttcaaaagagtcgtaagctacgccgtccttgtattttacgataggaagcggtttgatggattttgcaagtacggtcagcttctttgcgtgaatactgatttcgcccatttgggtgcggaatacaaagccctcgataccgataaagtcacctaagtcgagcaggcgtttgaatacagcgttgtacagttccttgtcttctcccggacagatgtcgtcacgggtgatgtacacctggatgcgacctttagagtcctgtaattcgataaaagaagctttacccattacgcggcggctcatgatacgtccggctacagaaacctggcgcggctcgtcctcgtccttgaattcagctttaatatctgtagagaaagcattggttacatactctgctgcagggtatgggtcgatacccattgcacgaagctcattcaggctgttgcgtcgaatgatttcctgttcacttagttctagtatattcatttcgttacgtattaactcaattttgtgggcaaaaatacgaaacttttctcatatatcccgtaatctgtctcttttttgtatctttgcgccctcaaactaataggtatgacaggacaaaagacacccactgcgttgggaacggaaaagatcgggaagcttttaatgcagtatgccattccggcaattatcgccatgacggcgtcttctctatataatatggtggacagtattttcatcggtcacggggtaggggcaatggctatctccggattggcgctgacctttccgctgatgaatctcgctgccgctttcggctcgctggtcggtgtgggagcggctacattggtttcggtgaaactgggacaaaaagattacgacaccgcacaacgggtactcggcaatgtgctggtactgaatattatcatcggacttgcctttacggttgtcacactgatatttctcgaccctattctttatttcttcggtggtagtgacgccacggtaggctatgcccgtgattatatggtcgttatcttattgggtaacgtcgtcacccacctttatttaggtctgaatgccgtactccgttcggcggggcatccgcagaaagcgatggttgccacgattgccacggtggtgattaatacgatactcgaccctgtttttatctatggcttcggctggggaatacaaggggcggcaatcgctaccattaccgcacaggtcatcgcattggcatggcagttcaagctattctctaacaaagaagaactgctgcacttccataaaggaattttccggttgaagaagaaaatcgtagtcgattctttagcaatcggtatggcgcctttccttatgaatctggcagcctgtttcatcgttattcttatcaatcaaggtttgcagcatcacggtggtgacttggctatcggagcgttcggtattgtcaaccgattggtattcctctttgtcatgattgtaatgggactgaaccagggtatgcagccgatcgccggttacaactatggagccaagcaatatccgcgtgtgacaaaagtcttgaaaataactatttatgcagcaaccattgttaccactacaggcttcctgatgggaatgtttattccccggctagcagtctcgatttttacgacacacgaagaactggtacgcatttctgccaaagggctgcgtattgttgtgatgttctttcctattgtgggtttccaaatggtgacttccaacttcttccagagtatcggcatggcgagcaaggcgatatttttgtctgtctcccgccaggttcttatcctgataccttgtctgctgattcttccacagttctacggacaactgggagtctggataagtatgccgatttccgatcttatagcaagcttgattgccgggacaatgctttggtggcagttcaagcaattcaggaaagtgtctgtctgacgggcttgttgcgatactccttgggagagatgccgacatacacccttcactcatagatgtatcttccggagttattataacataattgaatggcatcagtggctccatgtatcttttcgtttcaaatgggtttcactgcaaattaacaaacaaatagctacaaataacaaactattccggctttttatctccgataacctacaaatagaacaatatttcgtctatatcaacctttccccacttgtttgcttgggatacttttgtaataactaaataacaaatgaaaatatgagacgattaaacttcttattgacaggacttcttgtagttttgctggcgtcatgcaatcagcgtgtgcagaatatagaaaataagccggcagtgaagattgataccgtactttctgctgacaaacagactgccttgcagtttcccggacgggtgaaagcggctcaggacataagcctggcattccgggtgagcggaactatccaacgtatgtatgtgaatgacggtgcttatgtgcgcaaaggacaactgcttgccgaacttgatcctacagattatcagattcaactggatgcggcggaagccgaataccagcgtgtcaaggcggaagcggagcgcgtaatggctctttataaggaaaatgtaaccactcccgacgcaaacgacaaagccgtgtacggactgaggcagattaccgccaaatacaaccatgctaaggaccagttggaatatacccgcctgtatgcccctttcagcggatatgtacagaaacgccttttcgactcccatgagacggtggctgccggaatgcctgtcgtttccgtaatcagcgagggaacgccggaagtggagattaatcttccggcagtggaatatatccgtcgccggcagtttacccgctattattgtacattcgatgtatatccgcagcagagatatgtgctggatttgattagcgtcactcccaaagcgaatgccaaccagctctataccatgcgccttcaattgaaaagcggagacaagcaggcggttccttctcctgggatgaatacaatggtcactatcgaatgtgccgaaggggaaatgcgtaacctgtccgttcccggcggagcgattctccgtcagaacgggaatacgggtgtctttctttataatccgtccgataaaacgattcgtcgttgcgatgtgaccgttactcgcttgcttagtgacggcagatgccttatagtttcggacgaagtgaaaccgggtgacttgattgttgtctcgggagtgcatcatgtgaaagatgggcaacaggtggaacctcttcttccggctgccgaaacgaatgtgggaggactgctatgatagatattagtaaatgggcatttgaaaacaagaagttaatctacttcctgattgctgtactgattgtgggcggagcttattccagctacgagatgagtaaattggaagaccctgaaataacggtaaagctcgccatggtggttactacctatcccggtgcatccgcgcatcaggtggaactggaagtgacggatgtactcgaaaagaatatccgttctatggggaatatagataatgtggaaagctattcctacaacgacctctccctgattcaggtagaactgaaaacgactgtcaaggaaaccgacgtggaacagtgctgggacttgctgcgccgtaaagtggcgaacgcacaggcggaacttcctgaaggtgccagcccttctatcgtgaaagatgatttcggtaatgtctacggaatgttttttgccttgacgggcgacggactttctgacagggaactctccgactattccgaattaatcaaacgtgaagtcagcgaattggacggtgtggaacgcgtcgatttatacggcaaccgtccggaatgtatcaacatctccctattgcaagaccgaatggccaacttgggtgtgaaacctgccgaagtgcttgccaccctgaacggacagaataaaacaacctataccggctattacgacaacggtgacagccgtatccgggtcacggtcagcgataaattcaagacggtggaagacatcggacgtatgctgattcagggacacgatgccgaccagctgcgtctgagcgacatcgcccgcattgaaaaagactacgaagaccccacccgcaacgaattgttctatgatcgtcagcgtgccatgggaatcatggttgccgcctcttccgatgccgatattatcaaagtcggcaaacgggtggagcagaaacttgaacaactgaaagccgaacgcctgccggcaggaatggaatgccacaaggtattctatcagcccgaacgtgtcggaagttctttggggacatttatcctgaatctgatagaatccgtgattattgtagttgtcatcctgatgattgcaatgggattcaagagcggggtgattatcggtatcagtctggtagtgacagtgttcggcactttcctgtttttgtattttatggacggcacgatgcagcgtgtatctttggcatcctttgtacttgccatgggaatgttggtggataatgcgattgtcattatagacggtattctggtcgatttgaaagccggaaagagtcgcatggaagccatgaccgctatcgggcggcagacggcaatgcctctgctcggcgctaccctgattgctattatcgctttccttcctatattcatgtctcccgatacggcaggagtctacacgcgcgatttgtttattgtgttggcggtctccctgttgcttagttgggtactcgccttggtgcacgtcccgttaatggcgaaccggattctgcatccggacgtatccgcagctactgccactaccggaaagcgggtgtacgaaggaaagatatatgcagtgctgcgctcattattgagattcagcctggcacatcgctggagctttgtctttgccatgattgccttggtggtactttcggggtttagttaccggtttatgaagcagggtttcttcccggatatggtctacgaccagctatacatggaatataaacttcccgaaggcattaattccacacgggtggcacgcgacttggaagagatagaggcttacttgaagaaacgtcctgaaatcacgcacgtcaccacttctatcggcgggacgcctgcccgttacaacttggtacgtaatatagccaacccttctttatcttacggtgaactgataatcgactttacttcgcccgatgcactggtcgacaacatggcagagattcaacagtatctttcttcccattatccggacgcctatgtgaagctgaaccgctataacctgatgttcaagaaatatcctatcgaagcgcaatttaccggtcccgaccctgccgtgctacatcaactggcagacagtgcccggaaaatcatggaaaattgcccggacgtctgtctgattaccaccgactgggaaccgcaggttcccgtcctgacgattgaatacgatcagcctacggcacgtgctatcggactgagccgaaatgacgtgagtctttccctgctcacggctacgagtggtatcccgattggttctttctacgaaggaattcataaggataacatctacttgcgctgtcttgacgaacatggaaaacctattgagaatctggataacacgcagatattttcctcccttccttccctcaacggcttgttgacacaggagatgatgatgaagctgaaaacgggaacactctctaaagaggaacttgtggaaactttaatgggaactactccgctgaaacaaatcagcaagcggatagacgtgaaatgggaagacccggttgtcccccgctataacgggcgacgtagccagcgcgtgcaatgttcccctgttccgggcgtggaaacggagaaagcccggcagtctattgccgggcagattgaacggattccgcttcccgacggctacaagctgcaatggcaaggcgaaagaaatgccagcacgaaatccatgcagtatttgttcaagaacttcccgtttgctatcatcctgatgatttctatcttgattatgctgttcaaggattatcggaagccggttatcatcttctgcacgattcctttggtatttgtcggtgtggtagctgtaatgctgctgacaggaaagacgttcaactttgttgctatcgtcggtacactgggacttatcggtatgattatcaaaaacggtattgtgctgatggatgaaattaccctgcaaatcagtcagggagtggaaccggtaacggcactgatagatagttcgcagagccgtctccgtcctgtgatgatggcatcgctcactaccattctgggaatgattccattgttgccggatgccatgttcggctcattggcggcttccattatgggcggactgttgttcggtacgctgattactttattgtttattcctattttgtatgcactattctttcatataaaaaagacagacaaatgaaaaaagagattctttcagccattggaataatagcgggcatattgttcggcacaacgctttctcttttcgcacaagagagactaagcctgaaacaatgccgcgaaatggcgttgaaatacaataaggaaatggctgctgccgaccggcagacagaagcagcacggttgatgtccctcagctataaagccaattttttcccgaactttaccgccaacggaacagggatttacagcactgccgatggaagtctcggcattccgggcggtaatctccctgttttcatgcccaaccccactacgggagaactggtatccagcggtttcgcttatttccccgggttgaacctggattataaagtaggaaccgtttattccggcggcatacaaatggagcagcctctctatatgggcggcaaaattcgtgcggcctataaaatgtctttgctgggtaaagagatggctcacctgaacgaagcgctgactacctcggaagttcttctgaatacggacaaagcttacgtccaactagtgaaagccaaagaaatgaagaaagtggccgagaaatatcacgctttattgacggaactgtcccggaacgtgaaaagtgcccaccaacatggcatgaaacctcagaatgacgtattgaaagtgcaagtgaagctcaacgacagcgaactttctttgcgtaaggcagacaatgcccttcgccttgcttccatgaatctttgccattacatcggacgtcctttgacaacgcaaattgatatttccgatgacttccccgaagtggaacaggagtggaaaatccaggtttccgatattaccgcccgtccggaatatggaatactgaacaaacaagttgctatcgctgagcaggaagtgaagctgaaccgtagtgaattgcttcctcgtatcggcgtcagaggcagctacgactatcttcacgggctggaaatcaacgacgaaacatttatgaaaaaaggagctttctccgtttttttgaatgtctccgtccccctgtttcattttggtgaacgtgccaataaggtgaaatccgccaaagcgaaactcgaacaaacccgtcttgaacaagaaaatgccagtgaaaagatgttgctggaattaatgcaggcagccaataacttggatgaggcgcgtcttgaaacggaactttccgatcgttcactggaacaggcggaagaaaatatgaaagtcagcggcaaacagtatgaggtcggactggaaactctctcggattatttggaagcgcaaatgctctggcaacaggcttaccagacacgtgtagacgctcatttccaattgtatgtgaattatattgcttatctgaaagcggcggggcaactgcatccgaccgactaattgcttccttcgaaaaaagatagtgtttttctcaaagtattctcaccgtgatgagaactttttctcatcacggtgagaactttttctcatagtaatgagtatttattctcactatggtgagaataaccctttgtcagaacataccggaacagcgatttaccagtcgtatttatcaatataccggtcaaattcgggtttggttttaataccatgtttcaaaaagatagccgcaatctgttcttgctcgcaaggatgtagcaagcgttctttgttgcggatacggtaatacatactacgccccattaacgtatacagttctctacgtatggcaacagcagtagaatatgatatattgtctagcaaatgatctataccggaagcaaagtgtgaagtgcagaatggcttgaaataatcacatttgttttcgtttcctgctatgtgaagtggattgactgccgtgtaataagggatttcttgcggaatagataatgtagcttgataacggaggcatttgttacgacgcggacattgtttgttgttgcagtatagaaaagttttgggcacatccttgtaattgattttttcattcatggctttaatcgtttgtatatgagttgttgtttctttctgttattttgttttgtatacaaaacaaaagtgcctatttttatatcctgtattgtaaaacagttaggctcttgtaaccattttctatttatgttctgtttataggaacaaaggtagcaattattttgatataaagaaaagtttgagactatactgatttgatgcgcaccctcatctcctgagcgtcgaatgtcactgattcattacggaaaagtctttctatatgtccgctggttatcatttccgaagtgggcaaagtgtacatatatgggttatctatcagcatgatagagtcacaaagcgacaatgcgatgtcaaggtcatgtgtggagaataagatacatttgccttcttcttgtgccagctttttcagtagcaggcagagttcataacgattgggcaagtcaagaaaggcagtcggctcgtcgagcaggattaccggggtgtcctgcgcaagcgcacgggcaatcataattcgctggcattcgccgtcggacatcttatccattgtcttttctgcataaccggacataccgaccaactgaatggcattatccacaattttccggtcttccggttgaagctgaccgagccagtttgtgtagggagcacgccccaatgctaccacatccttacagcgaagattggcgatgcgcactttgtcggtggttacgaaactaatgcttagagctaatttttccggtttcagtgaagcaatgtcttttccttgcagattgatttctcccgattgaggactttccagtcccattatggcacgcaggagagtactttttcctgttccgttgcgtcctagcagtgcaacgagttgtccgcctgtgattcgggcgtttaccgttttcaacagcgtgcgctgtccgtatcctaatgtcagttccttaagttcaatcatttgaatccatgcaagtttttagctattacccataaaatgaccggaacaccgagcaaggcggtgatacagttcaccggaagcaggaatttcttggcgatgatgtcgcaaagaagcatgctgataagtcccgtcagcatagtggcggggacaagtatccggtggtcggcgttgttgaacagcaaccgtgtgacgtgcggcactgccagcccgataaaacctaccggaccgcaaaatgcggtcaccgttcctgtcagcagcgcggtggagatgaagatgagagtacgtgaacgcttgatgttcattcccattgtccgtgcatagttttctccaagaagcaacaggttcaacggtttgatgcagactatggaaatgagcagtcccaggcataacataggcgtcatgattcccagttgggtagtggtgatgtgtccgagagaacccattgaccaaagcgtgaacattttcaactgttcggcagaactcagatattgcagtatctggataatggcgcctgccacataacctatcatgactcccataatcaatacaccgaggatattttttactttccggctgatgacagctactcccagtaaaatgacagccgttcctatccaaccggaaccgacgatgcccaatgactggagcagtggaaattcagaccagccgagcagtggagctcccagtataaacaaggcaacccctaatcctgcaccggaacttactcccagcaaatagggatccgccaatgggttttggaaaactgtctgcatctgcaaaccgcttacggagagtgccacgcctatcagtgccgccactattacccgtatgaaccggatagaaagaagaatgttacgtgtcatttcatcacattcgcctccggtgagcacagcccataccttggaaacagggatatacgtgtctccggttgccatatctatgattagcaatagcagggcgattatgcctagcgagataaataaaagtgcagtatgtttgcgggggtgtttcattccagacgcctgtaataataaagtgaatcggaaacaagctccggatgaaaaatatgaatcaagtcgcgtaacacaacgtcgggacggacaactgccgattcccaataatcgtttccgcctgtcggcgtcaaccgtaagttgttgttataaacagtcttttcgttcacggcttttgcgtctgcgaatttagggttgacagctttcagctcctcaagtgtagttgccgaaccgacattaatccagtaatcggctttttgtatcaggccataggctgtttccagtccgattggggttgaactgttggaactgttttctttataaatgtactctgcgcctgcatcggcaatcagtcgtgccatataactttgggtggaaggcattacccaactgtcgttccacggagtgttgaacataacggtaggacgctggctgacggaatccgtgagggctttcagtgcgtaataacgttggggaatttcccggaatatttctattcccttttcccgtttgtctgtcagttcggaaaggacaatcatccattcggctttgccgagcggtgattcttccagatattcccccatatatagataaggtatggaaagttctttcagtttgtccgttacagcggtttgggcgtcacctatgccatagagcaagactacgtcgggctttaatccaatcagcagttcgtagttcatttcaggacccatatccttgattgaatctttgtgggcaaggatgtagggattggcgatataatcaatgcccgaaactccgacaatccggttgacttctcccagttcatcgagcatggcaacataggaagaagacatgcatacaatctgtttggctccggcagggatgacgggaccgttgaatccggcaggcgcttgctcgccgttgcgtgtaacaaaataagacattgttacgtcgttggcgccttgccacgggttggtaatctgtataagtgtactggcagcgttctcagcacccaggattttaaatcccgaagcgtattcaggggtatatacatcttggttgaatgcttccagagatgtcttattacgggtgatacagcttgccaaaaagagcaggcaaagtaacgtgatagtcggagcaggagatttcacttttataagatgtttaattagaaaaaaataatagtgggtcctttcgaacggcaaagataggacttaattattagtttgtttttattttagttggatttttctttcgatttgttcctatttgtgtatctttgtccccagaaattttggtgtcacttttccgattctacggaaagagtggtgaaaagggaatcaggtgtaaatcctgaacagacccgctgctgtaagctccgccaaaagttttcctacaatactcaaatccactgttccgctttggaggaatgggaagggcgttaggaaaatggagtaagtcagaagacctgccaaaattgaattcttgaaactttccgggattagagtttgaagagtgcagttttttattcaaaatacatctttgattggtgatgtgaagtttcaggaaggaggaatatgcctttttgagtgttccattatgcggggagaagcacgtgtatatgtttgagtgtatggaaaattgcattctcactgtaaccctatgaaagtttattattttaattaataaacaggaggattatgttcgggcagatttattttagggtattggggataggatgctttttgagtatggctttattgttgtcagcacaaagcaaactggacagtttgcatcatcttaatgaagtagtggttactgccagaattaataaggaggtaattccggtgcaatctttatcaggggataagttggagaaactggctgcacattcggtagcggacgctatacgttatttttccggagtacaaataaaagattatggtggaataggcgggctgaagaccgttaatatccgaagtatgggaacgaatcatgtgggagtgttttatgacggtattgaactgggtaatgcgcagaatggagtgattgatttgggacgtttctctttggataatatggaagctgtcactttatataatggtcagaaaagtgccattttccaaccggcgaaagattttggttctgcaggttctatttatctccagtcgagaacacccgtttttcgggaggatagggcttatcatgtgaaagcgacttttaagacgggttctttcggagttgtcaatccttctttgctttgggaacagaaactgagtgagaatgtgagtgcgtcacttagtactgaatatatgtatacaaccggaaagtataaatttacttatgcggtggatggaggatatgatactacggcagtacgccgtaatggggatgtcaatgcattacgtgctgagggcggcttatatggcaagataaaaagtggttactggcgtacgaaagcttatttttataattcagaacgtggatatcccggtgctgttgtgcggaatcgtttctcacatgaggatcgccaatgggatacaaatttctttttccaatcttctttcaaaaaagatttcggtgatgtgtacagtctgttgttgaatgccaaatacgcgtatgattatctgcattatctggcagatccccaaaaggaggaggctaccatgtatgtaaataatacatatcgccaacaggaagtttacttgtcaatggctaacagggttactctttttcctttttgggatataaatatttcagcggactaccaatggaataaactgaacgctaatttgactgattttccttatccccggagaaatacggcgttggtagcggcagctacctctttacattttgagcgttttaagttgcaggccagtgtcttgggaacttttgtaaatgagaacgtagcttcagatactacttcggccgggaataaaatggaatttactcctaccgttatcacttcctataaacctttcaagaatattgatttaagtctgcgtgctttttacaaacggatatttcgtatgccgactttgaacgatttgtattatacatttatagggaatataaagctgaaacctgagtatactaatcagtataacgtaggattcacttatcagaaattatcttccggaacctggctgcaagcactgaatgtgcaattggatgcgtattataatgaggtggaaaataaaataatagctactcccaccaataatttctttcgttggacaatgattaatatgggacttgttaaaataaaaggagtggatgtcgttttgcaaggactttggaagtttggtaacgattgggtatttgacagccggttatcatatacgtatcagaaggcacaggattttactgataagtcggataaagatacgtatggggggcaaatatcgtatattccctggcatagtggctcggctatattaaatgccggatataaatcatgggaattgaattatagctttatatatacgggagagcgctatgacgtttcggctaatactccggagaattatcgtcttccttggtatacaagtgatttttctttggcaaagaaattcagttggagaaagtatgatttcaagttgaccttggaagtaaacaatatttttaatcaacaatatgaggtggtgaggtcttatccgatgcccggaactaactttaaattcattttaaacttaacgatatgattgtgaataatattctttcgcgtgtcttgcttggtatattaacaggctgttgtttactggcttgtcggggcgagcttccggttctaccttctgacgagatagatgttggcaaggatcctttagggggcgtcagtattaaaggaatgtatcttctcaatgaaggaaatatgggaagtaataagtgtacgcttgatttttatgacagcactaccggtaagtatcatcgtaatatttatgccgagcggaatccgtccgtagtgaaagaactgggggatgttggaaatgatttgcagatttatggagataagctgtatgccgtaatcaattgctcgaattttatagaggtgatggatgtggaaacggcacaacatctggggcaaataaatgtgacaaattgccggtatatcacttttaatgatggaaaggcttatgtaagttcttatgcaggccctgtcggaatagatcccaatgcgcgtccgggaaaagtggttgaagtggatacgacaagtttggctgtaacccgtgaagtggtagtcggctatcaaccggaagaaatggtaataaaagatggaaaactttatgttgccaattccggcggttatcgtttcccggattatgaccggacggtatcggtgattgacttgaagacttttcaagttattaaaacaattgatgtagctataaatcttcaccgtatgaaactggatagatacggccgtatatatgtgagttcgagaggagattattatggaacgggatcggatgtttttattatagatactcagacagatcgtgtgacaggaaatttgggaattgctgccagtgaaatgtgtttgagtggagattcgatttacatgacaagtgtagaatggagttatgtgacggaaagtaatactattacttacgccctctatgacgtgaaacaaaataaaatagtatcccgcaattttattactgatggaactgaaacagaaataacaattccgtatgggatagctgtaaatcccgagaccaaagaaatatttgtaacggatgcaaaaagttatgttgtacccggttatctctactgtttcagtcctgaaggaaagaaaagatggaaagtcagggcgggggatataccggctcattttgcttttacaacgaaaacatttcaataactaataatgaataaaaatggacaggaaaattttaagactagcattagtcattgcagtttctttgtttgtaggaactgtattcacaggatgtaatgatggagaagatgcttcggagccttacctactgaaaaaggaagacatccgtgtgtcgcaaccggagggtggctttgcggttgttgttgatcaactgttgaaggtacgggttgaaagtgagtcggatgaagggatctcttatttatggttgctggacggcagtgaaattgcccggacaaaagatttggagtatatgtttgaggaggtaggagaatacgaactgattttacgtgcgtcacaaggtgagaatcattatgattatctttttgcggtcacagtaacttttgataatatcgaaccggctcctgaaggagcaacggcttatatcactaaagttcttgattttgttccggccgtgggacaatttactaatgcgttgccggcatatgacgaaggagacacacaagaggttatgaacgaaaaagtattggcagctatcggtaacaataaaaaggggatgatttctttaggaggattcggaggatatgtcgtagtaggttttgatcatacaataactaatgttaccggaaaacgcgatttccgggtacttggcaatgctttttattctgcggccaatccggactctgatgcaccggagggaggaagttgtgagccgggagtgatcatggtagcttatgataaaaatcagaatggtatgccggatgaggacgaatggtatgagattgccggtagtgctcatgaagacgctgcactggaattatggtatgacaaggctgtagctgcgggaaatgatgtggagacttatcgaaactatgaaatcacttattatcgtccggaaaaagaaccggaaacttcggaagaaagagagaaatatatccggtgggaagataaccgaggaaattcgggatataaagtgaaaaatacatttcataatcagtgttattttccggaatggataaaagaagataagataacatttaaagggacttgtttacctcaaaatgctgttgatgaaagtggacaaggtaattattttgttttgtataaattccgttatggttatgctgataatgaggtgaacactaaagatgagtctgctattgatatagattgggcagtaaattcaaaaggtcagaaggtacatttgccgggaattgatttcataaagatatataccggtgtcaatcaggaaaatggttggttaggtgaatgttccactgagatatcaggggttgaggatttgcatgttttaggagttgatatcgatacccgcaaataagttaagaaataattgataataagaatttgaaatgaaaaggtattttgtattggcagttgttgccttgggactggtttttacagcatgtgatgaggaggaaaatttgaactcatctgtatggatcgggagtgaatcggaaagtaatgtgattgcgcagttagatacattgtatctggatgcccggattgaaaatctgtctggggcgatgagatatttgtggacagtagacggaaaggaagtttcaaccgcttcaacatataagttttcacagcctaagactggagagtatgttataggactggcggtatcggatgataagggagaaaaccttcaaacgactatgacagccaaggtggaagggcggtttggcaaaggtgcctttattttgaatgaaggaaatatggggaatgaaaccggaactttaacttttgtggattcaaaaggcatagcggtagatagtgcatattatcgggtaaatcaaactttgcttggtaatgtctgtcaagacctgtttatcagtgataataagatgtatatactttctcaaaatggagccaaaaatggtggtgaagggctgctgactattgcgaatgctactagtttggagaaagaaaaggtttatgataatactactttgtcctggccgtccaatttggctgtagtcggagagaatctttatattcgtgataataatggagtttatatgctggatacttccaccgaagttctgacttttgttgaggggacgaagggcgctttgaaaaatcgtatggctgtggttggagacaaagcttttgtgatgggcaataagcaactttttgttattcaaaacggggctgttatacatactgtttcttttgaaagcgctttatccggtgttgctaaaacatatgatgggaatttgtgggtttcatgtacaaagcctgcgagtattataaaagtcagtccggttgattataagactattgattctcatactttgaatgtcagtattggtgccgggtggggagttgcccctgctttttctgctaaagatgatattatctatttcagtaatgccggctttaagctatatcggcatattttttctcagaatgagacggaagaagttgctgatataaaagagtatgtggaggatgcagggatctattataatagtttgggagttgatccggtgagcggggaggtttattttgccactctgaaaggatatgcagattataaaaccaatgatattgctatttttgatttcaataaaacaccggctttacagtttgatataaaaaataagaatagttttccggcaggagttttctttacggagaattttaagtgattatgagtttctaattgatagtttttgttgatagggagacttcttcctctataaaaaggatattcttctcaaagagtatatttttatatgtggaggaagtctttttgttagtttatattgtgaccttgtgtgattggaatgtaatttgttttaataaaatgaataaaatagtaagctttctaaagaaactccttaattttacattgtttactaagactcaaactaaaatatagacttatactgctattgacatgaaaatttgcagactgggcggattacttttactgttattttgtatgcatacaatagtgtatgcgcaacaggtgaggactgtcaggggaagggtacaaatgctggaaaccggaagtgaaaggaaacaatctttgccttctgccagtattgtcgtcttggaaaagatggactctgcttttgtaaaaggtacggcaagtgacaaaaacggtcgatttactctaacttatcagccacagaaaaagaaagaatatctgttgaaggtttcatttatgggaatgcagtctttctaccgtgcattgggagattccgtatctataaatgcgggcactatcgtactgaaggatgatgaccttcagattgatgaggtggtagtgaccggaaaattgagggaagtggttatggaaggagatacgactgttatcaatgcttctgcctacaaaactcccgaaggagcttatctggaagacttggtgaaacgtattcccggactggtgtataacaaaaaagaccattcattgacttacaacggtcagcctatcagcgaaattaatgtaaatggggagtctttcttttcaggagataaaaagaccgcgcttgagaatctgccggcaaacttgattagcaagttaaaggtgtacgacaagaaatcaaaagaggaagaatttacgggaatcagttcgggagaaaagaaatatgtgcttgacttgcaaaccaaggatgaactgaataagacttggctgacaaatgcgacggtagggtatggcaataataagaagaaggatctggaggcacaagtgaattatttccgtaagaatggggaaaacctgtcttttatagcccgttctactaatagatatcagaacagtacatacaaagataatatcaataattcgctgggattgaatatggcacataaatttggcggaaagttttctttgaatggccatgtgaattataatcttaacaggaacgggaatatatcttctatgtatcaggagcagtatttgactggtggcaaccaatattcggcctctgccaacgaaggaaactctaaagggcggtcggtcaattccagcttgatgggagagtggaaagtagataaaagcacgcgtgtcaacttcagtggaaatttcgggtatactcctaatcaaaatgaaagtaacagtcagagtgcttcttttgacgctcctcccggcgtaaaccatgagaacttgttcagtgattttgagtctgttccccgggatataaaggtgaaccgtagtgagaatcggtcacggtcggaaaatgaatcccaccgctaccattgggcaatgggagtgatgagacgcctgaacgaaaaaggaacaactctgggactgaatattcagaattccgattcgtggggaaataatgaaagtttctctctttccgagactacctattttcgcttgaaggataagaatgggaatgactcggtactttatcgtaaccagtatttgaagtcaccccagcgcaataattcctggtgggtgggactttcgtttactcaacctgtcggaaagaaggtacgtctgcgggtggcatataactggagtacccggtatgaacggagtaaccgcgatacttatgaattgtcttccttggcgagttcggatatttacggtgagttaccttccggttacgaggcggggtatgtagatagtttgagcaaccgtagccacagccgcagtaatgggcacgacctgaatgtaggagtcaactattcggatgacacatggatgtttaacgcatcactgggggttacgccgcaaaggcgtaccattgaccggaaagtagggaaactttatgcggatactgccatgaatatgattgatttccaacctatgatatggatgagctggcggaagaaagagatgcgtgtcagcctgaattataacggtaatacccggcagccttctttgtcggatttgatgccgttgacggataatagcaatccgctgtatatcacccgtggaaatcctgacttgaagcagatgtttagtcataatatacgtctgaattttcagaactcacctaaaggtatatctgcaaacctaggcggacaggtggagcaaaacagtgttacacaagtcatgatatatgacgtgcagaccggtggacgcgaaacgtatccggtcaatataaacggtaattggaatttgtccggaggggctagctggtggaaacgttttggacatttctctttaagattggatatgtccggtaatcatagtaaccgtgtaggtatgattaatgaagataaaagcttacagccggaaaagagtacaacccgtgataccggattgaattgtgaggcacaggcgtcttatcaaccttcttggggaggcattgacttatctacttcctggaattaccaatactcgcttaattctttgaacgataatgatacctatacgcgttattataatttcggtctgaatggttatgttgattttcctttcgggttgcagttgcgcacagatgctacgtataatcttcgtagcggaacgaatattcagaaaggggaagatgatgaaatattgtggaatgccggtgctacatggcgtttcctgaagaagaaggaagcggaattgtcggcttattgggcggatattctgggaaagaaaaaaagttatgggcgtatggctacttctgatggcttttatgagtatcgtacgcaggaaataaagggatatttcatcgtcacttttaaatataactttcgtttgatgatgtgagttttagaaaaaagtcgtatgtttgctacacaaccataaaattaagtttactatgaacggtaattatgtcattaatatcggtcgccaactaggtagcggcggaaaagaaataggagagaaactggctgctcgtctgggcattgacttttacgataaagaactgattaatctggcatctgaggagagcggattatgcaaagagttttttgagaaggcggacgagaaagcttcgcagggaattatcggcggattatttggtatgcgtttcccctttatcagtgagggagccatgccttgtaacaattgtttgagtaatgatgcactgttcaaggtacagagtgacgttatccgtcgtttggcggcagaaaaatcctgtgtgtttgtaggacgctgtgctgactatattttaagggaacatccccgttgtgccaatgtttttatctcggcttccaaagaagaccgtatcatacgtctttgccggattcataatgtgaatgaagaagtggcggaagagatgatagagaaagccgataaaagacgttcggaatattataattattatagttataagacatggggagcggcagctacttatcatctgtgtattgattcgtcttctttagggattgaagaaacagtacggtttgtagaagaatttgtggctaagaagttacaattaaggttttgattcggagaaactgactaggtagtaaataaaataaagccggctattccttttatggagttggccggctttatcatttatataaactaagcttgatttacatcattgccagtaatatcatttgtcccgttagaatgcggaggaacatagataatggataaacagtagagtaacctactgccggagcatctccggatgttgtctgattggcgtacgccaatgcgggagggtcggtattactaccggcaatcaatcccatgagggtaaagtagtttactttataatatagtctggcgatagcaccgataatgagtaacggaatgacggtaattaagaaaccacaacctacataaagtaatccatcaccctcgacaaccgtttgtacgaagttggcgccggcatctatacccacactggcaaggaatagcacaataccgatttcacgaagcatcaggttggcgctcatggtggtataagtcaccaggtggagtttatgaccgaagcgtccgataaggattgcaactaccagcggaccacctgccagaccaagtttcaatggtgtcggcataccggggaatgcgataggaagactacccaaaaggatacccaggaaaatacctacgaaaatagttacgatattcggagtatccaagcgcttcaattgattacctaagacacctgctacacgctctactgcatcctgctggcctactaccataacacggtcgcctacttgcagtatcaggttgggatcagcaaacaagtccataccggaacgattgacacgggttacattgacatcgtacatactacggaagtgcatagaacccagcgtctttccgttgatttccggtttggtgaccaggatacggcgggataccattgggagatcttgtttctcccagtctatatctacttccttaccgatgaatacggtaatggcgggtgcatcttcttcagagcagacgataaatagctggtcgcctacattgaaaatagtctcatggttcggaatgcttacgtgtccttcgtgacgaatgcgggagcaaacgaactgacgtcctagaaattctttaatctcaatcagtgtctttccactgatagactcgttgcgtacctcaaggctcaacatatgcggcttatggtgtgcatctccgctctgcattttcaggctttcttcttcttttgccatattgacacggaagatgtagcggatagcgatgatagaaccgataatacctactacgccgagcggataagcacaggcataacccaatgcgatctgcgggccgttgtagctcaactggttcagtgcttcgttggcagcaccaagtcccggagtgttcgttacagctccgtagagaatacctaccatcatcggcaattcaacacgaccgttccaaaggtaatagagccccaatgcaacagcaatatttaacactacgatgcctacagccaacaggttcaatgtcattcccccctttttgaaagaagagaagaaagacggccccacctgaagaccgatacagaatacgaacaaaatcaatccgaactcacggatgaaatgtaggatgtgtgtatcggccgtgaagccgaaatgtcccattaggatgccggcaaacaaaacaaatgtgacgcccaaagatacaccgaatatctttatcttaccgagatacacgccggctgccactacgaatgcgtagaggaacacgatgtgtgccacggaactggggtcccacaataaactttgtaaccaatccataatttagtagtttttataatgtcttttctaaaaacgggtgcaaaattagtcataacattggagctaatcaaataaaagaagaactaaaaattgcgggaaagaagaatttccatacagattctatacaaagtggaggtgtgcgaattttctataaaaagaagtttcgtttgaacttattaattatatttgcaagtcgaacaacagacatttggaaagagacagataaaaatagagacaatattaattcttgttttaattttagataaactatggcagacaaaaaagaaaaactcttctcagacttttctcctgtctccaccgaacaatggatggagaaggttacagccgacttgaaaggtgctgattttgagaagaagctcgtttggaaaacgaacgaaggattcaaagtgaaacctttctaccggatggaggacttggaagggttgaagacgacagacgcacttcccggagaattcccttatttaagaggaaccaagaaggacaacaatgaatggctggtacgtcaggaaatcaaagtggaatgtcctaaagaggccaatgcgaaagcactggatatcctgaataaaggtgtcgattcactttctttccatgtaaaggcaaaagaactcaatgcggaatatcttgagactctgttgaatgatattcaagctgagtgtgttgaactgaacttctctacttgtcagggacacgttgttgaactggctaatctgctggtagcttatttccggaagaaggattatgatgtgaagaagctgaaaggctctatcaactatgatttcttcaacaaaatgctgacccgcggcaaggaaaagggtgatatggtgcaaactgctaaagcactgattgaagctatccaaccgcttcctttctaccgcgtactgaatgtgaacgcattatcgctgaacaatgccggagcttatatttctcaggaattggggtatgcactggcttggggtaatgaatacatgagccaactgaccgatgccggtgttcctgctgctatagtggctaaaaaaatcaaattcaacttcggtatcagttccaactatttccttgaaattgctaaattccgtgcagcacgtctgttgtgggcgaatattgtagcttcttacaatccggaatgtttgcgcgactgtgataacaaaggtgctaacggtgaatgtcgttgcgcggcaaaaatggcggttcatgccgaaacttccactttcaatctgactttgtttgatgcacacgtgaacctgctccgtacacaaactgaagcgatgagcgctgcattaggtggtgtggattctatgacagtgactccgtttgacaagacatacgagactccggatgaattctccgaacgtctggcacgcaatcaacaactattgttgaaggaagaatctcatttcgataaagtaattgacccggctgccggctcttattatattgaaaacctgacaatttctattgcacagcaagcatggaacttgttcctgtctgtagaagaagccggtggtttctatgtagcattgaaggcggggactgttcaggctgctgtcaacgaaagtaataaagcccgtcataaagcggtggcccaacgtcgtgaagtattgctgggtactaaccaattcccgaacttcaatgaaaaggccggagataagcaaccggttgaagcaaaatgttgctgtggtggaaaagaccatacttgtgagaaagacgtggatacattggtattcgaccgtgctgccagcgagtttgaagcattgcgtctcgaaacggaagcatccggcaaacgtccgaaagcattcatgctgactatcggtaatctggctatgcgtcaggcacgtgcgcagtactcttgcaacttcctggcttgtgccggttatgaagtggttgataatctcggatttgaaacggtagaagctggagtagaagcagctatggctgccaaagctgatattgtcgtaatctgttcaagtgatgatgaatatgcggaatatgcaattcctgcattcaaggcattggacggccgcgctatgtttatcgttgccggtgctcctgcttgtatggacgaactgaaagcagcaggtatcgaaaacttcatccatgtccgtgtcaacgtactggataccttgaaagagtttaacgccaaactattgaagtaagatgagaaaagattttaaaaacttagatatatatgccgcatttcagcctgctaacggtgctgaatggcaaaaggctaacggtatctccgctgactggaaaacgccggaacacattgaagtgaagcctgtttatacaaaagaagacctcgaaggaatggaacacctcggctatgctgccggacttccgccctatctgcgtggtccgtattcagtaatgtacacgcttcgtccttggactatccgccagtatgccggattctccactgctgaagaatcaaatgctttctatcgccgtaacttggcttccggtcagaaaggtctgtcggtagcattcgacttggctactcatcgcggttatgaccccgaccacgaacgtgttgtgggcgacgtaggtaaggcaggtgtgtctatctgttccttagagaacatgaaagtcctgttcgatggcattcctttgaacaagatgtccgtgtctatgacaatgaacggtgcggtacttcctattatggcattctatatcaatgccggactggaacaaggtgccaaactggaagaaatggcaggtacaatccaaaacgatattctgaaagagtttatggtgcgtaacacctatatttatccgcctgcattctctatgaagattatttccgatatcttcgaatatacttcacagaagatgccgaaattcaattctatctctatctccggttaccacatgcaggaagcaggtgctacggcggatatcgagttggcttatacattggctgacggtttggaatatcttcgtgccggaactgccgcaggcatcgacattgatgcgtttgctccgcgtctgtctttcttctgggcaatcggtacaaaccactttatggaaattgccaagatgcgtgccgcacgtatgttgtgggcgaagattgtgaaacagttcaatccgaagaacccgaaatcactggcattgcgtactcactcacagacttccggttggtcactgaccgaacaagacccgttcaacaacgtgggacgtacttgtatcgaagctatggctgccgctttgggacatactcagtctctgcataccaatgcattggatgaggctatcgctcttccgacagatttctccgcacgtattgcacgtaatactcagatttatattcaggaagaaacttacatttgtaagaatgttgacccgtggggcggttcttattatgtagagtctttgacgaacgaattggctcataaggcttgggagcacattcaggaaatcgaaaaactgggtggtatggcgaaagctatcgaaaccggcattccgaagatgcgtatcgaagaagctgccgcacgtacacaggctcgtatcgacagtggtcagcagactattgtgggtgtgaacaagtaccgtctggataaagaagctccgattgatattcttgaaattgataatactgccgttcgtcttgaacagattgaaaacctgaaacgtttgaaagaaggacgcaaccaggctgaagtggacaaggcattggctgcaattaccgaatgtgtgaagaccggtaagggtaacttgctggaactggctgtggaagcggctcgtgttcgtgcgacattgggtgaaatctcatttgcttgcgaacagatagtaggacgttataaagcaataattagaactatatcaggcgtgtattcatcagaaagtaaaaacgacagcgacttcaagcgtgcttgtgaactggctgagaagtttgcgaagaaagaggggcgtcaacctcgtattatggttgccaaaatgggacaggacggtcacgaccgtggtgctaaagtggtagcaacaggttatgcggactgtggtttcgacgtggatatgggacctctgttccagactcctgcggaagcagctcgcgaagcggtagaaaacgatgttcatgtagtaggtgtttcttcactggctgccggacacaagacattggttccgcagattatcgaagagttgaagaaactgggacgtgaagacattgtagtgattgccggtggcgttatccctgcacaggattatgacttcttgtataaggcaggtgtggccgctattttcggtccgggtactccggtagcgaaagctgcctgtcaaattctggaaattcttatggatgaagaataattgtagttgatatatctagattagaacgttaacgaagtgattgtcttttataatagaggcaatcacttttttcttatgatagacttttttttatcttcatgcggtcagtgagaaataatcatgtaactttgtagactgatagtataaaaacaagaggagaaagaatgatagtttgcatagccgaaaagccatctgttgcacgcgatatagccgaggtactcggcgctcatacaaggaaagagggatatatagaagggaacggataccaggtgacctggacattcgggcatctctgtaccttgaaagaaccgcatgaatatacacccaattggaaatcgtggagcttgggtagcttgccgatgatccccccacgtttcggtatcaaactgattggacatgacccgggtattgagaaacagtttcatattatcgaacagttgatgcagaatgcagatgagattatcaattgcggtgatgccggtcaggaaggagaattgattcagcgctgggtgatgcaaaaggcgggtgcacgctgtccggtgaggcgtttgtggatttcttctttgacggaagaggctattcgtgaaggtttttccaagttaaaagatcagtctgatttccaatcgttgtatgaggcgggactttctcgtgcaataggtgactggctgctgggaatgaacgccacacgcttatatactattaaatatggtcaaaacaaacaggtgctttctatcggacgtgtgcagacacctactttggcattgattgtcaaccgtcagttggaaattgccaatttccaacccaagcaatattgggaactaaaaacaaactatcgagatactactttctccgcacttatccgcaaaagtgatgaagaaatagcggcagaagaagaaaaaaacggtggaaaaaagaaaatagacaatccgggtatcgatcctatcgccaatcgtgaagaaggtgaagccttggtacaacgtatcaaagaccttccttttgtggtaaccagtgttggtaagaaagacggaaaggaatatgctccgcgtttgtttgacttgacttcccttcaggtagagtgtaacaagaaattcgcctattctgccgatgaaacactgaaactgatccaatctctttatgagaagaaagttgctacatatccacgtgttgataccacttttctgagcgacgatatttatccgaaatgtcctggtattctgaaagggcttcgtgattacgaagtattgactgccccgttgaatggttctacgttgcctaaatcaaaaaaggtatttgataattcgaaagtgacggaccaccacgccattatccctaccggagtttatgctcaaaaccttactgatatggaacgtcgtgtctatgacttaatagcgcgccgttttatagcagtgttctatcctgattgtaagatttcgactactaccgtgatgggtgaagtggataaaatagaatttaaagtcaccggtaagcaaatcttagaaccaggctggcgtgtggtattcgctaaagatgtgaaagacactactgaagaaaaggacgatgacgatgaaaatgtccttcctgcctttgcaaaaggggagagtggtcctcacatccccgacttgaatgaaaaatggacgcagccgccaagaccttttacggaagcgaccttgctccgggctatggaaaccgccggaaaactagtcgataatgatgaacttcgcgatgccttgaaagagaatggtatcggtcgcccatctacccgtgccgctattattgaaacgctgttcaaacgaaattatatccgcaaggagagaaagaatctgatcgctacaccgacaggagtagaattggtgcagctaatccacgaagaacttttgaaatcagcggagttgacgggtatttgggaaaagaagttgcgtgagatagaaaagaaaacatacgatgctcgccaatttcttgaagaactgaaacaaatggtttcggaaattgtaatgagtgtactttctgataataccaatcgtcgtatcactattcaagatgcggtagctgccaagaccgaagagaaggcaaagaaggaacctaaaaaacgtgaacggaaagtaagtacgccgccgaaagagaaaaaaaagaattccgaagcaggagaatcaaaagagtcaaaaacagaagtatcaccgtctcctgttgctacccctatttcttctctgaataatactccggactcattagtaggacaatcctgtccggtttgtggtaagggaattatcataaaaggaaaaacagcctacgggtgttcggaatggaaaaatggatgtacataccgaaaaacatttgaatagttttagtcttataaggtttaagtaaaagacgagtttcagttgtagccaatactattactaaattatagtgtgttgttgtaaatttcatcataataagaaaaaaatgtcgcgataaggaaaaaagttctcactacagtgagaactttttttcataatagtggaagcatttagggaaaatgtaactaatttctgatatttgtaattattaagattaagacgttcgcgtaatgtatattgttggtattcaaaaagataacgcgattctatgaaactttgatcgagtacactgaatcaaatgctaaaaaatgcctaagttctacttgaacttaggt

SEQ ID NO: 2991 - DNA, 8357 bp, Unknown
  gut microbiota DNA sequence
ggatacacaatgctgataataactgacttacgcattcacctaccacctccccctacgggtactcctccttcccgaaggaggagaatggagataccaccgactataaactgtcaagtcattattttactaattcaccttataaccaaattttttctttgtttctctgtctctttcttttgtttcaagacaaaagaaagatagttgtaacacaaatgtaacaagtatgacatccccctgcaacctcaaactccgtcctttgcaggcggaaataacatacacacatttatggagacaatttatttatgcattatcattttcctcttcgtactagccatattcgacctgatcgtcggtgtgagtaacgatgcggttaacttcctcaattcggcggtaggtgccaaggcggcctccttcaagaccatcctgtttattgcaggcatcggcatattcatcggagcatcgctctctaacggcatgatggacattgcccggcacggcatctaccaacccgagcacttctactttgcagaaatcatgtgtatcctgcttgccgtcatgctcaccgacgttgtcctgctggacgtattcaattcaatgggaatgcctacctccaccaccgtatccctcgtcttcgagctgctgggaggaaccttcgccctctccctcatcaaagtccgtaacagcgacaccctcgggttgggcgacctgataaacaccgacaaagccctttccgtcatcatggcgatattcgtatccgtggcaatcgccttctttttcggtatgctcgtccaatggctggcccgtgtcatcttcacgttcaactacacgaaaaagatgaaatacagcattgcactgttcggaggcgtggccgccacctccataatctatttcatgctcatcaaaggactgaaagacagttccttcatgacccccgaaaacaagcaatggatacaggacaacacttggatgcttatcagtgtgttcttcgtattcttcaccatactaatgcagatccttcactggctgaaaatcaatgtcttcaaagtagtagtactcatgggtactttcgccctcgccctcgcctttgccggcaatgaccttgtgaacttcatcggcgttcccctcgcaggtttctcgtccttcatggatttcacggccaacggcaacggcaatccggacggatttctgatgacctcactgctcggccccgccaaaactccgtggtacttcctcatcggcgccggcgctatcatggtctacgccctttgcacctccaagaaggcacacgcggtaatcaaaacttccgtcgacctctcccgtcaggacgaaggcgaagaaaccttcggaagcaccccgatagcccgtacaatcgtccgtttcagcatgacacttgccaacggcatctcacgcatcaccccggacagcaccaagaaatggctggacacccgcttccgcaaagacgaagcgatcatcgccgacggaggtgctttcgacctcgtccgcgcctccgtgaaccttgtccttgccggcctgctcatcgcactgggaacttcgctgaaactcccgctgtccaccacttacgtcactttcatggtagccatgggtacttcgctcgccgaccgtgcctggggacgtgactcagccgtttaccgtatcacaggcgtactgagcgtcatcggcggttggtttatcactgccggagctgccttcacgatctgtttcttcgtcgccctcgtgctgcatttcggtggaaatatttcaatcattgccctcatcgctctggcagcattcatcctgatacgcagccaggtgatgtataagaaacgcaaagcaaaagaacaaggcaacgaaactctcaaacaactgatgcaaacatcggacagcgaagaagcgctgcaactgatgcgcaaacatacccgcgaagagctttgcaaagttctcgaatacgcagagacgaacttcgagttgaccgtcacctcgtttatccacgaaaacttgcggggactgcgccgtgccatgggttccacaaagttcgaaaaacaacttgtcaagcagatgaagcgcacgggaacggtagccatgtgccgcctcgacaataacaccgtgctcgaaaaagggctgtactactatcagggcaacgactttgccagcgaactagtgtatagcatttcccgcctttgcgaaccgtgtctggagcatatcgacaataacttcaatccgctggacgctatccaaaaaggagaattcagcgatgtgtccgaggacattacttacctgattcagcaatgccgcaagaaaatggagaataatgagtacaacgatatggaagaagaagtccgccgtgccaacgacctcaacggacagctttcgttgctgaaacgcaaggagttgcagcgcatccaaagtcaggcaggcagtatccgggtcagcatggtttatctgacaatggttcaggaggcacagaacgtggtgacttatacaatcaacctgatgaaagtaagccggaaattccaagtggaaacggaaatgccgtaaaagtcagacggaaatgttacagaagtctcagacagagatgttacgatgaaatatataaaaacacacaaaagagggtttattcaaagtgcagaattactaagtcatttttaggttggggaaccatagatgtacaatgagagataaacccaaaaacaggcagagggtgactaaacagtcggaagttttcagatactcttgacttttagtcaccctctttttttgtccgttccacctacccgctttcgcttggtgaaactacgtgcgggtggcacgttttcgttttacgtcatacttttctttcttttttcctgccggctgctagtccttctccgtctttccgtttctccggcgacggaagcgcagaagcgcttcgagaatatcaagcagtttttcaagaaatagtttcatctttttctttttttaaggttaataattcgtttagacagacgggtccggcgttacgccaccgccaccgggtgtgtttccgccgccgggtgtgtcatcgccgcccggattttccgtatcaccgtcggcaatcagaccggctgctacgtctttgacgtgtacaaattccactccggcagtcagtgcgcgggtcgtgtttccggcagaccgggtgtactctggcgtgaactgacagcgcagcgaaacgatttgcgagctgctgactttgctttcctgttccacgccttttccgcaggctttggcaaccatagtgaatgttcccaatccttcgagacgcactgtgcggctattgagcaactgttcgcgcatcacggacatcagattccgaatcacgttgtgcacgtcgcccgccgtcaacgaagccttttcggcaatcaattccgccattttctgcgtgttgaccgttctcccgattttcaccaggcggggataaaagagtttctgtccttctttgttggcaagcgttgcctggtaaggtttgtaaattaatggcatactactgttttcctttctttttaatgattaatggatcaattgtctctgtaaccgattacgccgacaaaagtaaacgggccaaagaaagtcgggagacacgatgtgacaagtcgtgacggaagagagcaagttcaaaccgtttcgcacaaatgctgcctgtaagcacttctgtccaaagaagtaccagacaacaaaaaatcacgtacctttataaccgaaacgaacaatccaataaaaaagcagtaacaatgaaaacaactaccacagaaacttcaattccggaagagaaaacaacctccgcccgcatacaagcatacagtaaaagtcaactggccgccctctacctgccccacatccagcctgcctctgcccgccggacgctccgcagctggattgccaaaaacacggaactgcaagcggcactcgcccgttcgggatataccggaaaagcaatcctgttgactcctgcacaagtcgggctgttctttcgatttttgggagagccttagaaagctctccggtaccggacgaacccacatcgagattgatatactcatattcgggacacataaggcaacgtgaaccagaaagtgctgccctcggcaagcgtcctgcgcagccatatcacgtaccatttttaaccaaaaacaatattcccaacccggatagaacggctgttcatctccgggtcgggaatatcttcatttcacaatgtacggatttgcgaacgagtaaaccggcatcaacaagcgttttcccggcagaagattataccaagttctcacagtacttatcttatttgaactcatcatcaatatttctgcgttcattgtcgcccacgggttccttctctccctttttaaataccgtcacatcctttttgaacttaatttcgataaaaaactttctattcccttcgagatagaaatgtacctttgcggcgtttccgaccagataaagcagcatcgttcccaagaggacgaccaaatggttggcgttgacacactcattggaaagacacttgaccagtttgaaaatcgacgaccagctagccgccgttttctgcgttctgaacgagaatatacgtctgaccgttgatatggaggtgtctgtttgtttggcaaaataaacctctttgtaattgttctcataagaacaaattttcacctcgtcgattacttttcctttttcctgccagtcttcttcgtcgaaatcactagatcttctccgattcctctcatgcttgtttgtacccgtttccactttacttttagctgcgttttcaactacattttcaacacttgttttagctccattgtccacagtatcaactgtttcactagataattgttttgtcatcataattaatatttcgtaaataatgccgacaaatatcggatattatttttaacattatgcgtcacgcgtgacactttcttactttatctcctaaaataactcaaacatgaaccctttatgtgttacccttcctctacctttaccgacgaaatcaatgaaaaataattgaatataatgaccgaaattaaaaaaaatcattccctccggcggatacgactcatgaagcgggccgccgttattcgtcaaaacaatggcatggacaaacgcgaggcacttgtcgttgcgcatcagatagacgttttaattcgcaaaatgtacttagctagcgtcagtttttattataccaagcaggacggaagcatccgtcacgccgtaggaacgctcaccggatacgaacattgtttccaccgcccgtatacgccacggccggaaaacacgttcgtcgtctactacgacctcgaagccaaaggctggcggacattccacgccgaaaatttcctccgtgccgaatgaggacgcccgaagaacgcaaagagtgggaaaggctctgccgacaatacaacgtagattcgctctacgaggcgatcgaaggctgccgggaggaactggaattcctcgtccactgcgccgaacgcctcgaaccgctgccggacgatgacacgccggcactccgcccccgccacgcaacgattgcagaccacgccgtttaacacatacagtccacgccgtttctgtgtgcacgaaacgccgttttatgaagacaggaaacgccgtttctctttccgcatccggcggaggaggactatttttaacaaagcataattttattaacattataaacaacatcaagtatggaaaactggagatttatcaaagaaaacaatgattatatggtgtcggaccacgggcggatcatgagcctgaagaaacctcaaaaaaagatattgagcagcagtctcctccacaatggttatgaggctatatacatctatcagaaagggattcatgccgcgcgctatgtgcaccgactggtagcggaaacgtttatccccaacccgaaaaaactcccgcaagtgaaccacctcgacggaaatacgctcaacaatcatgtgtccaacctcgaatggtgcgacgcctacgacaacttgatgcacgctatccgcaccgggcttcgtcccgttaacgtgccgcgctccattccctgcgccgtgacggacgaaagcgggacgatcctccacccgtacccttccatgaagtcaatggtgaaagaggaaaaactgaacagcgcgcaatacagctggttgcaactgaaactcacgcatcccgaacgggtacggctgcatacgatgcggcggtggcacctgccttatctgcccattcctcccgactgcacccccgtccgccactccgtcacccggcaatattaccggctcctgtccgccgaagaggccgccgcgctgggattcagctaccggagcgtccgaagggagaaaggcattcacttaattatcagcaatttaaaataaacaaaagaaaggagattttcaagatgaaagacgctattatcattcactgttccgccacccgtgcggaacaggacatcaccgccgccgacatcgaaagctggcatcgtgcccgcggattctggacgatcggttaccactatgtcatccgcctcgacggaacaatcgaacccggaagagacgtcaccctcgacggcgcacattgcatggggtggaacaaacgggcaatcggcatctgctatgtcggcggactggacaaggacggtcgccccgccgatacacgcaccgacgcgcaacgcaccgcactcatccgactggtgaaggcgctacggcttgtcttccccggtgtgaagcaggtgctcggacaccgtgacaccagccccgacctcaacggcgacggcgttatctcgcccaacgagtacatgaaagcctgtccgtgcttcgatgttcagaaagagggattctgagctgagtcgtacacatcggtgtcctctgcgatgaaattcagggtgccgcacccacgaaacccgaactaatcattaatttttaattcaatccaaatggcccgtatttccaaatccggtttagattattttccactcgacgtcaatttcctgcaagacagaaaggtgcgacgtatctccagccgtcaccacgcagcagggattgccgcgctcacttcactgttctgcctcatctacaaagaaaaagggtattatgtcccgtggaatcaggacacattgttcgacgttgcacaggaagcctgttgcgaggaggcggaaatgcaggccattatcgacgactgtctggcggtgggattattcgaccctcatatatataaggtgtatagcgtactcacttcacaagttattcaggaacaatatcacaaaattatcaccgacagccggagaaaatacaaattaccgttggaacatttctggctaatcacggacggagaaacggagcaacaaaaggacgaatacggaaaggaaaacagcatagcaaaaagtgaaaacgaaaatagaaacggaaaccgagcgggaaccggaaacggaactgtcagtgatgcagcagtaaatgatatctatgctacaaaaacaggaattaatgcagtaaaatctcccgaaattgctacaacaatcccacaaacaaaagaggaaacagacaccaaaggtaaacaggaaacggagaaggaaagagataggggaactgaaaccaaagcggaaagagatagagagaaagagatagaaaaagacaaagagacagagaataggcggaaagccggaaaagagacagagaatgaaatgccgcccgtgccgtcaaacggcgtttttcaggctccgcctgtcgttgtaagtggtttgtcttttggaaatttcggaaattcttctgaaataaaagaatgttattctgaagaaaagggaacttatcctgaagtaatagagaatccttccggagaaaaagggaatccccaaagagataacggaagaaacagcattcccccccaaggagtaaccgccggaggcagctccgaaactctcctgcacatgaaccttcaaacaatcggcatccggaaagaacagaccgtgaacgcaatcaccgccctcgcccgacgcaaagaactgggcggaccgggaggcactttatggaagattctcagcaacgaataccgccccaccctgctcaaaaaaaacgaaccgggagattacatcctctgggcccttaatcatccgacggaatttgagaacacctacaacgggacattgaagaaactggtgagaggaaggtgacgcgggtgcaaccgcaatcacctcaacgttccgaagcccctgtgctatgaaaaaaatcggttcttcttcaaatttggtggttatttagccagtcggtggtatctccattcccctccttcgaggttgtgtaaaaagtaagaatcaagtgttctttgacatattgtataaaaaggattttatatctttgctc

SEQ ID NO: 2992 - DNA, 16371 bp, Unknown
  gut microbiota DNA sequence
ctaaaactcttgaagccatagcagaggtatttgatgtttctcccggtattttcttcgataatcctttggaaagtaatacggaaaattgttttaataaagaggcggaaatcgcttatttaaagaagattctcgaagagaaggaacgtctaatacaagtcttattaagtaagaaataacctgtaatagataagaaatgtaggcatattgtaggctatataattatacaaataattaataatcaagcgattaaagaacgttacttgaatcacaaataaaatccgataacttgaaaagagttatcggatttattttttaattactttcgcttttatagacaacttccttttgcagcgcagaagataaacgattgaacatgtaggtcagaataagagaagttctttaaaacttctctttacgttcaaacttcccttcctcggtataatatttccaagtacccttaggttggttatgcgaatatttaccacgaagtcttaattttccattttcgtaatattcacgataacgtccgtgacgttttccctcttttacttccgcttcactctttagtgctccttccggataaaattcacgtagaacatttccttcaaacttttcgacatagaaacgtttcaattcacttaactgttctttctcggtcacaacatcttcattcatttcttcatcctcctcatcggtagcaacctcaacaagttcttccggttcgtatggactataatccataacatattgtaaagaagcagactggctatctcctatcacttgcatagtccaataagggaaagaatacaaaacatccttatttgactgtatctcattccatgtggcaggattcatcattagcttcaactgggaatagaacttacgtacatccgtatataagaaaatcgtagaactggatttcagatatgaaaaagcatctttaaatcccggattgtctttcaacaagttcttttgttcataatcctctacgaatgagagtaaagatgcagctttattactaaaaacaacataatcatccacataagtataatagggtttctcgaacttatcaaatagttttccgaaaaacagtcggaagaaccctttcatctcgacataattaatttcaaagtccttataattaacagttttaattttaaccggagtacgacgtttgaccttcttttctataagttccatgttctcacgtgcatcctttatactttttgctctgatagccaaaaccagttcgggttcacgcccaagtaaccccggttcagattgtgtaatagcaaactctccagacatccagctcaaaaagttttcttccaaagagataccgaacagtccttcaatcttttttcgggaattttgatacgaatcatacaactgtttatcatgaacagagagggcattttctaattccttcacaaaagtcatcggattattaaaaccaatattcgtataaagggccgttcgtccggacaagatttcatgcgctttcattttatgctttccggaattcagcaaggcagtgatataaggatctactgaatctttcttcaacgtataacctttcacctccattttatccttgcccatattcaagtaaagaccggcaaaattcatagaattactgaacatatcaatatattcattccttgttcccaggtagatagacataaactgtgggatacgctcatagttgataaaaaccctgacgagtcccttaccggaaactagtttctcggtttcaataaaagcttgatcaagtccgattttaggtttgttacgtgaatcaatagccgattcgataagtccggaagtataagaacctaccagatgattatccacaaaagcaatataaaagatatcacgcgtatccggatcacgcatctcaagaatgttaatgccactatgcatccggttagtaacagtgaagccgctcattacaagaaccgtctcaagctgatctttcaccaagtccattttagaagctttctgcatatccagaatgagcagaaaatcccaatcagtcgcgcgggttttatgaagtgaaataagcatatcccgtttgccgacaagtgacaacagcaccttgttacttttcacaactgaatcaagtttttccacactcttcgtaacttcctcaaaagacttcgcttttttcagacattgccatgtttcgcttccgctaaatttctcccaatcttcaatcggagctgatgattgaataataaatgccgcattttccggaaccagataaatctgctgaatattacgatcgggtgagataaacagataaaccacggagtatactacatataccgccaaagccaaccctatcaccaccaaggtacgttttacgatttgcttactactcttttttgtcgtgggctcggcatattgctcttgttccctgttgtttaattcattcatggttgatttattaatataaattatagtcccattggtatcctcagtaaataccaaataataaagaatagcgtccatgcagctaaaatacctacagagtagcgccaagtgtatttgagtaatgtcccataagtaacttgtttatcatattgtctcatatatgtcaataccagaggcatataaaacataaaaggcgtaatagcatttgtcgagctgtcaccaatacggaaagcgcactgtgcgatatccggagagattcccatttgtgcaaacatcgggataaagataaaagacataaatgcccacttggaagtagcagataccataatcagattgataaacgctgtaaacaggataaagagaacaagtgcagacaacggagccggctcgaaagaagaaagcagatcagctcccataatagcaagacacttatccaaatgagaatactcgaagcaggcgaacatttgagcggcaaaaaaagcaataacaaagtaaacacccaaaagtttcatcggttgggtaagcccttcaatcacatcattgtcggaacgataacgaccggaactgaacccgtaagccattcccgtgatgcccgcccctaaggaaagaagaaaaagaattccggcaataaaaggcgaatgcatcaaaccaccgttcacgccacgtaatatcccatgagaagaaaacgtaagccataagataagagctacataaattcctgctacaataatcgaaatcattatcgcccgccgttctttacgagacaagggccgataagcttccactttcacgcttccttcatattttcctaaagcgggaagaagccatttctgagtcagccagtaaacaatagcagtaattactacggtagaagcactcatgaaaaaataattgcaaagtggttcggtatttccctgatatcctgtctgagctagtgcagcttcctgagtggtatgagccagcaacggatccattgtgcttaatacaatatttgcactatatccgcatgccactgaaacataagccgtaataattcctgcaagcggatgaagtcctacccattggaacagcatggcggcaataggcaataagataatatatccgccatcgccaataacgttggacaacaagccaagaacgattacccacaagataaccttccttttctccttccggttccccactcccaaacggatgcatgcaccaataaatcctgaatgctgggcaacccccagtccgaacatagcaataatcaccatacccaacggtgcaaatccggtaaagttcttgatagcattccgcaaccaccagcgaattccttccggactcaataagctctgtacgcgaatctcctcaccggtttgtggcagtgtcaccttcaatccataaatatcacatatccatgaaagaaagaccactgctattgtcagcagaaggaacatcgtagcggggtgaggcatacgccatttattcttcatctgtctcaagatttattcttcgtcagcctccagattatccaagtcaataatacgtaattctaatgcacgcactgctagacgggtagcatttactcccacccgttccccattagggaaaaggcgtcctataagatcattctgtcgtttttccaatgacttcactccgaaaggcattcccttcagactggcaatcatttctttcgtatatcctaaagccagatgacgtaagaaacgctcatcatactcatcaatatcataactaatcaccgcctcctgacgcttggcatcgttagctaccgattttttgaaacgatctacaatcttttccaaaatcggatagttgaaaactaacttctttccgtccattacagcctgcacatctgttttggtgagcagttcccctgttttcaggataattccgtcagcaccggcattgagcacatccacccataacttttcattcagaatttcacccgtaaatatcaaaacccgaactcctttgtaacgtttgaatatattccggcatatatcaacaccgatagtggttgaacctcccaatcctaaatccagcaacaccaaatcgggaagttgtgcctccattaacggccagaactcattttccgtcatagctgtaccaataacctctgcattgggtatctcatggcgaaaaatctcctctgtacctttcaactccagttttacatcttctacaataataactttaaatttctgttcttccatttccttatctaataactttatatgtgttctttttcattatctgcgtggaatagtaaaataaaccgtaaaccctccgccttcggccggttcggcattaatacggcatcctctacgccctgcaaattcatcatgatcgcggattatctgcttacatacgagatattccgtccccctcaattctcccttttctccggacgtcatacgtgccagattcggataaaatagttgattcaactccaacacgctcttttcacgtcttgtatccgtgaaaagaaaacgtatatactcatcatccttacgagcctgcaaacgcaatactccgtcttcgtgaaccgtcaatgcttcatcaatcaggttctccaataagaaacgcaactggtttacatctcctattactcttgcatctatcggagccatctccaactctatcttatccatacggttctttacagactttttgaaatattttccggcagtttcgaaaagctcttgaaccggaatcgtggtccgccggaaagtaacctcttccaactggcgggaagcacatgaactcaaaatagtaaagatccccttataatattcaatcaactccgtcatagtctccactgcctccttttcttctttctccgaaaggttctgcgcattcagccgacctataatttgtttaatcttattcggataataaatcgtttcatgcttgatagtcgaaagacaattatcaagtaccatattctgtacatgtaacatactgtcctcccaagacgcccgttgcgtttcctcatgcgccgactcaatatcacgatatttcgttgccagtttcaccacagcgttaaatacgacaatagctacataacgtgccaccagttcgaaaagcaaacggtcagtttcctgttccgtcccttctcttcgttccaaataaagcacaccgacacattggtgttcacctcccgcttctaccatgagaggtattgcctgacgatgttgctcggaaatatattctcttgaatcaaaacatagctgcaccatttccggcatttcctgtccgggactcgaagcatattccaacaaatgtgtcgtttcattataaacggcaatccccatccggtcaatcgtcaacaactcatttaccgagccgaatgcttcatctacgatacgttgcggaatctctttgagcgtactttcttccctttggagcgcttctgcattttcctgctcctgcggtcgaatcagggaagcagcaaatactttctgattaatttcaagtacctgttccaaactcaaacgattttgtatccgcttcctcaaatacaaaagataatatcctaccaaagaaacaatcaacaaaacgaaacaaaggataattcccactgtcttattaatattcgaacgttccagttgccgacaatatccttccaatgtctgatcttctccctgcaacttatacaaatctgtaaacgccgaattattataactatacgcatccaattgtttcaatgccagaaaagcaaccgccgcctcatttcttatatccaatatcacatgataatccgaatcaaaaagttcgttccaccacagaatctcagcaggtataccttcaccgacgagcttcatataccgatgcgtagcatccgggcgcgcatatttctgataatgctcattcagcaacaatatggcagaatcagcatattgcaaagcaatctcatactgctcatccacattagcgaaataagcagcattggcataatctgatgcagcatccaacaaatcttcataagcagaatccgtaataaccacaatcgaatcggtatcctgtaacatcggaggaatcggatcatacagacaagaccccataccaaacggaagtaagaggcaaagtagcactccaattactttgcgcactcccgaaggcaaacggaaataaaagcgactcccttttccaagttcgctttccacgttgaatacacatactcggaacagttcattcgttttcttatatttctcgatgattcccttacaattcatcaatccgaagccactacccttattttccttcaattcatctgcatccgtggcattcttcataccgataacacgtgaatcatacactttctcaccaataatctgtgccacatcttcggctgagatcccccttccattatcttctacagaaatctccacataagaatccgtagtacgtgcatacaccttgattacacctccctcaggagtatatttgcgggcattctcggccaacgtatttatcataaatagggtcagtgcacggtccgccttcaccatagcatgggtcggttcaatttctaacgtctgttctttcatctcaaaggcacgacgtccctttcccaataaatcgaacaactcattaagaccgaatgtttcaatattcaggctaagagttccctgcttcatcttgatccaaagagcaagaatgtcattatactcattgatagtagtcaccagttcgtcaatatactgatacttctctttcttaatcttctcatcgtcaatataacctttctctgtcaacttatgtacctcgttcaaaatccggtcaatatatggattgatgccatttacaatcgccagacaagccttctttatcagattctggcgtttattcccggcaatatgctgctcgtacacataccgttgtttttccaattgaatccgttcgtcgctcaatgcctctaccatttgttcattatcagcagcccaaataatatatggctcaagcacatgcaccagcgctttctcgtctttgcttaatcggtgcacaggaacaagtgccgctttcccctcttcgggtatttccaatgtcatccgtcctttgccgaataattggtcaattccttgctgaattaaaggaacattcatcggaatagaagaagttatatccctacataacgataaaatctgttgtagtcgttccacatccacctgatttcgcgttttggaactcttattgaagaaccaccagagaataactaccagcaccaacccaacaatgaccacagatagtacgagagtcatttgccgcgaacctgcttccaatgaaatatagcggctctccaattccttatcctgccgtgtaaagttcagaatatccagataaatattccggttatagtccgatgcgtgcttcattcccaatcctgcatacgaaacgctcaactgctcgcgaatccttgaaatccattcgggaacagttttaaccttctcttccgtaatccacggtactccggtgtaggtcgtatccccttcggcataaggccacaatttgtccagtgtatctgccttataatgataataaagcagatgatgttgattcacacaatccagtgcttttgtcaatgtatcgagtgcttccgaataacgaccatgcgcattcagatacttaccgatagacacatacgccccggcaatctgatataaatcatcatattcctgaaatttctcaagtgccaactgtgccatacgcaaaggcataagtgaatccaccggaaaatcgaattggtcgagtgcatgcgtcctccttacccgataaaactcgaaattggcaggagaaaccatcagattagccaacccttgcaaaccattcccttcgaaataagggttcttactttgaacggctatccgccatgtatagtaaagctggtcgaactcacgaagctttctttcttccggattatttgcttccaccaatgaagccgagcccttgatataatgataataaagcaactgattggtatctgtcaatgcttcatcctccggaatctggttgagggcgtcaatcgcttcctgccgctgctgaagataatagtagtagatagacgaaacgataaaaaactcggtaaacgcatagtccagccgaagtgtttcgtgccggtcggcaaagaggtcgctttcttcgcggatacgtttcatgcggcgaagcgcactgttccggtaatcataatattctttgttcattgccgtccgttggcagattttcatcagcccgatatcagcaatcaggagttcgagttcattctttgtcagcttatagacttccttatgtaatgcttccgcacggtcaaagtccatattcatatacgcacaaaaaccaagattattagaagcttcggcttttcccgatttgtaaaaatttacctgtcgataggccgcatcagcatatttgtaggaagaatcaagacttcggtaacgataagcatacgccttcccgttcagcgaatcaatcaaccgtacctcttttgtcggcaccatatccgtacacgaaaaaaaagaggcaaacaacactatacctattatatatagaggaaagcgtgaactcattttagtgattttctgttttcagaaagcaaatctacaaatatttccgataagattggagagaaaaatattttttatacaataagtccttctaaataataagagaaattcctacctttgcaggcaaattaacaaataggtaacatctattacaaaatgagcgaaaaagcaccctttatggtattctcgggaacgaactcgagatatcttgcagaaaaaatctgcgcaagcctggattgtcctctgggaaatatgaacattacccattttgccgatggtgaatttgcggtttcatatgaggaatcaattcgtggcgcacatgtattcctggttcaatccacattcccaaactcagacaacttaatggaacttctcctgatgattgacgctgccaaacgtgcatctgcaaagagcgttgtagcagttgtcccttactttggttgggcacgtcaggatagaaaagacaaacctcgtgtatctatcggagctaagttggtagccgatctactgtcagtagcaggtatcgaccgactaatcacaatggatttgcacgcagatcaaattcagggattcttcaatatcccggtagaccatctgtatgcatcagccgtattcctcccctacatccagtcgttgaaactggaagaactggtgattgctacaccggatgtaggaggttcaaaacgtgctagtactttctccaaatacctcggtgtgccattggtactctgtaacaaatcacgtgaaaaagcaaatgaagtagcttctatgcaaatcattggtgacgtgaaaaacaaaaatgttgttttgatcgatgatatcgttgacacagcaggaacgatcactaaagcagccaacattatgttggaagccggtgccaagtccgtacgtgctattgccagccactgtgtaatgtccgaccctgcttcattccgtgtacaagagtccggcttgacagaaatggtatttactgacagtatcccttacgcaaagaaatgtgcgaaagtaaaacagttgagtattgccgatatgtttgctgaaactatcaaacgagtaatgaataacgaatctatcagttcacaatatattatttaataaaagagtcgactgaaaaataataaaatggataatgactgtcatggtcattatccatttttattttacccttcagggataatatacacaaaaaaataggccacgcaatgcgcagcctactatcatttatccacaattctctattgtaatcttccgaacttatatgttccttttttaataacttttccatccttatcagtttctacaaaaggaccattcttttttccctgtttgaaaaaaccttcaaagcggttaccatccttgtcggtctgcacaccttgtccttcttccagaccgtctacaaaaccacctttatactgcattccggcaacagtttttaaagttccctgaccgttcgggcggttatctttccagtcgccctcatatacgtctccgttactccatttataagtacccttaccttcacgtttattatttttccactcaccttcatacacagcaccgtttgcccaggtaaaagtgcctcttccgtcctgcataccatctttaaagtttcctacatatttatcaccattagcatgataataaacccctgcaccggtacgctcacctaagagataagaaccctcatagcggtctcctgtatggaaaaagtaagtcccctttccgtgttggatatcatctgcccagtcgccttcatatttatcgccgttggtatattcaaaagtaccttttccatgacggacatcatctttccaatcaccgtcatatttacagccgtcgtcccagttcatggttcctttgccgtttttcttgtcatttttccaatgcccggaatatttcgcaccgttcgcccaggtatatgtaccttcgccctcacgtttatcatttacccaatgtcctacgtataaatcaccgttatgataatacattgttccttcaccatgctgataatcctgataccacataccgtcgtaacggttattattcataaagtaataaatacctttaccatgctgttggtcctgaaaccattgaccttcgtatttttctccatcagggaacatataaattccgaatccttcacgttttccttttatatactccccttcgtagacatcaccgttcttaaagactgtctttcctttgccattcggcttgcgtcccttcatctctcccgtatagacgctgccatccttaaaagtataatttccaatctttatttcagtggagaatgtatcttttatttttccgaaaaatccgcttttttttccttcgttatcttgtgccattgctcctccttgagcaaggagagccagtaaaagtgtagtatatagatatttcctcattggttttagtagttactcattaaaattacaatttggacaaagatacgatttctctcccaaaaagccccctaccggaaagtaatttatgatatctttttacctgctatgacctcttttaatttctctttgcacaaataacgctgcgccaaatcctgtaattcggcaggtgtaacctcctgtacagcttgcaaagaacgtgaaaaatagtcgtctcccaagccggaagtagctataaaaatccatgcatccgacagtgaaaaagccgattcgtagctcctgcacatttcgccaagcatataattgcgcaccatagacagttcctctacgggcacaacctcctgatgtaaacgatcgatctcatgatacacttcctgaatcaacggttctacgtattcattatccgtttccgtcgaaacaatcagtaaaccactatccggatagaacataattcctgccgaaataccataagtatatcctttctcttcccggatattagacatcaggcgactaccgaagtaacctcctaatacagtcatcaatacccgtaacttcagataatcgggatgctcacgggtgatagtagtatatcccatttttacggcactttgcatcgcatcttcccgttccgtaaaaatccgtttctctggcacggcaatataagggaaatttaatttcgatgtctgcaactgatattgcccgaatggagagccgaacgtatccttcacccgtcgaataatatcttccgtcaccttgccggaaagaaaaatagagcaattgcccgaatgataataccgttcataaaaattacgaagaacttcgggagtgatagcatgataatcctcctccacgacaatcttcccacatggatgttgttctccgtaaagagactgtaacaaactacgatgtgccagaaaatccaccttggaggtattgaccagatattgttggatattagtatccaaaatcgtatgcaactccttttccggaaacaacggctctttaatcatcgactccaccacttccaacgtttccgccacatatttattcaatgaataaacagtaatgtaagcatagtccgaagaactggataattccagccatgaaccataatagtccagttttccggcaattgtggcagccgtatatttctttgtgccttcacgcagcatccggttagtaaacaatgcctgcaatttctgcgactgttgccagcgtcccccaccgaaaagtatatccatgcgtaccacatcctgctcaccgacattgattacagtcaacggaataccattaggtaacgtagtccggacaggaggaagaatacgaaaatctttcagggtttgtatttcgggttgtatcttacgattcatattatgacctactcttcaaaaattcttctgcacgttctaaatcctgcggtgtatcaataccaatagtttccacttcgctaatacctactttaattttatatccgttttccaaccagcgaagttgttccagagactcagccagttccaaagaagattgcggcaaggcagttatttccttcaatacgtccgtgcggtaagcgtacagaccaatatgcttatagtaagtatgccctttcagccagtcctgcttttcagtattacgctgataaggaataatggaacggctgaagtacagtgcattccaattcttgttaaccaccactttcggagagttcacattttccaaaacggcaaacggttcatcggcagtgaaaggttttaccaatgtggcaatctgtgtagtcgggtcttcaaaacaagcttttacagcattaagttgtgaaggttggataaaaggctcatcaccttgtatattgacaacaacatcaaaatcacctccgatcttagtacaagcttcgtaacaacggtccgtaccacttttatgatcaacagacgtcattaccactttccctccaaatgctttcactacagcttcgatccgctcatcgtccgtagcaacataggcatcgtcaagtacccctgctacctgttcatacacacgttgtatcactgtttttccgcccaagatagccaatggtttcgcagggaaacgagtggatgcataacgggcaggtataattcccagaaatttcatatctgattttattttaattcttctaatcctttcacgatgtactcccttttcagatcctccggcttcaacacccgatcgtcaaaagagagtaaatcaatatccagacaaactttttcttctttcttatcttccggacgacgaccggcacatttctcgatagctttcaattccttcttcactttttcttcttccgcttcggagaaaaacagtgccacttgattggagaacaacgccggactccggaaaaacaaaggttgtgtttcccgttcggtcgtgaaacgaatggaaggaaacaaatccgctagtctctttcgtgctaaaagcagattctccttccggttgtagttacttccaatgcaaataatacacttgtgcataagaagctgattcttaattaaacagatcgtccaatccggtttcttcaaagacttcaccgtccgacgcttccgaaccggcacaaggatcaaatccctcagggagtttgaacttctcctgctgatcatatcctaaagtcgggtcatcatatacttttttcatatatttcgcccagataggcaatgcagcagcagcgccctgtccataagtcatcgaaccgaagtggatatcacgttcatcacctcctacccaacagccggacaccaatgaaggcgtgaagcccataaaccagctatccgagttatcgtttgtcgtacctgtcttaccacccatatcagccgtgataccatagcggcgcacccgtgctcccgttccttcgttgataaccgcacgaagcatcacgagcattttatatacactggaaacactaatcacctcctccatttgtggagcaaatgtagaaatcacattaccctcattatcttcgatgcgggtaacgaataaaggagccaccctgatacctttgttggcaaaggctgtatatgcacttaccatttcaccgacggaaatctcacaaggacccagacagagtgaaaccaccggatcaatggccttattgcgtactccgaaactatgaatcaaccgaaccagttcatacggattcaatttccccatcaaataagccgaaatccaattgtccgaattggccaatccccatttcaaagttaccatttcaccataacgttttttattagcgttacgcggcgaccacggttctcctgtttccgtaatcaatgtctgctctacatgacgtacctgatcacaaggagaaaaattattttccatggcaagcgtatacaaatatggtttgatagtagaaccgacctgacggcgacctaccattgccatatcatattggaaatatacataattcggtccgcccacataagccttcacgtgcccgttcaacggatccattgacataaatccggttcgcaggaaagacttataataacggattgaatccatgggtgtcataatcgtatccttagctcccgtccaagaaaacacagtcatttcttgcggtgtatcaaaagcctttctgatttcctgctcagacgctcccgcttcattcatcaaacgataacggtcagtttgcttcattgcttttgtcagcaattcctctacaagttttgccgatatagacctcgcatacggagcattcttacttcccactttttctttaaagaataatggttgcaaaaagctcagatgttcttctaccgcttcttcagcatattgttgcatgtgcgagttaagagttgtgtagattttcagtccgtcagtgtagacattataatttgtcccgtccttctttttattctttgcacaccaaccgtatagcggatttgtttcccaagcaagagaatcctcgtagtatttttgcatctgccagccccgataggtacttttgacaggtttcggtgccgtcattactccacgaagatattcacggaaataagttgccattccttccttgtggtcaacacgattataagtcaatttcaacgggagagctttcagagaatcgcattctgcctcagtgatataaccagccttgcgcatttgctcaagcaccacattccggcgaccacgagaacgctcattaaagcgaacagggttatagagtgacggattcttacacatacctaccaaagtagcagcctgttcaactttcagttccttcggttcacatccgaaatacgtgtgtgcagcagttttaatccccacagcattattcaagaagtcgaacttattcagatacatacttaggatttcctctttagtataataacgttccagtttcacggcaatcacccattcaatcggcttttggaaaaggcgttgaagagtattacgtgccacattctcagtaaacagctgttttgcaagctgttgagacaaggtactacccccacccgcatttttttgaaacatcagacctcgtttcacaaatgcacgaaacaacgctttggcgtcaattccggaatgctctacgaagcgcacatcttccgtagcgattaaagcattgataatattaggcgacaaatccttgtaggccgtatatacacgattttctttgctgtacgaccaggttccgagcacctttccgtcttcagagaaaatttccgttgcaaatttataatttggattttccagttcctctacagggggcatataacctatccaaccttttgaaatagaaacaaagataacaacgatagccaataccacgactgccaataaaatccaaagagcttttattatttttcgaatcatgtttattcttacttaaaaagatgcttaaattaagatgcaaaggtagataaaatccggaacgcaaccaacgagtttgattattatttcagttttgttaaaatatggggtgacactctttcagtagcctg

SEQ ID NO: 2993 - DNA, 1050 bp, Unknown
  gut microbiota DNA sequence
cgtagtatgccgtggctttcgccacgttcccggaacttcctctactccctttgctcctttcacgctgtacggagcagtccgcagagaatttccgggaacagtctctacacgtttccttttccggtaacaacacggatacccttgcaggagattctgtccaccaataccgggaagtttcctctctgcacataaggggcatataccgcttcttctagttctaccactgtgtaaggctctacctttggaagttctgttgcttccagacggatatctacgctgtttccaagtttcatgcttccgaggtgaagtttcaatgcttccacttcctcggttttcttccgggtttccttatcatacttgtagcagtagtctgctcccatgtaacggagttccccgaacgcttctctgacctgttcttttgtcaatgtaatctgcatgctacatttctccttttttgaaatcatggtgaatgagtgtctggtaagtgtgacaagtccttttcatatccacgtctatatttatttcattacttttctccttacctcttaacctcatcatagacctgttttttcttcttgtcaacaattattttactttttcccttactttttatttttgtatttcaaacgcttaactatatctttttataacttattataattttacccttacatttatccttatcttgtgttatgatgaaaacagaaacgaggtgtgcatatgtttgtgaataaagaagcagtaggaaaacgaattttacagatacgcaagaaatacggttacagtatgcagaagtttggggaaatcatagataatgccccgaaaggctctgtaaacagttgggaaaagggtgtgaatcttcccaatgagaaacgcttgaagcagattgccacgttgggcaatatgacgctgaatgaacttctgtatggttcatttaaagaatatgtagatatgcttatcacagaaaaactggggattgaactgccggaagaatttaccagaactttctattctcttttagagcagaacggatttacctacggggatgat

SEQ ID NO: 2994 - DNA, 5682 bp, Unknown
  gut microbiota DNA sequence
aaaaaactatcgcaacccacagaaatcccaagaaaaccactacctttgtattcaacaagcgttctgtaacatacctgcggaaatatcctatcactcaatacattgtatctgatagcggacattccacaaaagagttgaaaagaagcggtacaacacgtatatgcaaagctatgaaatacaacgatttgcatttgtccccacattctgtgtatttgtcaaaatagaggttgtaccgattaaaatgaatggtcactgataatcagtgatgtaaatatgctgcatcggcaagtagaatcatatttagcactaattgtactttgattaattaatatgtggaaacaagtagaatttgatttacagtcacgcagacgtggctttcatcttataaccggagaaatattacgtaatctgccgccattacccgaagttggattactgcatttatttatcaaacacacttccgccgggctaagtattaacgaaaatgcagatcctgatgttcgtatggatatggaaagcattttcaaccacttagtgaaagaacgtgaaccgtactatcaacacactttagaaggaaatgacgatatgccggctcatgcaaaaagctcaatcataggaacgtcggtcacaatacctataacaaatggaaagctaaacctcggaacttggcaaggtatctatctctgtgaatttcgggattatggtggtaatcgacaaatggtgactaccattagtggagaatagcaaatgaacttgctattctattgtaactagtggcaaattgtgttacccgcaaatacttaggagacaggattgtagcatactagtctcaggattgcggaacacgaagttgccagaaggcaacagccgccgcagcagctacattaagcgaatcaacaccatgcaccatagggatacggactacgtaatcagcctcagtgatcgtttcatgtgaaagtccctccccttcgttacccatgacgatagccaatttggattcattcactaaggcaggattatcaataggaatagaatcatctgtgagcgccatagcagccgtacgaaagcctaatttacccaagtcactgagggaaccgttcatccaagcccatggcacaaagaaaactgctcccattgataccctgaccacacggcggttcaacggatcgcaagagttgcgagtcagtaatacggcatcaattccaagagcggcggccgaacggaaaatagcaccaatgttagttgcatcaaccacactgtcaatgactacaatgcgccgggcttcccgacatacttcttccatgctgcgcggctcggggcgacgcatggcgcagagaactccacgtgtcaggacataacctgtcaacgtagcaagtaattctctactgccagtataaacaggcacattttcgcaacgttcaatgatttcagcagcatcaccgacaatatgtttgtactcgcataaaatagctaaaggttcataaccggagtccaaagctctcgtgataaccttcggactttctactataaaaatccctttgccgggttcggtacggttacgtaactgagtttcagtaagagtactgaacacctcaactccgggatgagataaagatgatatttcaataacaggcatactactgcttataactttcaattaaacatacaatcgcttctttcacataactgatcattgataaatggctaccttaatgactccgtccaatttattttcaaatatacgataagcttcctcaatctcgttcaacggaaatctatgtgtaataagaggagtagtatctattttgccttcctcaatcagattaagaatctcggcacagtcacatccgtccactccacctgttttaaaaatcaagttcttgccatacatatcaggcaaaggaagaatttgaggctcgtcataaagagctacgatagtgacaacagcattaggacgggcacattcccatgccagacgaaaagtatccttactgccggctacttctaaaacaacgtcagcaccaccatgttcactgttttgaatcacaaattccttgcagttttcaggttccaccaccagcacgtcaggataatgttcacgcacaaaacggattctttcaggagacttttcgcagacaatgatacgcctcggtttcttcaacatcacacacaacaaagtacagattccggtaggaccggcgccaataataagcacagtatcatcctcggaaatctctgaaatacgggttgcccaaaaacctgtcgcaagcacatcacccacaaacaaagcctgttcgtcgctgactgtatcaggaatacggttcagtccctggtcagcataaggaactctgacatattctgcctgaccaccgtcaatgcggcaacctaaagcccatcccccgttcgggtcagtacagttgttaacatacccccgtctgcagaaaaaacactctccgcaaaatgtttcaacattcactgttactctatcccccggcttgaccgaggtgacatcagcccccaccttttccacaacacctaccatctcgtgcccgacggttattccgggtacggcacgcggcacactaccgtgcttgatatgaaggtcactggtacaaatactgccaagagtcacccgtacaattgcctcccgtgaatttactatttccggttccggcttctcccgtaactcaaattttccgtgttcaatatatgtatatgtaagcataatatcctcttcattaattaacagccccattccggtgcaaagataatgatttcatcagatccatatttatcaaatgaaagtcaatccggacactctcataaaactttcatataaaagagtcttcttcttatcattagtttttgacttgttgatcttctattataacacgctttatctctcgtgtatctttagatttactaaaaggtacgactctataagatgctttctgtataacccccaaaccaaagtcaggcaaaagagttttatttttagaataatcattatcaatcatcatatcccatgttgctccaccagtcaaataaactttgaaactatctgcacttatcatagaaataatatctgtcggattatacaaatgaaacaaagttctaacatagtaatctttttgtatttctccaggtttgtaattgttactatatggaccaatcacatcgaattcataagacggatgacatatcgcaaattctattccatttctcggaaatgaggatcttacttctattttcttattgttagatattactttaagatctatttgccttgacgcatcatcaaattcggtttctgatacgacattctcttcggaattcaaataaagtttccaaaaatattccgatacaactcctgctatacaatcagccaaaatacgttcaggagatctttcatgcatagaattgtttgcagcaccaggatttacttgccgtgcaagctcttccgcctttgttctaagcaaatccataagatccttgtcttccgaagaatagtttagttcgtatactaccacttcaaaaggtgttctcctacaagtccgaggatatcttgcagtacaattaataaccaaattctctattctcataagtctattattgttcaaccttgccctataaatccatccaactgtttcttgatattctcaaaattctgattcaagtcaagtgtcctgtaatatatgacgtttccgtccctaaatgtcgtctgtccatcaggcgttatatcttcttctgtcttggcatacaataacatcccatccaccttccccgtatgattagtatcgtaattcattacataagaatgaatctgatataggttattagaatggatagtccttttgtcaaattgggactgcattgacctactataatacttggtatcaataatcagtgttcgttctttaaatgtcagcataatatccgtccgcatgataggaagaatactggaagtcgactgttctttgtcaatattccagtctatttgagttgcctttgcttttaattccggataatgtttccgataatactccagaacaaacttctcgtaaagtctgcacatatgttcatcggaaaattccttcattttataagcacctctttccgtagtcatcaacatcccgtcgagaataaaatagcaaacatacagaagcatccggtaagtcttgcaatttctatcaaagcgcatagtagtccagtctatcgtcaggatatcaacggcctccacgtcactaaagaagagcataaggcgcttcaacgcagccttcctgtccgatttgactttcggatgtttcagcaagaattgaacagttgtttttaatatctgattaaacttgttgttctccgataattcatcgtactcacaatcaattttctgttgtttccgcattagattattgaccgtaccacatatatcaagcttccctttcaatgtggacaatgaaccatgacaggaaatatattctttatgcaacccctgttttaattgaaacgaaatgccacgaagcagaatttcagcaaacaaatcatgaatctcttcaaattcttcaccggctatttcttcatagttgttctgcttaagctcctgaaaagcataagtcagcatatagtagatattgcgaatgaatatacctttgtctattgtcattttatcaggctcaataacttgtccgtttcttctttgaatttcttatcattgtcaaaccaatattctcgtaacataggggcaatatcatattcaatcacattctcaagccacatattatcaatagattcccggttacagaaataactatgaccgatacaaaagccttttccgagcgaatcatccttagcaatctcaatattcagggctttgacggcatcaatcactttattaaagacttcacaatcaagattctcctgatactttttgaaaccaaccgaatcaaatcccggtgtcatatcaaagaaactgaaccgacggcgtaaagcgtaatcaatcatagccaggctacggtcggccgtattcatcatacctataatataaagattctccgggacagaaaaatactcatcgttatatgcaagacggattttatgcttttctccccgataatcattttcgatgagcatcagcaactcgccaaaaatcttgctcatatttcctctattaatttcatcaataataaagaaatacttcttatccggatcactttgggctttccggcagaaattatagaatacacctcgtcttaattcaaaaccgccatcttctttcggcttatatcccatcacaaaatcttcgtaagaataattctgatgaaactggataaactctactttagttctatcttcttctcctataatagaataagccaggcgttttgccgaatacgttttaccgacacccggagcaccctgtaatatgatatttttctttgccagcaacagacttctcaacttggtatattcctctgattttataaaaacatcatccaggaaattattcccggaatatggaggattacgtttgttgactgttatagggttttcatcacggatcaaatccgccaatacgttatactcatcttttgttaatttgaagaacgacccattcttattcttcaggaattccataccgctcaattccggtatatcctttataaccgaataatcaatcgggttcag

SEQ ID NO: 2995 - DNA, 28699 bp, Unknown
  gut microbiota DNA sequence
aagcatatggcaggagaaaaatatggagtagagagaagaaagaacaggaaagggggctatgagaaataactcaattatgagggaaaaaacagaaaaactatgagaaataactccgttcctttttatttctcataaattaattaattgagaataaattagttatacaaaaaatatgagaatatgagatatgaatcggataaagcgttggcattccttccttgtgtaattgaaaatgcttccattaattgcccttttctattttcagaagcaatcaaatcccctgtatcatacctaataagcggcatatcaaaattatgaaatgatgttcctaccaaatgtccatcaacattttccgtcaaaccataggaaaaaaaaggtttatattgattattttttgattcatcataagccaaaaaacacatttcactatgtccataccaagaaatccaatctaaattccaatgttgttttataataataagaataatgtataaaaagtcgatgtatctctttgtggaacattatgaaatggaagaagtgatacaggaagaaaccttgatgagggcgtttcagaggtggaggaagttggtgagagagaataagaatagttactaaataaaaaagagagaagcaaaacaaagctttagttgttattcatacataaacatattatatagattaaaaagtcaatatcatggagaaaaatatttttaagttagataatgaacagctcaaagcaatagcccgttcatttaaagaaaaagtagaaaaaggattgaacactgaaaacgctgaaatccaatgcattcctacctttattactccgaaggctgacaatatcaacggtaaatcacttgtgcttgatctcggaggaaccaattatcgggtagcactcgttgatttcagcaaatcggtaccggacattcatcccaacaatggttggaagaaagatatgtcgatcatgaaatcgctggggtatacccaagaggaattatttaaagagttggcagatatgatcaccggaataaaacgggaggaggaaatgcctatcggctattgcttttcttatccgaccgaatccgtgcccggcggggatgcaaaactgctgcgctggacaaagggagttgacatcaaagagatgattggaaaatatatcgggaatcccctactcaactacctgaatgaaaagaataaaatcaagtttacggatataaaagtattgaatgacaccgtagccagtttatttgcaggacttacagacaacagttatgatgcatatataggactgattgtaggaacaggcactaatatggctactttcatcccagccgacaaaataaaaaagctgaatccagcggataatattcaaggcatgattcccgtcaatttggaatccgggaattttcatccgccatttcttaccggagtggataatacagtcgatgtaatttccggtaaccccagaaaacaacgtttcgagaaagcagtatccggtatgtatctgggagatattttaaaagcaacttttcctttagaagaatttgaagaaaaatttgatgcgcaaaaacttaccgctatcatgaactatccggatatatacaaggatgtatatgtacaagtggcgcaatggatatataccagatcggcacagttggtggccgcttcaattacagggcttgtcatgttgttgaaatcatacaataaagatatacgtaggatttgcctggtggctgaaggcagtcttttctggagtgagaacagaaaagataagaattatcacagtattgttacagaggaattaaaggagcttttcgacttgttcggtttgaaagatgttacagttgatataaaaagtatgaataatgcgaatctgataggtacagccattgcggcattatcgtaacaaagaaaattcggtgctgtatcaaagccctgatgcagcaccgaatcagtttcaaaccatacctatgacatagctttttattataccttaaaacggctattttatttgaagtgcaaaacctcctccgggagccagatgaattttcaacttgctatccttctttacagagaaagattcccgtttatagtcacgtccgacacggtgagcattgactccgtctttaaataaagtggcgttatatgccttatctcccaaaaaagaacaatcgacttcgatatccctggccgtccaatcagtaattccgcctatataccagacatcccctttccggcgtgcagtgacaatgtactctcccattttaccgtcaagcacaatgctttcatcccatacagtcggaatggcagctatgaaatctgttgattccggctcgcgcatatagttgctcgggttatcacataacatattgaaaggtgactcgaacaccacatacaaagccaactgccggcaacgtgtcccctggctcatcggttctgaattgcaaggataataattacctttcgaagcattcctcatcgcgccctgtgtatagtccataggaccggaaacctgacgaataaaaggaatcatcacatcatatttcacctgatcgagtgaagccgggctccacttcatctgctccagtccgtttaccccttcgaagttcaacacattcggataagtacggttcagacctgccggtttgtgtgtgccgtgcaaatcgaggatcatcttatatttagcacaagtctcggcggcccggtagttgaatgcggtcatttcctgatcgtcacggtccatgaagtcgactttgaagcctttcacccccattgcagcataatgacgacagacattctccatatcacgttcgaaagcataataacctgcccaaagaatgatacctacatttctgtcagcggcataatctaccaactctttcaaatcaatatctttcaccacctgcatcaggtccgccttcagattgaccgcccaaccttcatcaagtatcacatattctataccctttgacgaagcaaaatcaatatatgctttataagtagcattattcactccggtagcgaaatcgacactatccaagttccatgcgttccaccaatcccaagccactttgccgggtttgatccatgaaagatccgacaagcgtgaaggcgcagccagcaaatagctcagattacttgacgccaagtctttatcggaagtagtcacaatagccatgcgccatgggaaacttctgggcttatccacctttgctatataatcctcgcgttctgccaccaacatctgaagtttgttatgtccgccctgaacagtacgcttcggatatggagcaaatttgccgctcaaccgattttcacctttagcagcagacaagaaaagccccggataattctccagatcggactcggtaatacaaatcttaaccccatcaccggcttccaccactagcggcagaaacatcaaacgcttcttattttgtttagacagattatttgtaacatatgtattttcaaaagagttgaagaactgagattcataatcaccgtcctttcctctattcacataaggcacggaagcaaccgcatcaaacgggaactgatagtcaacaatctcatccagcacattgaaaggcttcttagcccgactaacaaagcgataaacgattccgtcatcgtatgctcgaaattccacattccagtcttttttaaaccgcaatgtcagttcattataatgatctctcaattcattggcacgatagaagggagaagacaccatacgatcaacacttttccgggaagtaccggacaatttcgctttctcaccccatacttctccgttgtccaacgacatggctatcggcgagggagccagaatctgccgtccgtcacaagtaatatcgtaagtcagttgatcgcctatgataatagtagtttgcagattcccgcccggagaattcagagtaaattgcttttgtgcctgtgcagtaaatacacaacatacacacattagtaagactgtcagttttttcatggttttaattatagttattatcaaatcaacaaaagaacggtacaaaaataaaaataataaattagcaacctactataatactcccttaaaaacattttaataggaaaggctttgaaaaaactttctcgctaaattatgacatatagaataaaaagctatttttgcaccgttttttaattttatcttaaactaatattatgtacaagatttttcatggcttccatctagtggaagcttatcaggatttaaagaaagccagacggttggcaaagaatcaggcagtggccagatgtattaagttaaccgtagctattaccatttcccttattctatggctcctccctatcgacacatttggtatagaagggttaaccgttatagaacaaagactgatttctatctttatttttgccacacttatgtgggttttcgaagctgtccctgcatggactacttccgtactgattgtcgtattactattacttaccgtttccgacagcagtttatggttcctcactcaagatattccagcaggagaattgggacagacagttaaatataagtccattatgcactgctttgccgatcctatcatcatgttatttatcggtggattcatacttgccattgctgcgaccaaaagcggtctggacgtattgttggcacgtgtcatgttacgccccttcggaacacaatcacgctatgtattattaggattcattcttgttacggctgcattttcaatgttcctcagcaacacggctacagctgccatgatgctcactttcctcacccctgtattaaaggcacttccggcagacggcaaaggaaaaatcggtctggccatggccattcccgtagctgctaatgtaggcggtatgggaactcctatcggtacgccacccaacgccattgcactaaaatacctgaatgatccggaagggttgaacttgaatatcggcttcggagaatggatgagttttatgctgccttacaccattatcgtactgtttattgcatggtttattcttttgcggttgttccctttcaaacaaaagaatattgaattacaaattgaaggcgaagcaaaaaaggactggcgttcgatcgtagtttatattactttcgccatcacggtcgtattatggatgttcgacaaggtgacaggagttaactccaacgtggtagccatgattccggtagccgtattctgtataacaggagttatcaccaaacgcgacctggaagaaatcagctggagcgtactctggatggtagccggcggcttcgcactaggggttgccttacaggaaaccggactcgccaaacacatgatcgaagcaatcccattcaacacatggcctcctgtattaatgattgtcggctccggactgatttgttacgccatggcaaacttcatctcacacacggcgactgccgcattgctcgttcccattcttgccattgcgggaagcagtatgcgtgagaacctgtcttcgctgggaggtgtagaaactttattgatcggagtggcaatcggttcatcattagcaatgatattgcctatcagtactccgcccaacgctttggcacatgccacaggcatgatccaacaaaaggatatggagaaagtcggtataatcatgggaattatcggactgatacttggatataccatgttgattatacttggttctaataagatgttataaatttaagtaccccttttccataaaattaagacatagaaaaagccctgtgagaaccaatcattcttacagggctttttactagtcagtcttgctctgaagactgagaatgtatcttctccgcctctacatacttactcggacttactccataatactttttaaatacctcacggaaatatttcgcatccgagaatccgactttgtcggcaatctccgttattgtatattcaccctgcttcagcaactgtgcagcatgttgcaaacgtatcagccggatataatcagccggagcatagccagtcaatgccttgagtttgttgaagaagctcgtacgactcatataatgcaggttgctgagcatttccacattaaagtccgaatcccccatgttcttctctatacattccttgacagaagcaatgaatttccagtctaaggtattagtgcaattaaccggaaaattcggttcttcatcttcgatactattataaacccggcggagcaaagcacgatttgttagtatgttcttaatcgttgctttgagtatccccacactaaaaggtttggtaatataagcatccgctccgatttccaatccttcgagcatatgtttctcatcccccagcgcagtcagcaaaacaaccggaatatgagacatctcaagatccccctttatagttgcacaaagttcatctccacccatctcaggcatcattatatcggatatgacgagatccggattaaattcccggattataataagagcctcctttccattcggacaggactggatattataacccgtccgaagcatatccaccagataattacgcaaatcatcattatcctccactatcaaaatacgctgcaaggaactgttgatccgggatatctccatatccggtaatcccggcgtatcacctgttacaatagtctccaaacgttcatccggtgttttgggagagataaattttgctttatggaaatggctatttcctttcggaaaagtaatccgtacacaagttccttgattttcagcactctgaatctgaatcttacctttatgtaacttaaccagtttgtataccagcatcagtccgattccgctacctgtcaccttcagattaacgacattactaccccgaaaatagtttctgaacaatttcttctgttcacacgttggaataccgattcccgtatctttcacctcaatactccaactatttccttcctcggaagcgtaaatacacacactaccgtcttcaggtgtatatttcaatgcatttgagagaatattcttcagaatagagcccattttgtcactatcaaaccacacactcaaatagtcaaaattgctttcataaacaaacctgacatgcttcatctcggcatatttgcggaaagtggcgcaaacatcattcatataagtattcaactcatactcagaaacataaagagtggaagagtagacatctatccgttcgaaatttatcaggttggttgtcaactgaagtaatgtattcacatttttaagagccatatttatatgaggtagtgcctgttcagcccccatgcgattttccaagacttcctccaatggagcttttatcaatgttaacggtgtacgtatgtcgtgtgccgtattaatgaagaaccgtgttttttcgtccgacaccttcttctgtttatgcaacatgatgatacggaatataatacccataaccaacaccaacagaattacatatcccaccatagcccatacactggcccatacaggaggcgttataataatctgaatgcttcttgtctcataagtcttatatttttcttcattggatacggcacgaatttgtaatgtataactgccgggaggcagatttctgatgataatccggttatcctgactcggacggctccactctttatgataaccatcgattttccatgaaaaaagaatattggaaggataatcatagttgatagaagctacatcaagagaaaacgtgttttgtccgtaagctagttccagccggtcagtttcgtcaatatccttttccaaaggtgatccttcatcacccgggtaaacaggatgataagctatcataaaatcacgcaatagcaaacgcgaataatgtggctccggtatctgtatgtctgttggaaatttgacagcaccgtcatttcccccgaaaacaagcgcacttttgttataggtcgtagcagagcctgcattaaaattaacactcatcaatccttgttcccgtgtccagttacgaaagaagtgctcctcaggtgaataaatcgttatgccattttccgtacccatcaggagactcccgtcctgacgcggaagaattgtataaatattatcggagatcagtgcacagttgtcacttcggtactgatgaataaagttcttcttattaatgtcataaacaagaagtccggctccacgggtaccaatatacaaaattccgtcttctctttggtataatgcgcatatatagagagattcaacaggcaggtcaatatacctgtaaactccggattgtttgtcaagcagatagagccccattcgggtaccaatccacatctgccgggaatccttctcctgaatggtagtgatagagtttactcccggatataaacgcacacttttagtctcaagattgatgcgtttcaaatgataataccctccggaccatatatcaccgcccgagtctttttttatgtcaaaaatatattgatcgggccgtacccctgcaatagcagcaggagaaaggtaacttatcttaaaccccttcttcttttctatcttgtaaatacctgatgtaaaaccgcccgcccatatcacaccgggagagacttcacacaacgctaagaaaatgtgattttcatcatcaggtaccggatcaaaagaactgaaaaaagaacgccattcttttgtatcagtctgatagatactgataccgttactggttgcaaaccaaaggtcgccatcactgtcctccaatacatcatgaacctgatcgttcaccagtgagcggctattgccaagagaatgccttatcaagtcataacttccataacggttgttacgaacggtaataccggtaggataattggcaagccagatacgttcttcttcatctacatagatatcattgatattgtttccgttcatcccgttataactactataattggcagttatatagggctcactcatataggtattcacatccagtttatatacaccttttccacccgtagctaccaaaagctcatgagcgttcaaagcaactatctggtttatctctacattattgggtgattgacaaggaatgattttccctgtcccctccatgtcatatataagtacaccctctttgtagcttcctataaacagttgttttgagacgacataataatagagttcatgcactggtgtactgatactttccaccgtttcatcggatagcagtttcaaactcccatctcctattccggcacgaaacagaccgcttcccgtaccaataaaaaaatggttaccatccgcctgttcaatggtagttatttcaccaatagccggcgccggcatatgtgtcgttgttccggtacgaatattataccagataatactatctttacagcataaccatatacggtcactcttgtccaaataaccgtaattcagaaatgcctgcgacttatttctaatcaactccggatgcacataagccagttcgaatttatcatgttgcaaatcgtacctgaaaatacgacctttctgaccgattacccataatacacattttcgctgtccatgtagagccagtttaaggcaatacgtgaatccagtttcatactgtcgtctgaaaagttgtaatgcttgatatgtttgccatcataacggtctatcccctcctgagtcagaaaccacatatagccccgttggtccttttggatatggtatattttttggttattcaaaccgtcctccagacctatatacttataaatctgccctttacttacagtactacttatgagaagaagcacaaaaaacaaacatcttcccatttttacaaaaccattcatgtctttcacaaatattcaaaaataccctgcaaaaatatgaaaaaattaattaaaatacaagatataaatgtatttatatttcaatcagtaatcatcattaatttttcatatcctcagtttttagtttgtggaagaatatatcataaatgaaaatggggagagagtatttttcctccaattaatttgcatctttcaatatattatccgaatattgcagagatgaaaaagcacactatgaatccagttgatgaaaaaatcataataaaaaagctaaaggcaggagacaacgaggcatacaagtatttgtatgactatcattatgttgctctctgcaaacttagttattatatgctgaaggataaaatacaagcagaaagtatagtcagtgatgttatttttcacttatgggagattagggagaatctggaacttgttcctcctctacgtaattacttaattatagccgtacgtaataaatgcctgaattatctggctctcaaacaacaagaagtggaaatccgtttttctgttatggaacgggcaggaatccaactgcaaaatatcatcccagacaatcagcaacctctagggacgctaataaagaaagaactggaacataaaattcaggaagtgattcaaaaacttccccctgtctgcaagcaggtatttatgatgagccgcttccgagagatgagctacgaagaaatttctcaggaacttggcatctccgtcaatacggttaaatatcacataaagaacgcattagtagtactcaagaaagaatttggaacttttttatgcatttttctcgctttttaccctaccctcttattctaaaaaactgtagtatatataaaggcaatcattatttatggatgaacaatcactacatacagacacagtccacgattggattaccggatatctgaccaatagcctgacaccggaagaaatgcaatcatttcaagaatggctgaatgcctcggaagaaaacagaaaatatttctccgatatacaggaggtatggatagccgcctcgaatgaggcagacgatgttcatagcttcaacaaagacagagcttatcaactattcctgagacgaaccggagaaactacccaacaaggtatcaataaacgcaaggctttccaacttcgcccatggatgtatgctgccgcgatgactatcattgtctttatttgcggaacgattgctttccagacaggaaagagtgttatccgcaagcagttaacccaaatttccattgaagccccatacggctcaaaaaccaaattatatcttccggacgggacgctggtctggctcaatgccggttcgaagatgagttatgcgcaagacttcggtatcaacgaacgggcactgaatcttaccggagaagcttatttcgaagtaaccaagaataaacatattccttttaaagtacatactgatgaactggacgtaaaggtattaggaaccaaattcaatttcagaaattatcaggatgatctggaagcgaaagtttgtttgctcgaaggtaaagtggctctcagcacccaacaaaaggaaacgatacttcacccggatcagcaagccctattagacaagaagaccggaaaattattgatttcaagtactaaagctgcttacagtgccgaatggacaaacgaccgtctctatttcgacgaagcgctgctccccgatattgtgaaggaactagaaagaagctacaacataaaaatcactattgcagacgctgctctaaactccgtccgtttctatggtaatttccgcagaagggaacagagtatccgggaaattatggatgtactatcatctaccgataaaatgacttatatcattgagggaaaaaatattgtgatcacacttcctgaatgagactgaatgttaaacctttgaaaacttaaaagaatatgaaaagcaactttgaaaaaacatgattttactctcccagatagaaataaaaaaaggtcaggttcctttccaacccctgacctccttttaactttctgtcttaaaagcctcagtgactttatcgatgaaagcttaggcaaatataaataaaatcctaaacttctcatcctatttatcaattatttattcattgacttatgaaaactaagaaaaagttttttttcatggtcctgctcatgttatgtcttcatctgaactcatttgcacagcatatcagtatgcagttgaagaacgtgactgtaaaacaggccattgaaaccatacagaagcaaaatggatattcatttacatttgcggcaagcgatctgaatacccagaagattattacggtaacagcaaggaacctacccatagagaaggtagtggaacagattttaataggacaaaatgttagttatacagttcaaggtaaagacatcattataaaaaagaaaagtaaccaagccacacaacagaagaaaaaaagtacaatcagcggaatcatcacagacaattacggggaaccgatcatcggtgccaatatcaaagaaaaaaatggtacaaatgggactatctccgatattgacggaaagtttcagctcactgtcgacgaaggtagtagcgtacaaatatcttacttgggatatctgacgcaggaagtgaataccagaaacaaaacgcatctggctatctcaatgaaagaagacgcgcaggcgttggatgaagttgtcgttgtagggtacggaacgatgaagaaaagagacctgaccggtgccatttcttctatcaaaatggatgaaactcccgtgcagaccttcacgacggtcagccatgcgttagccggaaaagcagcaggtctgcaagtagtgcagacgagtgcacaggtaggcggcggcagtagtttcaatatacgtggagcagcctctgtcggcgccgggaacgatccgcttatcatcattgacggttttcccgtttcttccagttctacgcttggttcgggcaatcgttacgaagcggggcaaaccgataatattctcgaatctatcaatccgaatgacattgagtcgatagaggttctgaaagacgccagctctaccgctatctacggtgcaagggccggacacggtgtgattatcgttactaccaaacggggaaaagaaggaaaagcaagcgtcaactactcagccaatgtctctgtgcaaagaatgaaaaactcattcaagatgttgaacgggcaggactatatgtatcagaccaaccgatattatcacgagctatggctgaaagaaaaaggagaaggcatttacgaggattatatgattccgaatgatgatgcggcggactttaagcccagatactcgaacgaccagatactcaacgcgccgacagttccttggtttgacgaaatcacacgtaccggacttatgcaccagcataatgtttctataaacggcggaacggaaaaaacgaaatatatggcttctatcaactacctcaaccactccggtgtagtgaaaaataatgacatggagcgcttcactgcaaaaataaatctggaccagcagatttccaagtacgtaaaggccggattgtctttcaatattagccgtaataactacgataatgtacctttgggaaacggcgagaatgaaaattccggtatcattactgctgctgttgctttcaacccgactgttcccgtcagagatgaaaaaggaaattattcgaccaatcctcagatgcctcaactcccgaacccggtgtctctcctcgaaattaatgataaaactgtaaaggaacgattgttgggttcggcttatatagaagtggaacccatcaagggactgaaactaaaagccaatttgggtatcgaccgaaaatatcagaaacgaaaaacttatcttccgaaaaccactcaatacggggcggcagtcaacggtcaggcatatttagcccaggaagataacaacgactatttaatggatttgacagccaattatcaaaaaatatttggtgaacatagtttcaatgttcttttcggttattcctatcagaagttcaacaccgaaggaatgagtgcaggtaatcaagattttatcaatgattcattcctgtacaataatctgggagcaggaaactatagtcgaccgccggtaggttcgtacgcttcggtaagcagcttgagttcttacttcggacgtttcaattattcgtggaaagaaaaatacctgctcactgccaccattcgtgccgacggcgcctccaactttgccaaaggacatcaatggggttatttcccttccgtatccgccggctggcgcttctccgaagaaaaatttatcaagagttcttcctctgactttctttcgaatggtaaactacgcttaagttggggacaaaccggtaattataatgtaggcaacggagctctcgactattatggagcagacccgtggtatggcagccaattcggtgattcacagcacgtaggtatctatgtatcacaattaggtaacccgaacctgacatgggaaacgacaaccgaatttaatatcggtctggacttgggatttttcaacaaccggattaacctgactgccgaatatttccagcgtacgatctccgatttgctggtgaagaacaaaacgattccccattataatgaagtgaaaaccattgcagccaacattggttcgactcaaagtaacggtgtggaactgactctgaacacgcaaaatatacagactaaacagtttacatggagtactgatttaactttctcaacgtataacgaccgttggaaagaacgagatccgaactggaaaccagctgcctatcagaaggaacaagacccgattcgcggagtctttgcctatgtagccgacggactgttacaacctggtgaggaagcccccgcccaccagccgcaacttcttcccggacaagtgaaactcaagaatataaatggagatgataaactgaatgaggaagatatggtcttaatcggacgcaatgaccccaaattcattttcggtttcaacaacaatttttcttataagaatttcgaccttaatatatatatgtatggacaggtaggtaaaattgccggagcaaacagttattacgacgcctggggatcttacggaaaccgcatcaaactgggacagaatgtacctgtctctttcaaggatgcctggagttcggacaaccagacaagtacacgccccagcttcatcgagtcggcttatggtaccggtgatctgtttctccagaaaatttcattcctgcgtatcagaaatatcacattaggctacaccgtgccaatcagtaaaagtatctgtaaccgactgcgagtgtatgctgacatcaacaatccatgtgtatggaccaactggaaaggccaagatccggaaacggacagtaacacgaatgcatatcccaacgtcactagttttagtatcggagtagatatttcattctaaataaacctaaaaagaattgaacatgaaaagaattacaaaacttatatatcttgctctcggaagctgcctcatcgcaggactaaacgcttcgtgtgaactcgtctccgagaactatggtgatatcaacaccagtatcttccccaaaacggcagaagacgctgacgctatcacaacgtctgccgcatacgccacctttaaaaatagtggctatggaggtctgttcaatatagcaacaggcatacaaatcgtcagcgacgaagcaggcgattacggaatgtgcaactggggttgggaccacatcaactatgccaactggaacaccctcaagatatccggttccggtagctggctgactgttgagagctacgcctatgtaaacgatatcagtaaaatgactctgactatcgaccggttgaacgatattgaaatggacgatgccctcaaacagcaatacatcgccgaacttcgtatgggcagggggtggctggcataccttctctatgatttctacggtccaatccccattgccgacctggaaacactcaagaatcctatggctgagaaaattctcccccgactcagcgaggaagaaatgcagacatatatcgagactgaacttacagaagcaagcaaagtactgcctgccaactacaaaaagggagataagaactatggtcgttttacagccggattggcacatactgttttgctaaaactctatatgctgaccaagcaatgggacaaggcggaagcagagggacgcgaactgatgaaacctgaatatggtttcgaacttgtgcccgaatacaaagatatattcacgctggcaaatgagaagaacccggaaattatctgggcttgccaatgtgccaaaggataccaggaacataaatggcaacctcatgtattacccaacgactataatttcacttcttatctggataaaatgaccaaatggaacggatataaaatctcatgggattttatgcagacctttgatccggcagacagacgtttgctgacgattgcatacgaatataccagtaaagacggagtggtacataatgaaaagaatgacagaccggatccttccgctcaattatatttaggagcagttccattgaaatatgaatttgatccggattgtacgggagaagattcacaaatagactggattatctaccggtatgccgatgtgctcactttgacagcagaggctattgtacgcaacaagaatgccgtaacgcaggaagctgttgatttgcttaatgaagtgcgtacccgctcgcttccgggcaaaggatacagcctgcaagatttgaacagtgtggacaaatttctgaaagctgtattggacgaaagaggttgggagttatatttcgaaggaaaccgccgccaagacctgatccgctatggattatttgtggaagctatcaagaagaaggctcaatcaatgggtaaacaaacgcttgtggatgaagaccgttaccgcttccctattccacaagatattattgacgaaggtcagggaataatcaaacagaaccccggttattaatcactgaaaagaaaaaaacatgaaaaagttaatttatagcatcatcggactactaatgttcgccggttgcgaagatgattataagaccgacatcacaattccaatgtcgggcatatatctgagttctcccgccgaaggagcaactatggacttaaatgatgaaagtaaagattcatacgagtttacttgggataaggcttcggaacaaggttccgtactgatattcagcactaccaaggaccttgtgaaacaagttaccgtagaagcagggacaggaaaaaattgcaatatatcagcactggttatcaaccaattactttccaagttagatattaaatccggaaatgaaagactcatttactggactgtaaaagataaaaataaccagactgccgccgcatcagaagttcgtacgctacaagccagacgaatgaaaagtatcttgcttgctcctgaagatatgtcgacagccactttgttggcagacgctacacaaaccaaaataaaatttgaatgggatgcttcaggaatcggtaatgatacagagtgtacggtacttctttctttagatccggaaatggacaacttcgtagaactgccgaccaaaggaacaggaaatatatcgatcacccacgaagaaatggaacagacaatcgaaaaactgtctatcaagcgttaccggaccaatactatttattggaatgtacgtaacaatgcagatcagtcacttatttcgcgtgtcgccaacacattatacacaaacgacatgatgcgtttggttgacaaacgtggagatgagacgatcacttatcccgtagtccgcgtgacattctccgacggaacttcgcaagtgtggacagcccaaaatctgaatactaccaaatacccggatggaacggaaatcgaagccgaatattacagatatgctcccgaatcccttggagaagactggatcaaagcaatcggtacctattacagttttgtgattcgcgaccggattatcccgaaaggctggagaataccgaccgaagcggaatggaattatttattctctgaagccggaaagaatggcgggtataatgttcttaaagatcctgtctattattataaagatcctaccggtcaggaacatttgaatgaatggggactgagctttacttcagcaggtacatggaacttggataggaacgcaatcgaactggctcaggaaaaattctactttatggccgccgacttgggcgatcctgcaacctggaacgatccctggcgagctttaatccatgacaacagcgaaacattatgggtatcctgggctaaaggaaccgtcatgcgctatatctatgcagaataactaataaaacatgaatcattatgaaaagatattactttcaaatattactggagtgttgtctgacgctatttgccggatgttccgattccgattcggaatccggtcagaacggcatacccaaaggttcaaaagctattgacctgcaacaagacagaagtggtctgctacgtaatccctgcatgggttggggactttatgacgatgcagtcggcaatgtagccaacgcagaagagtattgggctgcacaagatgaagctgcacgtaactatgcatctttcttctatatacgctggcgttggtcggaaatggaaccggaggaaggaaaatatgcctggatctacgacgagaactataaaaagctgattcaaggagcgctcgaccggggattgaagttatgtttccgtatctatgacaacggacaggacaacatccgccaaggtactcccgaatatgtccgtgccgcaggtgcccaaggatatgaagtcgaaggacaaaataacgccaaactatggactccttatgccgacgaccctatctttcagcagaaatatgaaaagtttgtcgcagcattcgccaaagagtatgataacccggatatcgtagattttatcgacgggcactctttaggctggtggggcgaaggctcacatatcaagtacctgaattctgacaagaagaaagagactttcgactggtttacaacgatgtattccaagaacttcaagaatatcattctggtattaccttataatagcgaaatcggattcaatacggaaaaagaaatcgctatcgaccaaaaagggtatggattgcgcagagacggtctgggaagtatgtggtttactgaaaatgacgagaaagtagcgaacgagatgtatggaaaagttttaatggtgggcgaatgtgcttactggggaggatatacggctgcttacgaacctttcaaaaatgacacaaaatattccttcaaatcatggaaggatgtatataatcagagtttcgaccatgcccagacttatcatttcaatacactcgacctaaggacgattaccgaaacaaagggctggacgggactggcaccggaacttgtccgcaaatttgttctgaacggcggatacagagtatatcctacttatgtaatcatgccttatgaagcctcagcaggccaaaccgtatctatctcccactcatggagaaacaccggatatggttacttgccgaataacatgaagaattggaactataagtacaaaccggcctttgccttgttcgacgagagcggcaaactggtaaaatcatggattgacgaggatgccgaaccttcgcaatggttgtctaaccaacggagaaactatacttacgaggtttccctcgacggtatttccagaggcaattaccaatgggcggtagctattgtcgacaagaccaaagataaccaaccgggtatcaatatcggtatcaaagataaggagaagaaggatggatggacgtttatcagtgagatgacaattaaataaatgaaccgataaagcatgaaacatatacatttatatctatttgcacttatctccgtgatccttacaagctgctcacacgcctgtcaaaaggtagagttgcaggaagacaccgtatcattgcttcgcaacccttgtatgggttggggagtatatgatgacgctaatgatgaagtacaaaacgcgaatatttactgggctgcccaagacgaggcagcccgtcaatacgcttctttcttttatgtacgttggaggtggtcggacatggaaccggaagaaggcaaatacgcctggctgtatgatgaaaattacaaaaaactgatacagggtgccttagaccgtggattgaaactctgtttccgtatttacaacaacggacaggataacctgcgtaccggaactcctgactacgtacgccgtgccggagcaaaaggatataccgtaaaaggattgaaaggtgatctttggacaccttatccggatgatccgatttttcaggaaaaactggaaaagtttgtcgaagcctttgccaaggaatatgataatccggatattgtagactttgtagacggatatagtcttggttggtggggagaatgtcaccatgtgatcctgcaagaccaaaacaaattcgagcaagtgttcgactggttcacaaccctctattccactcacttcaaaaatgtgcttcttacgctccccttcggcagccaaatcggtttcgataccgaaaaacgaattgcaattgacggaaaaggatatggcatgagacgagacggattgggaagcatgtggttcagtgatgaagaaaggaggatcgtcgcggatatgtatggaaagacacttcttgtcggagaatcctgttactggggatgttccaccgatgattgcactccattcacctcggatacacgttatcggatgaatacatggagagatgtatacaaacagaccttccaacacgccattgaaggacatttcaatacgttggatttaagagagctccccgaaacaaaagggtggaccgaacgggcaaatgacctggtagaaaagtttattatccaaggaggataccggatatatccatgcagcgtatcattgccagtccgtgccaaagccaaatcgacagtcctcatttcacacgaatggaaaaatacaggaaatggttatctacctaacaatatacccaactggaattataaatataaaccggcttttgcattgtttgacctacaagggaatctagtgcaaacatgggtagacgacaacgcagaaccttcggactggttgcataacacagtgcattcttatacttatccggttactttcacggatattccgaaaggtacttatcaatgggctgtagctatcatcgaccaaacaaaagaccaacagccgggaattaaactggcaatcaaagacaagcaagaaaaaaaaggctggtttctacttaatgagattgttattcaataaaaaacaattatatgaaaaattacaaattttctaaagaaataaagggattattctcaccacagtgagaataaattcttatcgctatgagaaaaagttctcaccataatgagaattttttctcatcacggtgagaatactttgagaattatttcatcttataaaccaatgttcctcccttgacaatatcttcatgagagatagtattcttcgtataaggttcaccattcaaagtaatgctatccacatacttatgctctttcgacaggttctctgcgataatagtaaaagtcttgccaccagccaaatgcaataccatttcaggcaactggggcgccccgaatacatactcgccactcaccggattcaccggataaaatcccattgcgctcaacatataccatgcagacatctgaccacaatcgtcatttccgcaaagtccgtcaggtttgtttcggtattgagtatcgaaaatctcacggattaactcttgtgtacgctccggacgaccggctaatgcatataaataagttacgtgatgactcggttcgttgccgtgagcatattgtccgatcaatcctgttacatcagccagaccttcaccttccaaagtaacggtaaacaaagaatccaatttattcaggaaaggttcttcaccaccaaagagccggattaatcccgggacgtcatgttgcacgtgccaggtatattgccatgcatttccctccgtataatctccccctatactttccgaatgtcccaaagcactcggattaaacggagccttccatgttccatctcctttgcgcggacgcataaactgggtttcagtatcaaagaggttcttataataatcggcacgttttgcaaagtacgccgcatcttcttcttttcccatacggcgtgccatgtcggcagcagcataatcgtcatataccgactctaatgtggaagacaccgattcggcttttatcaggtcggtcgggaaatagccgtatttcgtatatacttcccagtttgacttcaacggatgtgaaacagtctgcgtcttctttataatattgaaagcacgctccgcgtcaaagccacggaatcccttacgataggcctcggcaatcacagaaaccccatgattacctatcatacagtagttctcctttccccataatgcccagataggcaggaatccctgcacttcaccttgttctatcaacgaattaacaaaaccgtcgacacgttcgggaattatcaatgtatagaaaggatgagcggcacgataagtatcccacaaagagaacgtagaataaaaagtccccgttcccgctttcacaacagagtcggcagcgttacgatacataccatcgacatccgaaatctcattcggttgaatcaaagcatgatagaaactggtatagaagtttgtcttttcatcatcggtaccctctatttcgatacggctcagataactattccattcattatgcgcaacgtctctcactccgtcaaagtcccaggcaggaatttccgcttccaagttcttcttggctccggctacgctcgtagtggaaagggccactttcatcatcaactcgtctcccggctgtatgtcgaaagtagcaacaatgcgtttccctttctccgtctctcccatcggaaggtaaagtgagtctgcaacaggacgattaaattttatcacaaagaaataatcctgattcacccatacggcattattgacatgtccggtcagcgtttgggcgtcttcccaattcacctcacaactcttcacgtgtgaatgatattgttcttccctccaggcaggaccatgctgaagatctatcagcagagaagcggagtctgctttgttgtaggtatatcgatgcagggcagcatggatagaagccgtcagttccgctttcacctgcggatcggaaagttccacagtatagtaacccggcgcagccgcttctttatctttcgggaaatgactgcgataagcgtcccaggcacgggtacgtgtaccggtaacaggcattaccagaatatcacccaagtccatacatcctgttccattcagatgcgtctgcgtgaatccccaaatcagagaatcctgataggtatactcggaacaatagcgccagccgactgcacccgtcacagggctgctctggatcattccgaaaggataacaagcccccggaaaggtatgcccattatcggccgcaccgatgaatgtattaacgtatcgggtataatcttttgtttccgctttttctgtcggagaacaggaagaatagaaaaataaacctgccaaagcagcagccataagagggattcttcttttcatagtaaatataatgttaaattaatgtcgcataatgacagcgacaaagataaaaaaaatccctctcatgacatccgtacgattcgtttatttccaaaggcaatctatcgttccactgtgataaaacaaaaaatcttgcgacttattggataaatacaactcaattatttatctttgttagcttaataataagctggctcaaaaaaacaataagcataatgaaagatttcttgaaatttacacttgcaacagtaaccggtattatcctgtcaagtatcgtattatttattgtcagcatggtgaccttgttcggtatcatgtctgcttcggatacggagacaatagtaaaaaagaattcggtaatgatgctcgatctgaacggaacgttggtcgaacgcacgcaagagaatccattggacattctatcacaattattcagtgacgattccaatatatacggtctggacgatatcctctcttctatcaaaaaagcaaaagagaatgaaaatattaaaggaatttacttgcaggcctcttcattgggaacgtcatacgcttctttacaggagatccgtaatgcactacttgatttcaaggaaagcggaaagtttatcattgcttatggagactcttacacccagggactttattatctttccagcgtagccgacaaagtgctgctcaatcctaaagggatgatagagtggcgtggcattgccgcagctcctgtcttctacaaagatttgctgcaaaaaattggtgtagaaatgcaaatcttcaaggtaggaacatacaaatcggcagtggaaccgtttatttctaccgagatgagccccgccaaccgagaacaagtgactgcttatatcaattctatttggagacaagtgactgaaggtgtatccaattcacgctatatcccggtggattcattgaatgcctatgccgaccgtatgctaatgttctatccggcagaggaaagtgtaaaatgcggactggctgatacgctgatttatcgaaatgatgtgcgtaactatctaaaagagctggtagaaataggcaaggacgatcaattgcctatgcttggcttgagcgatatggtcaatgtgaggaaaaatgtaccgaaggataagagtggcaatatcgtagctgtttattatgcttccggagaaattaccgattatgccggttcatctgcttctgatgaaggtatagtaggttccaaagtgagccgcgaccttcgcaaactgaaagacaatgatgatgtgaaggcagtcgtgcttcgagttaactctccgggcggaagcgcttttgcttccgaacaaatctggcacgccgtaaaggagctgaaaactaaaaagccggttattgtctccatgagcgattatgccgcttcaggtggttactacatctcatgtgcggctgatacgattgtggcggaaccaacaacattgaccggttctatcggtattttcggtatggtaccgaatgtaaaagggctgacagacaaaatcggtttgacttacgatgtagtaaaaacaaataaatattcggatttcggaaatatcatgcgtcctttcaatgaaggagaaaaagcattgctgcaaatgacgataaccgaaggatacaatacatttatcggccgttgcgccgaaggacgccacatgactaaagaagctatcgagaagatcgccgaaggtcgtgtgtggaccggtgaagccgccaaggaactgggtctggtggacgagcttggaggtattgacaaagcattggatatcgccgtagccaaagcagatattgaaaattatactgttatctcctatccggcgaaacaggattttttctcctctctgtttgaaactaaaccgacaaattacgtagaagcacaattgctgaaaagcaaattgggcgaatactaccgtcagtttgatctgttgaagaatctgcaagagaaatccatgattcaggcacgcgtcccatttgaactgaatataaaataacctgtactgcatggacgaacactttatcaagatacacaagtggctataccctgtctcatggatatacggagcagtggtagtgatgagaaacaagctctttgactggggaatcttccggtcgaagagtttcgatgttcccgttatttgtgtcggcaaccttgccgtaggaggtacaggcaaaaccccgcacactgaatatctgataaagttacttcatgataaatatcaggtagccgtcctcagccgggggtacaaacgacgtactaaaggctatgtgctcgccactccccaatgtacggcaaaaacaattggagatgaaccttaccagatgtatacaaagttctcttccgtcacactggctgttgacgaaaaacgttgccacggaatagaaaagctactcaaactgaaagagcctttgacagacgttatcctgctcgacgatgccttccagcaccgtcacgtaaaagcgggattaaacattctgctgactgattatcaccgtcttttctgcgatgacaccttacttccggccggacgtttacgcgagcccgtcagcgggaagaaccgggcgcagattgtcattgtcactaaatgtccgcaggatatcaaaccgatcgattataacattatcacgaaacggctgaacctttatccgtatcagcggctattcttctcgtcgttccggtatggtaacttgcaacccgtattttcgaacgagggcggcattgcgttatctttactgactgatactgatatcctgttaatcacaggtattgcctctcctgcccctatcctcgaaagactgggagattgtacgaagcaaatagacttgctttcattcggcgatcaccatgacttcacccataaggatatgcaacagataagggaacgattcaacaagttaaaaggtaaacggcggttgattatcactaccgagaaagacgccacacgcctgatcaatcatccgggcttggatgcggaattaaaaccgttcatctatgctctgcctattgaaatagaaatattacagaaccaacaagataaatttaaccaacatattattgactatgttagagaaaatacaagaaaccgcagcttacctgaaaggaaagatgcacaccagtcctgaaacagccattatccttggcacaggtcttggcagtttggcaaacgaaatcaccgagaagtatgaaataaagtattcggatattcctaacttcccgatatctaccgtcgaaggtcatagcggcaagctgattttcggtaaattgggcaataaggatattatggcaatgcaaggccgttttcactattatgagggttattcaatgaaagaggttactttccccgtacgtgtgatgcgtgaactgggtatcaaaaccttgtttgtatccaatgccagtggcgggacgaatgcagattttgaaatcggtgacctgatgattatcactgaccatatcaactacttccccgaacatccgctacgcggaaagaatatcccttacggtccccgttttccggatatgagtgaagcatatagcaaagaactgatccgcaaggcggacgaaattgccgaagaaaaaggcatcaaggttcagcacggagtttacatcggtacacaaggccctactttcgaaactccggctgaatataaattattccatattctaggtgccgatgccgtaggtatgtctaccgttcccgaagtgattgttgccaatcattgcggaattaaggtattcggtatttctgttatcacagatttaggagtagagggaaagatcgtggaagtaacgcacgaagaagtccagaaagcagccgatgccgcccaaccgaaaatgacaactatcatgcgtgaacttatcaaccgtgcctaaacattaaaatcgatttatgagaactgaaatagctactcttggtgagttcggtctgattgaccacctcaccgagggaattaaattagaaaacgaatccagtaaatacggagtaggtgacgacgctgctgtcctctcttacccttcagagaagcaagtattggtgactaccgacttactaatggagggtgtacatttcgacctgacttatgtccccttgaaacatctgggatacaaagctgccgtagtcaacttttccgacatttatgccatgaacggtactccccggcagatcacggtttctatcgccctttccaaacggttcagcgtagaggacatggatgatctttatgccggtatccgtctggcctgccaacaatataatgttgatatcgtaggaggtgatacgacttcttcccttacaggacttgctatcagcattacttgtatcggcgacgcagacaaagataaagtggtctaccgcaatggagccaaagaaaccgacctgatttgtgtcagcggggatctaggtgccgcctatatggggctacaacttcttgaacgtgaaaaggttgtactgaaaggcgaaaaagatgtccaaccggatttctccggcaaggagtatctactggaacgccaacttaagccggaagcccgtaaagatatcattgagaaacttgctgccgccaatatcatcccgacttcaatgatggacatctccgatggcttatcatccgaattaatgcatatctgcaaacagagtaataccggctgtcgcatatacgaggagcacatccccattgattaccagactgctgtcatggccgaagagtttaacatgaacctaacaacttgtgccatgaacggaggcgaagactacgagcttcttttcaccgtacctatcgccgaccacgaaaaagtttcgcaaatggagggtatccgcctcatcggacatatcaccaaaccagaacttggctgtgccttgataacccgtgacggacaagagttcgaactgaaagcccaaggttggaatccgctaaaggaggataaatagaatattccggttaacagcaaaaatattttcaattcatataacactgataataagcaaactaactttttatcagtgttttttattaccggaagccttgcagattccaaaagtttcactacctttgcaaccgcaatcaagcaaggtgccatagctcagttggtagagcaaaggactgaaaatccttgtgtccccggttcgattcctggtggcaccactttttaagaaggcaaaacgatgtaaatccctgaatttcaaagaagttcggggattttccttttccaagaa

SEQ ID NO: 2996 - DNA, 11141 bp, Unknown
  gut microbiota DNA sequence
cgcctcattccgacaaggtaaagggtagctttctggaatacagcaagttaccctttattatttttaggctgtcgggacgtaaccggaacagccggactgaaatctatcaacctattatatcatgaagaacagattctacattttgacggcaacagcactctctttgctgtgtttcagttgcacaaagactcaagtggctcattctgagaatgagaagacaatcactccgcctatcatgggttggagttcctggaatgctttccgagtagatattagtgaagacattattaaacatcaggccgaccttatggtagaaaaaggtttgaaggatgcgggctaccactatatcaacgtagacgatggcttcttcggcaaacgtgacgacaacggaatcatgttcaccaacgagaaacgtttcccgaacggaatgaaaccggttgccgaccacatacacagtctcggcatgaaagcgggaatctatacggatgcaggcaataacacttgtggttctatctgggacaacgaccttgcaggagtaggcgcaggtatctatgggcacgaacctcaagacgcccagctatactttggcgactggggcttcgactttatcaaaatagactattgtggaggcgatgtcctcggactggacgaggaagaacgttatacttctatccgcaacagcattgacaaagtaaacaaaaacgtttccgtcaacatctgccgctgggctttccccggtacctgggcaaaagatgtggcaacttcctggcgcatcagtggagatatcaatgcacattggggatcactgaaatatgtagtcagaaagaatctttatctatctgcctatgccggaaacggacattacaacgatatggatatgatggtgatcggattccgtgacaatagcaaagtaggcggaaaaggacttactccgacagaagaagaagctcatttcggtttatggtgtatcatgagttcgcctctcctaatcggctgcaatctggaaaacctgccggattcttcactccaattacttacaaacaaggaattgatcgcactcaaccaagacccgttaggattgcaggcgtatgtggcacagcatgaaaatgaaggttatgtactggtgaaagatattgagcaaaaacgcggcaatgtacgtgccgttgcactttacaatccttcggatacgttatgcagcttctctgtaccgtttacctcactcgaatttggtggaaacgtgaaagtacgcgatttagcaagacaaaatgacttgggaaatttctccgatgtatttgaacgaacactgcctcctcacagcgctatgttcctccgcatggaaggagaaacgcgtctggagcctacattatatgaagccgaatgggcatacttacctctattcaatgatttgggtaaaaatcctaaaggcattatttatgctcatgacaaggatgcttccggtaagatgaaaattggattcctcggcggaaaaccggaaaactatgcagaatggcgggaagtatatagtacagacggcggacgctaccagatgactatccaatattcacacggcaaaggacgacagctggaagttgatatcaatggcgtcatcactaagattgccgcattgggggaagatgagaaacatagtcaaatcacaattcccgttgaattgaaggccggttacaatacgatccgaatgggcaatagttataactgggcaccggatatcgactgcttcacattaaccaaagtattataatacagtatataaaaaagagcaaagatgagacaagttcacttttgctcttttttatttcagacatataatcactccattaccgtcacacaagcttttccggttaaaaatacatttaacttggaatcatttttctcaggaatccagatcatacgctcacactctcctttttgaagttgtacatttgcataatgtgcggttaaatattccgtaccgatatggcatttttcaacatttacagaccaattacccatcatacccagattcaaatacagattattaatagtcccactctgaaaatccacattcccgccactcctgatgacttgcaaagctgcaaaatcacaagaatcgaccacaatagaattagacgtatcaatggacaaagaatccttttccaaatgtttgaatcctatgttctgcgaattaatatcatttataatacactccacatcttgcgtcatatccaatcgcatgtctcctatattcattcccataaatttggatttcttaaactcctgcggaagttgatccagcgaatagtccaaaaggattttcaacgtgtcccccataacggtcattttcagatagtcatttaccttcttcgagcaagaaaacagattcttcccttcttttgaaggctgcacttccagaagagaattcgccagccagacgttacgttctggcgtatacagccttgtttgagtcagccagaccacccggcaagccggcacttctttggttatctgctctccttgcaaattcagttgattggaaatgtatggccttcctaaacaaaaaatcataaacattccgcctaccagcacacaaagtccggctacaaaaagtcctattaatatataagttgtacgtttcataatatttattttactgttcttttttacaaaattcccggtacatatccgtgatttcctttataggaatatccagtgtcttgatttggcggaagaagtaatccagttcttccttcaaaaaagtattcttcctcagtgaatgaatcaattctctcgcaccggtggcgacaaaataaccaataccgcgtttattataaataatattctgtgattggagataatcgaatgagcgcatcaccgtattggcgtttacttccacaatagtagcatattctctgacagagggaatacgttcctcctcagcaaactgtcccagaagtatctcatcacagattctatctgcaatctgtaaataaatagctttactttctttaaaattcatagtctaaagtattacatacgttgaatgatctcagactccttgaaacggaaataagcgagcgtccaatttacgaatgcaaaaagcataaagcccacagttaccatgacagtaacctgttccttcgttattgaagaaaaaatataaccataatctttactgcttccgctaaataacatatcccccaccaacattccgaccagtacataaattaaaacaattatcgtaacagaaacaaatgttttaagaaacgaatttttcggccatacagaactgcccaatacaaacaatgactgtacaaagcaatagatagaaagcaccagtgtcaactcatacgttttgtggaacaagtaccaccgtttcccgctacctaccaaatctcccagattgacaggaagtatcacttcttttacgtccggatagataagcgaataaaccaatacccgtgtataatcagccagttcaaaggtaatgaaaaaaacaaccaacaagacaacagttgataccaaccaacgagaaaagaatttctcaaaaggagtggccggtgtcattaatacagacagcctgtttgtcttgcttttcatcttctccattgtcaacgacccgcttaaacaaccaaatccgaatagaaaccaaagaaaagctattaatataaatccccaggcaggatcggcctccatatgacgttcgagaaaacgaaccgaatcgtgagtacgatatgcaaaatatccgttccagaccaacacaacagtcatcaccccataaagcaatacaatacgaagtacattcgacttccaactctccaccatttccttgcggcaaagattcataaaacgaggcaaactaaaaaaagtatcttttatcatcgtcttttatttttgagtttgaaacaatcgggccatctcctcgggagcagccagtgtagcattaaaaagaagttccagatttatgtccgattcttccttctctttattaggaaggatcaggtaattaccctgaatagtaggaatggcaaaaagagctgtctgcgccagttcgcgatcatcactctctacaaagaaaagcttttcgcagatactacttgtcgattcgtccagcaatacacggctttcatccataatcagtacatgatcgagcaccttgtcaatatcacgaacctgatgtgtggaaatcacaatcgtcttatcatccgacatccccgatgcgataaacttacggaactggctttttccgggaatatccaatccgttcgtcggttcgtccatgagcaaaagcgaagtattcgttgccagtgcaaagctcataaatacttttttcttctggcccatagaaagcgaaccgaggttgatatccatatccatttcaaagtaatgaagatacttaatcatatcctccttgctgaaacggggataaaaagaactgttcaactcaatatagctgactaaagatacaggaggcagttcaaattcttcaggcactagaaacatatcctgcaaagttaccggcaaccggcggcgtacatccgtatcgtgaaacattaccttgccacctttaggagtcagcagaccggacatcagataaaggagagtggactttccggcaccattcttccccagcaatccatataccctgcccgattcgaacgcgagagagaagtcgtgcagtacaacacgcttcgatttacgataagtaaatgagaggttttctactgtaatcatagcattttcttttgattatcaattgcattttagtgtattagtataatagtacactgcaaatgtagacaatcttttcaatattccaatagaaaagcaaaaaaaagtgtaaaaaaaggaggagctaagatcactctccactcctcctgtcacgacaaacaactaaaattattcactatttgatgccgtccaatgcccttttagcagtagcattagcggggtctatagccagaattttactccagtactccttggatttctccttattggcttttgcttccgctttcaatgtggggttttcaatagccaacaaataataatatccgagataactgtaacactctaccaacgccgaattgtaatgagggtcgttcttgctttccaacaatgcggctacttcttcatagaaaggtttcgccaatccctgcgttgtttcggggtcgagtgcagaatttgcacgtgctctccaaaaattgcctaaatagctatccggagcggcctctgaaatcacttggaaaacagaatcggcagacatcagtgcctgcttacgttcttcaacattgatagtcaacgaatcgggttgtgtacctgcaccataataaagtctgcccaactggaactgcaaatcaggagtctgcttttccttttcgagagacgagtaatatttatgatatgcaccgatcgcttttttataatcatttttctgctcgtaaacagaggaaatattcttatacaaatccgtctttgtcggatccagttccacagccttctcatattggccgacagcttcatcatatttcttcagttcttccagcaaatgtccgtaatacatatagtccagataagaataatccgccttatcacattcattaaagaaaacgtccgccgccttcaatgcttcttcaaagcgtttcaagtccgtattattatacatcgccaaacggttgaatgccgcatgacgcgggttctttttcaatcccatattagccacttcaagtgacttcgcaaaatcatgattcaagaacaaggcgaatgcatatctcaccagatcctcttcgttagccttcggtcccattgcaaaacgggaataggcatcggccgccttactgaaatcgttcttcaaataataaatctctgctaatttcttgtctatggctgtgttggacggttcaagggtctttaattgattcagcttttctatggccagaccggcatttgctaacttataaatatcagcatatttcagatacgcaggcgtgcaacgcgaatcaaaataaatagcttcctcatacttctgtgaagcaagacctgcatttttctgcttggccgcaatatccccttccagcacggaagccaaagcagacttgccattcgcttttttagcaagagcagcgtacatttgtgcttcggacaacttgtcggcctgcaaataagcttcgccgatagctgtcaaaagttccacattctttttattttttccttttatcagttgttcagcttgctcggcagcttgcgccggatccgactgaatagtttctttcaactttgcaacttccatctgccattcggcatcggacgactgtgcgtagagcgacccaactgctataaacgctccagctaaaaacatttgtactcgtttcatgatagtcttaattttagttattattcgtctttcacatggacaatacgcaccggctgagtagccggaacaagtccagattttaatataatccgctgccctttatcggatgtcataaaagaagtgaatccccaaggcagcccactacgaggatcattcagtaatgcataaatcgatcttgccaacgggtagttaccataatacagataagcctgataaggtttgtagctgttgacaggagtcgccacatcctcggcactcaccgccataaccctgatctcctgccggaaagaaagattagtcgtatcactgcggtctcccaaccagtttactccgatcactcccattgctccgggattttccgccacataatttatcacctgttgatttgtcttcaacgcacttacattgcccgtagacaaaggtttcccgccacaaacagaatctattgcaaaacgcacggtgctagagtttttattatcaaacaccacctgaatatccttcaaacgggaattagggttcaccgctttccactctttcacttttcctgtcaggatacggcgaaaattacgcacacttatcaaagaatccggattcgcacggttcacaatcaatgccagcccgtccgtagccagcttcatctcccgaggatagaacttccggctgtgaaacgaattcatttcttcctcggtcagtgtccgggttgtaatagccaaccggacactgtctttcagaagtaaattaatcgcctcgacctcagtcgtgtaacgagggacaattccggccaatggatacaggctttcaaatacatcaatctcttcctgtattatgggttcgaaactttcatccgccgcaatagctatcactccagacgaataagtatccgtcggtccctccttcgatttagagcggcaagcacttaataccgccaacaaaacgattcctatcagccaaaattgtctcttcatcatcatattattgtaacctgaacattaccggaacagtaaattttacgcgcaccgcttttccattctgcttacccgggatccacttcggcatactttttaccacacgtaccgcttctttatccagataagggtctaccccacgagccacacgcacatccgtgatcgaaccgtcgcgttctactacaaactgtataatcacgcgtccctgtgttccattctcctgtgcaatagtcggatacttgatattcttacccaaataagacatcagttcctgttgtccacccgggaaagtcggcatttgctctaccatatcaaacaccttttcgggttccggctcagcctgtgtcaccacttgtttcaagtcggcgatatccttgccgttggcttcgtcattaccttttacatcggcaatggaaatagccaccttggtagaagtcaactcttcctgactcttgatttcattatcctcgtgcacttcctcatctttcttgatgacgggagcagtaaacttgatggagcttttcaatgcaggaggtggaggcgcaacgggttccacccgtttcatctcttcctgtttgatttccggttctgccaatttcgacagagtagtgacctccgtcatcacttccttctgcttcggggttgccaacttcaccagcgtaggaatcgtaaatccgattaatgctatgaccagcactgccaacatcgcgagattatggcgcttagtcgagttagcacgcatcttgtatgcaccgtacgcttgattcttgccttcaaaaatcagttgacaccattcctgagaagttaaatctatttttgccattttacttttcttttttaggtgttacatcatttatcggctatattctgtgacagctctcccttagaatcaaaattcttaatcaagaatcgatccgcttcggcaatgtccgttatcacatatttaccaatattacatatctgcatttcgtccagtgcatcaatcagattcatataagaagcatcgtccgtcgccttgataatcacagtcggcgtatcttttccactctttatttcggaaacctgtttcttatattcttcatccgatatcttaagatcaagtttctgctgtttcaaagctctcactttattgacagcagttgcattcttttgaagaagtatgctacgcaacccatccgggccataagtagtctccttcaatgaggtataatccttatagttaggttctccctcataataatagagcttattgtccggccccagcagcaatgtgattgcctgcgaagcctttaccatactcttctgttcttcagttatattcttatcgttactcggcatgcttatctccatcgtctgaggtttgctcaacgtggtacaaagcataaagaaagtaatcagcaacatattcatgtccaccatcggagtaaagtctacccgtacagcaaatttcttctgcttgctctttccattttttccgccgctctcttgtacttcagcactcattgtttttcctcccttttaatcttcagattccactttgagcgaagtaatcagattataccgattctccctcaagtcctgaagtgagttcataacgttctttatcaccgagtatggagttgaagcatcagctttgatagcaattcgcaggtcagcgttggcagcacgtgcgttacgtacccatgacttgaactggttatcgacgctatcgcatggaattccctcattcttcagaatcttgtctcgttgttcttcgggaagatccaggaatttctgcatacttctaataggtactccgaaagtagaagacagaacaaaccgcttctcctgctcaggagtaaacttaataccatactcatcacccatgctctccaaaacagcctgcatatcctgctgtttgtcgaggctcataaatattttcccatccggatctaccagaatctgaagcacatttgtctccggaatcttaatttccgatacggaagccggagtgttgacctgcaccggttctttcttcacaaatgttgaagtcaacataaagaaagtcagcaacaatacggtcacgtcactcatagcagtcatatctatgaacgtacttttctttttaatttgcgctctacccatgattaatagattttaaagggtccgcagaattaatgagtagctgcaaaagtctgcacaatagagaatccgacttcgtcgagcccgtaagtcaatttgtcaattttgttagtgaagtagttgtaagaaataacagccaacgcaccagtcaagataccgaaagccgtgttaatcaaagcttcggaaataccttgtgacaaagccatagagtcggcaccaccacctgcagacaatgcggcaaatgaacggatcataccgattacagtaccgagcaatcccatcaatgttcccaaagtagtgatagtagcaataatcggaagattctgttgcatcatcggcatttccagcgcggtagcttcttccagttctttttgaatagccaacagcttttgctccttaggtaaagatgtgtttttttccatttcctcatacttgcgtagagtggaagttacaacattggcaacagaaccacgttgtttgtcacaaatttcctgtgcttttttgatatcaccggcagccaaggcagctttgatgttagcaacgaatttagccaaggaaccttttccgaaagcggaacgaagagcaaaataacgttcgatactcaaagcgagcacggttaacaacagtgtctgaataacaggcacgataataccacctttgtaaatagtacccaagaagtttccaggcaacggatgattgttaggatcattgttcataaagttggacggatttcctaataggaagtgataaatacaaactgctataataaaacagcagatgattacgataccggcattttttatacctacaatctgagattttttagtagtttccataataagtttttttgttaagatattaattttagttatttagaaaatttcaaaagattagatacactgcgctacagaccctgcgactttttgagcacaaaaaatcacacagttcatacagagtacgaaaagtaaattaatacggagaaaaagtgagaatactaaataaggatacgtctcaaagcgaatacatagtaatcgctggagataatggagtaatgtggatccttatccgaataataagatttactttgatctaatactaatgagttttctctcaacaaagaaaacttgtgcatcacgtcctttaaagagtcatttacttcaatgattctacgtagacgataattattagatgatgtttcggaaactgatttaaagcctaattctacatcggaaatagtcaatgactgagaagacttgtcgaagcctacagcgcggctatttaaagaagaattggactttatatcggaagaggattcagacaactggcaagagctttcgcacttagaaacacatgaagcgaaatccatagcatttccaccgatgctataagatagcattagcagaatcgtggctaatatgaatttcagagaaactttcatggtatttctttttagttgtttatactagatctctttaatttcgcgacaaatgtagcaataaaaaagtatcagtttgtcgtcgttcacatcatttaagcttaaaagtttaactctattataaaaacaagctataatgtgttttgtttaatcagttatcagatttatatgttaaaagaagtttcatagtaatcatcctgcaaagtttataaacagacgaagcccctccggtatttctactgaaggggcttca

SEQ ID NO: 2997 - DNA, 194 bp, Unknown
  gut microbiota DNA sequence
acaagaaaagatagaaccgtcaatacaatctgttatatatgttcatatatatgtaatagatactaggtattagaatgaagtcaataaattgtacggcatcctgaacagagctataaccggcgcatgccgattaaaaaatacttttacaatgaagagtttgatcctggctcaggatgaacgctagctacaggctt

SEQ ID NO: 2998 - DNA, 7852 bp, Unknown
  gut microbiota DNA sequence
cttcatccgcaggttgaatgcatcctttagttgttgggtagttggcatggtttcctgtacctcaaactccttgaacacattttgaatttcggcatagtatttcagcagatcggcattgatttcagatgcactttgctttaatttgttggtacacccgttctttactcgctgcttgtcggaatcccatttggctacatcgatgcggtaacccgttgtaaactcaatgcgctggcttgcgtatatgacgcgcatacggatggggacattctccacaattggcacaccgttctttttccggctttccaatgcaaaaatgatgtttcgtttgatattcataattgggtgcgtttgaaattctacacccaaatatacacccaatatttggaatagcaaaagatattcagaaagatttagatttactatgtattccaaattgtgtgtgattatcagtaatttgcaattttatgatatttcttgaatgtataggttcgagagcctgtctctccgcaaaatatttgtaagtaaccaaaaacatccggttttacatttagaaatgtaaaaccggatgtttttggtttatacatgtgtccttgaaatggacgttttgtggaaatcagtgttctttaacaaataattttggaacattattcgctctaaatatttgttagtttcaaaaacttcctctacttttgcgctccgaaagaaggagaggtgctcgagtggttgaagaggcacgcctggaaagcgtgtatactcctaaagggtatcacgagttcgaatctcgttctctccgcacattgtttgtaaaaatgtttagttttttgtagaaacgactactttggttaaacaaagtagccgttttttagtatcgtttccgggctgttattccaagtcttcaataatcttcttcacgtccacaggttgtaggcgtccatacactttttcaccgatcatcactaccggcgccagtccgcaggcacccacacagcgcaggcagtccaatgagaattttccgtccggagttgtttcaccgacttcgatacccagcactcgtttgaattcttccagcaacttttcggaaccgcgtacatagcaggctgtccccatgcagacggagataggatgctttcctttgggagtcatggtaaagaaagtgtagaatgtcactactccatacactttcgatacggggattcctagtttggaagcgatgatacgttgtatttcttccggcaggtaaccttggagatgttgtgcttcatgcagaatgttgattagttcgcccggattatttccgtgcttgtcgcaaatcgttttgatttgttcagctacgtcacaggctagttttatatctgacataatacttttcgtttacagttaatcaatcgatttgttgaaataatgggtatgcaataatgtttctgatttctcacccagcggtttgccgagatactcttcatacaaggtcttgatgtatgggttctcgtgcgatttgcgcagtggcttgttggcgtcttcgcggtagagtgcgttggcgcgtgcatacaatacttccgagttgccgtgatgtaatggctgtccgccgcctccgatgcaacctccggggcaagccataatttcgattacatgatattcattatgcccgtttcgtatgtcctccagtagatgacgggcgttgcctagtccgtgtgcgatgcctattttaagttcaaatccgttgagattgatagtagcacgacgtactccactcaatccgcgtacttgctcgaaatttacgtttttcagagattctccggtatatatttcgtaaacggagcggagggcagcttccataacaccgcccgtagtgccgaagataacgccggcaccagtggattctcccatggggttatcgaacgggctatccaacaccagcggaaaacctatattagcccgtttgataagtcgggcgagctcgcgggtggagatagagtagtccacatcggggattccgtttaccttaaactcgtcgcgggcacattcatatttctttgccaggcagggcatgatagaaaccactaccagcttttctttggggattcccattttctctgcccagtatgatttggcgatagaaccgaacatctgctgcggggaacgggccgtagatgggatgtccaacaaatctggaaagtgatgttcgaagaagtttacccatgctggacaacaggaagtcagaatgggtagccggacggatttgtctccgttgagatagcacgtcagtcggttcagaatttcggagccttcttccataatggtgaggtcggcagcgaaatcagtatcgaacacatagtcgaatcccaattcgcgcagggcatagaccattttcccggtgaccactgtgccgggagggaaaccgaattcttctcccagagcagcacgcacggcgggagccgtttgtacaatcaccactttgtccggattggccagatcgtcgagaaggcggttggtataatcgcgttcggtcaatgcgcctaccgggcagacggcgacacattgtccgcaataggtacattcgctttccgtcatcattctgtcgaaagcgggggctattgtcgtgttaaatccgcggcgaatagcgctgagtgcaccgaccgtctgtacgtcgttacagacactttcgcaacgacggcagaaaatacatttatccatattgcggacaatagaagcggtgatttctcgtttgcgaggagaaagttcaccgccattgaaaggcatttcacggatgttgaagcgtaacgccagtgtctgaagctcgcagttgccgcatttgggacaagtgagacaatcgttgggatggtcggagagaataagctcggctaccactttgcgggcgttcatcacacgcagtgtgctggttttcactaccatgccttccgtgcagcgggtggcacaagcgggagccagattacggcggcctatgacttcgaccacacagatgcggcaggaagcgggattattttttatacaggttcctttcaggtcgatgtgacacagcgtaggtatgttgataccgattttagtagcggcttcaagaatggtacttccttcggggacggtgataaaatggccgtctatctggagggttatttgtttatcttccatagcaatagattttagcaaactagaatagctttgaatttgcagcgtgccatgcacataccgcatttgatacatttgtccgggttgatgacgtgcggtttgcgtactaaaccactgattgcatccgccggacagttcttggcacataagtggcagccgatgcaatgttccggattgatcgtgtaggtcagcagagacttgcattgtttggcacggcaggtcttgtctctgacgtgttccagatattcatcatagaagttgtccagtgtcgacaaaaccgggttgggggaggtttgtcctaacccacagagggcagtatcttttatcacctgtcccagtgtggcaagggtatccaggtctttttccgtacctcgtccttctgttattttgtttagcagttccagtaatcgtttgttgccgatacggcagggagtacatttaccgcaggattcttctacagtgaagtccagatagaagcgggagacggacaccatgcagtcgtcttcgtccatgacaatcattcctccggaacccatcatggaaccggcggccagcaggttatcgaaatcaatcggggtatccagatgtttttccgtcaggcagccacccgatggacctcccgtctgtacagctttgaatttctttccccctttgatacctccgccgatttcatagattacttctcggagtgtagttcccataggtacttcgatcaggccgacattgttaatctttcctgcgagggcgaacactttggttcctttggaacgttctgttccgattgcggcaaaccactcggcacctttggtcagaataatgggaatgttggcaagcgtttctacattatttacgttggtgggtttacccagataaccggattcggcggggaagggcggttttaaagtcggttcgcctcgtttcccttccatagagtgaatcagggcggtttcttcaccgcagacaaatgcgcctgccccataacgtatttctatatcgaagctgaattctgttcctaaaatatgatctcccaacaaaccgtactggcgtgcctggttgatagctattctcagccggttgatagccaacgggtattcggcgcggatgtaaactaagcctttggaagaactgatagagtaaccgcagacgcacatcgcttctacgatagagtgcgggtctccttccataatagaacggtccatgaatgcgccggggtctccttcatcggcattacagacaacgtatttaatgtccgatttctgtttgtgggcaaactcccatttcagtcctgtcgggaaacctcctccgcctcgtccgcggagtccggaacgtttgatgatgtcgattacatctagtggttgtttgttgagaagacaatcggctaatgcgaaataacctttgcgggcgatgtattcttcgatattttcgggatcgataaaaccgcagttgcgcaaggcgatacggagttgcttccggtagaagtccatgtgtttggagtcgctgacggtatgttccgttttagggtctacatagagcagtcttttgattctccgtcctccgatgatatgctcgttgatgatttcttccgcatcttcgggagtgacttgggtgtaaaaagtattgtcgggaatgattttcacgataggacctttctcgcaaaagccgaaacaacctacggtgatgacttccactttaccggttattccgttcttttcgatagctttcagaagattgtccgtaataccttgactggaagatgctttacaacctgtacctccgcagataagtatctgaagatgctgtgcaccggaggatagtccgtagcatttttcggaaactttctcattgctttcttcgcgcaataataagttgtgttccgctttcttcctgattgtagccaaatcatggatagatagaattttcataagtattagaattgttagtcggttttttgcaaatataagtctttgtttggaataaaagcgtggattgaggcaaataaaaagtggacttttccgatgtggttaggtaaataaatctctatcttcgtatttaataggtagtaaacctaaaaaagatatttaaagtatgagacaatttttactgggactctattttttatgctttctgaatgttgcgtcgggacaggaaatcccgttgccggagaatatgccgcaagaacatccgcgtgtgctgactacgccggagggaaagcgggaaacatggaatctgattaaaaccgaagcgtgggcggaagatgtattcaataaactgaaggagcggacggaagcatatacccggttgacggacgttcaaccgacgtggttgttatcccgtctggctatgtttatttccgtgaaccggaaagtcgggcggattagactcgtatgatgagtattgtaacaacaggccccgatacaggatattatgccgatgtcttccgcagccggaaagaacggggaggggataaaatgcatgattacttctatcataacctcggacagtcaatgacattaaccgcagtcgacggcacggatatgaatttgcaaccaacagaagaactggcttttgcgggagcggatctttatgcttactcttatttgtatgataacgtgaattctaaggcttgcataagtcttagagttcacgttaatattacaaggaaaagaaatgctctgcaaagaacgttcagttctcgcagagcatttttactggttagggttaggttcttttattattgtttcaccttgatgatgtcatagttcagatcgctgacagcttcctgtaagctatcgtttaccagacgaagggtggtgtcgttcacaattacaaaatacatgggagcttcaccgtttttcggagttaacttcacagccgtaacaggttttttgttcactaccttgtgtacggtttgctgttttccgtttgaggtaaacgtcttgttttggccctgaccttcagcatcaaggtaagtcatatccagtgtatacgtagtatctacgccgtcggttgcagcgttcagggtcagtacatagtcaatacccggaccgtctgcagcaggaagagtaccttcgtaaacttctgtcagttcggtaatcggagtcatggcaatggccagactgtctgcttctgcctctgcggttttgttggcttttgattggcaagatgccaaagcagctacgacggctgctaacataattacttttttcatcgttaagtgctttaagttaatataaatatagtgagctatcgctcgtttttgtcataaatctattcctcctcgtcccgtttgatgaccagcagtttgtctactcgtccgcggtccatgtccactacttcgaattgcagattcttgtaagtgaagatgtctccggctttcgggatacggcctatcaagaacattgccagtccgcctagcgtggtgaagtcttccgattccaggtcttcataggataagattcccatttcctccatgaagtcgtcgatgttcattgaagcttccaccaacatcgaaccgtcctgccttgtgacgatttcttcttcttccgtttcgtcctcttcgaggatgtctccaaagatactttcggtcaggtcgtgcagtgtgataataccttctgtgctaccatactcgttaacaacaactccgaacttgtttttgttcttcttaaatagctctaaaactttatttgcatacaaactttccggaataaagagaggcggacgggctatttcacgcaggttgaactccttctgattgcccattgtcaggataatatctttgacggacaccacaccgattatctcatctttccgttcgtccaccaacagatacttgctgtaatgttcttcttcgatagtcttcatcaccttctcccgcgtatcgtcaggatgaagtatcacaacatctctgcggtgcgtcatcaattcattggcacgtttgtccgagaagcggaatacatcgcgtatcatttccgtctcttccttgtcgatcaccccttgttccgaactttggtgcagaatcattttgatttcctcctgtgtcatggggcgttcttcgcttttcagtccgatcagtttattcaacaggcgggtggagatactgagtaaccatacgaaaggataagagatttttgtcagcagaatcattatcgggctgaataagattgcatatctttccggattgctgagagctatggacttaggtaccagttccccgatgataagagaaagataagtgatcactgccacggtagtaatcatagccagattgcgcgcataggcttccgctcccggaataagagagaacagaggaacaaggtcgtcggcaatggcaactccaccataagcaccggacacaataccgataagtgtaataccgatttggatagtagataaaaacttttccggttcttctaattgctttaatactcctcgggcagatttgttacctttggctacaagagtttcaagacgtgctttactggaagataccagcgcgatttcgtacatggcaaaaatgccattcagtacgagtaagaaaagtataataagaaattccataaatggattaaaatggttatagcctcgaaattacatgaaatcacgacactatgcaaatctatgtaatatattaatgaaaatttaataatcgtgttgtctttttgggtattggaagtgagaagaaggtgtgtcgtaatacacgatgcgccttctt

SEQ ID NO: 2999 - DNA, 18050 bp, Unknown
  gut microbiota DNA sequence
ccacctccccctacggggactcctccttcccgaaggaggagaatggagaatactatcgactatcaaattattattgaatactatcgactatcaaattattgttgaatactatcgactatcaaattattattttctcaattaattttaccaccaaatttgaagaagaatcaaaaaatcccatagttgccccctgtatgaaaaaagaactctaataatccacccctataatgaaacaaaactctaacaataaacgggaacgaaaaaaaataaacgggaagaacaaaaaaatagaccgaccgtaaagtccgcctatttcatttttcaagtgcgccttgtgataccctatttctactaaacggtaccggtcccgcagttctaccctatttattctttttaagtatctattctaccattgcaagtcgggtaagtatttacttagggtggtacggagaatactcaaagtgatcggtttcaccaacacttcggtagctcccgccttcatcgcgttttccttgtcggagctgaaagcataagctgtctgcatgataatggggatttccgtattcgactcacgaataatcttcgtagcctccagcccgttcatcaacggcattttgatatccattagtatggcactcgctctatattggtgttcttgaaacaactgcaccatttcttcgccgttcttcgcccattcgatatcacattttttacctatgatagctttaatcaatttaaagttgctgtcgtcgtcctcagccactaaaatgaggggtctcagtacactcgtttgttcactttccatattgttattatattgctttttttatttgtcatttttggttaatatctcttttcagcccgcaaggtataaaaaatattcatatatttcgctatctttgcgcctcaaaataaaagaataatatgatttctgttgacggactggccgtggaatttggcggcacgaccttatttagtgatatttctttcgttattaatgaaaaagaccgtatcgcccttatgggaaaaaacggtgcgggtaagagtacgctgctcaaaattctggcaggtgtacggcaaccgacgcgcggcaaggtttccgcacccaaagactgcgttgtggcctacctgccccaacatttgatgacggaagacggacggacagtgtttgacgaaacggcgcaggcctttgctcacctgcacgaaatggaggcgcagatcgaccgtctgaataaagagctggaaacgcggacggactacgaaagcgacagttatatggctctcattgaggaggtttccgccttaagcgagaagttctattcgatcgatgccaccaactacgaggaagatgtggaaaagtcgctgctcggcctcgggttcacccgcgaggatttccaacggcagacgagcgatttcagcggcggctggcggatgcgcatcgagctggcaaagctgctgttgcagaaaccggacgtgctcctgctcgacgagccgacgaaccacctcgacatcgaatctatccaatggctcgaagattttctgatcaacaacggcaaagcggtgattgtcatcagccacgaccgcaagtttgtggacaacatcaccacccgcactattgaagtgacaatgggacgtatctacgattataaagtgaattactcccaatatctgaccttgcgcaaagaacgccgcgaacagcaacagaaggcttatgacgagcagcagaaatttatcgctgagacgaaagagttcatcgaacgcttcaaaggaacgtattcgaagacgttgcaagtgcagagccgtgtcaagatgctggaaaagctggaactgctggaggtagatgaggaagatacttccgctttgcggttgaaatttccgccttcgccccgttcgggaagttatccggtgattatggaaggtgtcggcaaaacgtatggcaatcacgtggtgttccgcaacgcaaacctgacggtggaacgcggggacaaggttgcctttgtcgggaagaacggcgagggtaaatctacgctcgtgaagtgtatcatgaaggaaatcgaacacgaggggacactgacgctgggccataacgtacaaataggatattttgcacaaaaccaggcttcgctcatggacgaaaacctgacggttttccagacgatcgacgatgtggcgaaaggtgagatccggaacaaaatccgtgatttgctgggtgcgtttatgtttggcggaccggaggaatcaatgaagaaggtgaaagtgctttcgggcggggaacggacacgtctggcaatgattaaattgttgctggaaccggtcaatctcctcattctcgatgaacccacgaatcacctcgacatgaaaaccaaagatattctgaaacaggcgctactcgacttcgacggcactctgatcgttgtctcccacgaccgtgacttcctcgacggactggtttcaaaggtgtatgagtttggcaatcagaaagtgacggaacatctttgcggcatctacgagttccttgaaaaaaagaaaatggattcgctgcaagaactggaaaagaaataaaatagccggtagtatacctttattgccggtagtatacctttattgccgatagtatccctttattgccgatagtatccctttattgccggtagtatacctttctctttcttcccgaaggaggagggttcttcttcaaatttagtggtaatttaaccagtcggtagtatttccattcccctccttcgggaaggaggggtggctgaaagccggggtggtaggtagatacacaatgctgataataacagatttatgcattcacctaccacctccccctacgggtactcctccttcccgaaggaggagaatggagataccaccgactggttaaattgccaccaaatttgaagaagaacaaataataaaagatgttatcggcttttaacggagaaaaagtttttgtatctttgtaacgttcaaataatcaagctgaagccgatacatatccaaaagaaaggatgaaaaggaagaaacgatatatagtaacattgctgctttttatcaacattatcatgttgacggcagccgttattcctcatcatcaccaccccaacggagcgatttgcatgaaacaggacttgcccgtagaacagcaatgtcccaaacatcatcatcatccggcaagcgactcatgttgcagcagcgaatgtatgacgcgcttccactctcccattccttccttccacacagatagcggaccggactacgtgttcatcgccaccctgttcacggacggaatcatcgaacatctgctaaaaccacaagagagacgggtcaagaactattacgtctaccgagactcgctgcacgggacgaacatcccccgtaccacctctctccgcgcccctccctattctgttttcgcgtaagaccaacgtgaatgcaaacttgttgcatccgcgtcaccctatctttgtaacgtaaaaacagtaaattttagtaggaaaatatcatttatgaaaaaacttatttttatgggaatcctgggcttattcgctttaggagcctgcaataacaagaatacacaaggtcatgaaggacatggccatagtaccgtcacacacaacaacgatgaacacgaccatgaagcggaaggtcacgaccatgaagcggaaggacatacccatggaacagaaggagaatgcaacggcgatcataaacatgatgcggccgacaatcaccaaggcactgctgccggacacgatgaaactgccgaagccgcccacagcgacgaaatcatcctcccgaaagcgaaagccgatgctgccggagtgaaagtaagcattgtagaacccgcccctttccaacaagtaatcaagaccagcggacaggtattggctgcacaaggcgacgaatccgtcgcggtagccactgtggcaggtgttgtctcattccgcggaaaggtgacggaaggtatgagtgtaggcagcggcactccgctagtgaccatttcctcgcacaacatcgcagacggcgacccggtgcaacgtgcccgcatcgcttacgaagtgtcgaagaaagaatacgaacggatgaaagcgcttgtcaaaaacaaaatcgtatccgacaaggattttgcacaggcagagcagaattacgagaatgcccgcatcagctatgaggcgctcgcaaagaaccattcggcaatcggacagaacattaccgctcctatcgccggctacgtgaaaagtattctggtgaaagaaggggattatgtcacaattggccagccattggtcagcgtgacacagaaccgccgtctgttcctccgtgccgaagtgtcggaaaagtattacccgtatctccgcacaattaattccgccaatttccggacaccatataataataaggtatatgaattgggaacattgaacggccggcttctctcgttcggcaaaacagcgggagacaactctttctatgtccccgtaacttttgaatttgacaacaaaggcgacatcatagccggttcgttcgtagaggtctacctgctttcctcccaactggagaatgtcctttcccttccccgcacggcactgaccgaggaacagggaatctactttgtatatctgcaacttgacgaagagggatacaaaaagcaagaagtgactttaggcgccgacaacggcaaaaatgtgcaaatcctcaccggaataaaaccgggcgaccgcgtagtgacggaaggagcttatcaggttcgtttggcaagcgccagcaacgcaattcccgcacacagccacgaacactaagcggcaaggcgccgcagccggattgctttgcggtgcatctatctcattttttatcactcaattgatgaattatcatgcttaacaaaattatacattactccctgcataacaggttggtcgtactctgcgcggctttcctcctgctcatcgcgggcacctacactgccatgaataccgaagttgacgtcttccccgacctcaacgccccgacggtggttatcatgaccgaagccaacggtatggcagccgaggaagtggaacaactcgttacctttcctgtcgaaacagccgtaaacggtgctaccggtgtacgccgtgtccgttcttcgtccaccaacggcttctccgttgtctgggtggaatttgactggggaacagacatctacctcgcccgccagattgtcagcgagaaactggcggtagtcagtgaatccctccccgtcaacgtgggcaagccgacgctgggcccgcaatcttctatcctgggcgaaatgctgattgtcggtctgaccgccgactcgacctccatgctcgacctccgcacgattgcggactggacgattcgcccgcgcctgctgtccaccggaggggtggcacaggtagccgtgttgggcggagacatcaaagaataccagattcaactggacccggaacggatgcgccactacagcgtttcaatgggtgaaataatggctgtcacccaagacatgaacttaaacgccaacggtggcgtactttacgagttcggaaatgaatatatcgtgcgtggggtactttctaccccgaaggtcgaggagctaggcaaagcagtcgtaaaaactgtaaacactttccccgtcacactggaggacatcgccgacgtgaaaatcggccccaaagctccgaaactgggaaccgcttccgaacgcggcaaacctgccgtactaatgacagtcaccaaacagcctgccactagtaccctcgaactgaccgacaaactggaagcctctctgaaagacctccaaaagaacctgcctgccgacgtgaaagtgtctactgatattttccgccaaagccgtttcatcgaaagttcgatcggcaacgtgaagaagtcgctttttgaaggcggtattttcgtggtgatcgtcctgttcctgttcctggcaaatgtacgtacaacggtgatctcgctggtgacactgcctatctcactgctcgtctccattcttacgctgcactatatgggattgactatcaacacaatgagtctcggtggtatggccattgctatcggttcactggtggacgacgcgatcgtggacgtcgaaaacgtgtacaagcgtctgcgggagaaccggcagaaaccggaggccgaacggctcagtacactggaggtggtattcaacgcctcgaaggaagttcgtatgcctatccttaattcgacgttgattattgtagtcagttttgtccccctgttcttcctgagcggaatggaaggaagaatgttggtcccgctgggcattgcgtttatcgtggcgttgttcgcttcgacggttgttgcgctgacgctgaccccggtactttgctcgtatctgctgggcagtaacaagacgaacaaggaactgaaagagtcattcgtagcccgttggatgaaagggatttacgggaaggcactgacttgggtactggcccacaaacgggtgactttgggaagtacaatcggactgtttgtggtcgctctcggtgtgttcttcactctcggacgcagcttcctgccttctttcaatgagggctcgttcacaatcaacatcagttcgctgccgggcatttcgttggaagaaagcaacaaaatgggacatcgtgccgaggaactgctgctgacaattccagagatacagacggtagcccgcaagacgggacgtgccgaactggacgagcacgcgcttggcgtgaacgtctcggaaatcgaagctccgttcgagctgaaagaccgtccgcgcaacgagctcgttgccgaagtgcgcgagaaactaggaacgatcaccggtgcaaatatagaaatcggtcagcctatcagccaccgaatcgatgccatgttgtccggtacaaaggcaaacatcgccatcaaacttttcggcgatgacttgaacaagatgttctcactcggcaaccggataaaggacgctatcggagatataccgggcattgccgacctcaacgtggagcagcagatcgagcgtccgcagttgaagattcaaccgaaacgggagatgcttgccaagttcgggattaccttgccggaattctcggaatatgtcaacgttgcccttgcaggaaaagtgatctcgcaggtttatgaacagggaaagagcttcgacctcatcgtaaaagtgaaggatgacgcacgggacgaaatggagaaaatccgcaacttaatggtagacaccaacgacggccgcaaagtgcctctgaactatgtggcggaagtggtttcggccatgggaccgaacacgatcaaccgcgaaaacgtgaagcgcaaaatcgtgatttccgccaacgtggcggaccgtgacctccgaagtgtggtaaacgacatccaaaagcgtatcgatacgtctatacagctccccgaaggctatcacatcgaatacggcggacagtttgaaagcgaacaagccgccagccggacattggcgctgacgtcattcatcagcattgttgtcatcttcctgctgctttacaacgagttccgcagcgtgaaggaatccggcgttatcttgttgaacctgccgcttgcactgatcggcggtgttttcgcactggtcatcacgacgggtgaggtcagcattccggcaattatcgggtttatctccctgttcggcattgcgaccagaaacggtatgttgcttatcagccactataaccacctccaaaaagaggaaggactgaacgtatacgacagtgtcatgcaaggctcgctcgaccgtctgaacccgattcttatgacagcgctttcgtcggcactggcactgatcccgctggcgctcggcggcgacttgcccggaaacgaaattcaaagtccaatggccaaagttatcttgggcggacttttaacctctacgttcctgaacggtttcatcgttccgattgtttacctgatgatgcaccgccggcctaccgacgctgcaccggagcaagaatccctcgcgacaccctgctaatcatcagccagacgtaatagaagaaacaaataaaagaaaaagtatgaaacggattatcattataagttcttttgctgccactgcactcttcaccctgacggggggtgtgcaggcacagaacagcatagaacaggtattaaaaaatatagaaacgaacaacaaggagttgcaggcgaacgcccaactgattacctcgcagaaactggaatccaaaacggacaacaacctgcccgatcctaccttgtcctacgctcacctctggggagcaaaggacaaaaacgaaacaatcggcgaactcgtcgtttcgcagagtttcgacttccccagcctgtatgccacgcgcaataaactgaaccggttgaaggcaggggcttacgacagccaggcggacgtattccgtcaggacaaactgttgcaggcgaaagaagtctgtctggacattatcatgctccgccagcagaaacaaattctcgaagaaaggctccgcaacgcggaagtactcgctgaaatgtatgccaaacgtctccaaaccggagacgccaacgccctcgagacgaacaaaatcaatctggaattactgaacgtccgcacagaagcctcactcaacgaaacggcgctccgcaacaaaatgcaggaactgaatacgctgaacggcaatatcccggtggtctttgaagaaagccggtatcccctcactccttttccctccgattaccagatcttgaaatcggaagtgctctctgccgaccgtaccctcatggcgctcggcaacgaaagcctcgttgcccggaaacaaatagcggtcaacaaatcgcagtggttgccgaaactggaactgggatatcgccggaacacagaaacgggcacacctttcaacggggtagtagtcggcttctctttccctcttttcgaaaaccggaacaaggtgaagattgcgaaagcacaagctttgaacatcgacctgcaaaaagaaaatgccacgttgcaagttgaatccgaattgtcacagctctatcgtgaagccaaagcactgcataactccatggaagaatataaaaagacgttccggtcgcaacaggacttggcattgctgaaacaggcactcaccggaggacaaatcagcatgatagagtatttcgtagaagtatctgtcatctaccagagccaccagaactatctgcaactcgaaaaccaatatcagaaagcaatggcacggatttacaaaagtaagttgtagaccttatccggcctttacaacacgcggatcttttccggcaaatacccgctacggatacgccattcctgcggataaagattattagcccggttgccgatattcttcacaaaacccagaggaatattgcgataagtgagcaaaacatacccgcgaggggctgtcgccggcaaagtgacagcctctttccgcaaataagcgattgcttgttcataactcaccgcctcggttgcaaaaacatcctgccgcagaagaagggcactcatggccaaggcatgggcgggaatcagatcttttcctttcacctcgccaaccgaaacgcctgcctgcaccacccgcaaatgttgtttcatggcagccagttcggctacgcattgctgaggaaacgcgtgtatttcagcaccttctgccgacaagacgtactttccggcacactcatcattcagccattttccggccgttgccatgttttccttggagacaggcgaagaagaggctcccccacctttcttacctttttttccggcggattttcctttcggaaacgaataataatcggcataactgtcctcccctgccgtttccggtttgcggagtacggacaagaaaaagccttcacccttcgtcttatgcgggaaaaagtgatatacggaagccgattcgccgcacagcagatttcctgtgatattccactcttcccgaatatctaccgccaacgattccgccccaaattcctgctgaatccaacggacattttcttcgtcctctttcgtgttatatgtacaggtactgtatataagaatgcctccgggtttcagactcggccaaacgtccgcaataatcctccgttgccgttgccagcaaatttccacattctccggactccattcttcaacggccaccgaatctttacggaacatcccttcgccggagcaaggcacatctgtcagaataacgtcaaagaaagaaggcaaagccgaaaaatcagccgggtcgttattcgtaaccaccacatccggatgtccccatttcgtcaggttctccgccaaaatctgcgaccggttccggattacctcgttggcaaccagcaaactaccttcgggcaacacactacgagcatgggtcgatttccctcccggagcggcacaaaggtcgagcatcaccaccggcttcgtgacatgctgccggagcacctgttccacgaacatcgaagaagcctcctgcacataataacaccctgcatgaaacaacgggtcgaatgtaaaagtgagccgttcgtcgaggtagattccctccgaagaccagggaggttgaaccgatagagcattttccactttcagccgatgaactttcaaccgattcagtctaatgctcacaggaggttcctgctgcaaggcggaaaccagtttttcgtattcttcgacgcccaacaaagcgcgggtatattctgtaaaagaagcgggtaaattcattttcatttattaatttgcgcaaatatcaaaaatatttcgtctctttgcaactttctcggatactaactgcgtctaacagacaaagaaacaaattaaaaaataacaaatatgaaacaaattctaatagcattattgctcgcattcaccacttcgacagtaattaatgcacaaaaacagagtagcattgagaaggattctaccgaaaatgtgaaagtgaccctttcgaaaaagacagacaccaaggcggatgaatccaacacaacagtgacggtgatcggcgtagatacaacggacatggatacgacggcgggcaaggatgacaacgaccttcccttcggcaacctcagcgacacgatcagcggagggatcctgatctctattatcgcaatcgtcgccgtcttcggactgcccgtatttatcttgtttgtaatctttttcttccgctacaagaaccggaaagcccgttaccgccttgccgaacaggccattgcagccggacaaccgctgccggaaaactttatccgcgaaaaccggccggccgaccaacgctcacaaggcatcaaaaacacctttacagggatcggacttttcatcttcctctgggcgatcaccggagagttcggaatcggagcaatcggactgcttatcatgtttatgggcatcggccaatggataataggcagcaaacaacagaaaacagatgatgttgatcctttccggatgaacgtttcccggaaaagagacatcgacacagccgccccttcggcaacgcagcaggaagaaagaaacggagaaaagagcgacgaaaataaatgagccaactcaacgatatatcgctagtcgcacaggtcgtagtgttcaaaaacactagggccttcgaccagttagtgaagaaataccagtcgcccgtgcggcggttctttctcaacctgacttgcggcgacagcgaattgagtgacgatttggcgcaggatacattcatcaaggcatataccaatctctcttctttccacaacctgtcgagtttctcaacgtggctctaccgcattgcctataatgttttttatgattatattcgcagccggaaagaaatggccggcttggacacaacggaaatagatgccattaacagtaccgaacaagaaaacgtcgggcagaaaatggatgtctaccagtcgctcaaaacgctaaaagatgtggaacgaacctgcatcaccttgttttatatggaagatttaagcattgacaagatcgcaggtattaccggaataccggcaggaacggtgaaaagccacctgtcgcgtggaaaagataaattagcaacgtacttaaaacaaaatggttatgacagaaatagacaatgataaactcttgcgcgacttctttaccgaaaacaggcaggagatagcggacaggggattcagccgccgtgtcatgcaccacctacccgaccgcagcaatcggctggcacgcatttggaacgccttcgtcatggctgtgggagccgtacttttcgtctccttaggtggaccggaagctgcatggggaacgattcgggaggtattcatcggcatgattaatcatggaacaacaagtctcgacccgaaatcaatcattatcgcaagtgtagtgctactgtttatggctgcaagaaaagtagcttcattggcataggcggtacggaaatgttaagataatactatcgactgtttaatcagtccccattattttcctcttaatttttcccttactaataaagctatccgagtgttaaacaataataaatctaccctttgtccccgattagcccaaacatagatgttgtatctttgttgctctgtaaactaaaatagagagaaaagttttgaaattacgtatattcattttattcctgttcctgcctttattgcgtgcccaggcaagcgtcatcgacagtttgatgacccacccccgggattctatcggactcacgagtgattcccttgtactgcattttttagaggaatcgggtatacctatctccaataataataaagtgaaactgctgaaaagcgggcgggaaaagtttatcgacttgtttgaagcaatccgtcaggccaagcaccacgtgcatctggaatatttcaacttccgaaacgactctatcgccaacgccttattcgcccttctcgccgaaaaagtaaaagaaggtgtcgaagtgcgggcaatgttcgacgctttcggcaactggtcgaacaaccagccgctcaaaaaaagacacctcaagaaaatccgtgaacaagggattgaaatcgtcaagttcgacccgttcactttcccttatatcaaccacgccgcccaccgcgaccaccggaagattgtcgtaatcgacggagaaatagcttataccggcggcatgaacatcgccgactattacatcaatggactacccaaaatcggtacatggcgcgatatgcacatgcgcattgaaggcgatgcggtgaacgatttacaggagattttccttacaatctggaacaaggaaaccaagcagaacatcggtggggaaatttatttcccccaacatgaagacagtacaaatatcgttgtcgctatcgtagaccgtactccgaagaaaaacagccgtatgctaagccatgcatacgccatgtcgatctactcggcacaaaaaaacgtacatatcgtcaatccttatttcgtgccgacttcttctatcaaaaaagcgctcaaccggacaatcgaccggggagtgaacgtaacaattatggtttcgtccgcctccgacatccctttcacgccggatgccgcactttacaagttgcataagttgatgaaacggggggcaacagtttatatgtacaacggaggatttcaccattctaaaataatgatgatcgacgacttgttctgcaccgtcggcaccgccaacctgaacagccgcagcctccgttacgactacgagacgaacgctttcatcttcgacaagaagacaacggcggaactgaacaccatgttccgcaacgacatcgagcactgcacacagttgacaccggaattttggaaaaagcgctcaccatggaagaagttcgtcggctggtttgctaatttattcacgccatttttgtaattttgcacaaagaggatgactaaaaagccaatagtatcccaaactctcctccttcccgaaagaggggattggagaggctaccgacttttaagcacagccttgcaaatgcattaacgctttgataatttactcattatgaaacaatatctcgatttactgaaccgtgtgttgactgaaggcacggagaaaagcgaccgcaccggtaccggaacgatcagcgtgttcggtcaccaaatgcgcttcaacctcgacgacggctttccctgtctcaccaccaagaaattacatctgaaatcaatcatatatgaattgctgtggttcctccaaggagacacgaacgtgaaatacctgcaagaacacggcgtccgcatctggaacgaatgggcggacgaaaacggtgatctgggacatatctacggctaccaatggcgttcgtggcccgactacaacggcggattcatcgaccagatcagcgaagcgatagagacgatcaaacaaaatccggactcacgccggattattgtcagcgcatggaacgtagcggatttgaataatatgaacctccctccctgtcatgcttttttccagttctacgtagcggacggacgactgagcctccaactttaccaacgcagcgccgacattttcctcggcgtgcctttcaacattgcttcatacgcactgttgctgcaaatggtagcgcaggtgacgggattgaaggccggagacttcgttcatacattcggtgacgcacatatctatctgaatcatctggaacaggtaaaactgcaactgtcccgcgaaccgcgtccgttgccgcagatgaaaatcaacccggatgtgaaaagtatcttcgacttcaaattcgaggatttcgaactggtgaattatgacccgcatccgcacatcgcaggtgtggtagcagtctgaccccggcacgatgcagacggaagaatatcaaacgaacttaatctgtatgagtaaaatatctattatagcggccgtagaccgccgcatggctatcggattcgagaacaaactccttttctggttgcccaacgacttgaaacgtttcaaagcactgaccacgggaaatacgattgttatgggaagaaaaactttcgaatcactccccaaaggtgccctgcccaaccgcaggaatgtcgttctgtcttcaaatccgactgcggaatgtccgggagcggaagtattcccttcactcgaagcggctctgcaaagttgcaaggaggatgaacacgtatatatcatcggcggcgcaagtgtctaccaacaggcgcttccctttgccgacgaactttgcctgacagaaatagacagcaccgcaccggaggctgatgcctttttccccgaagtctcgcccgccgtatggcacgaaaaaaacagagaagctcatcctgcggatgagaaacatctctgctcgtatgcatttgttgattacgtaaaagcgtaaaaaacaactattacaacttattaatcttcgtcttctacgtcgaccatgatcggcatctgccgtttaatggcttcgtggaaggagattagcgtttcggtacgcgccaaccccaacggttgcagcttatcgtggataatgctcagcaaatggtggttgttcttagcataaatcttgataaacatatcatattttccggtggtgaaatgacattctaccacttccggaatcgcttccaaggcttttgtcaccgaatcaaaggactcggggtccttcagataaatgccgatataagcgcaagtctcatatcctatcttttcagggtcgatcacatattccgaaccctttaatataccgagattagtcagcttctgaatgcgctgatgaatggccgcgccggaaacgttacaagctctcgctacttccagaaaaggaatacgcgcattgccggctattaacttcagaatctgctcatctaaactatctaattgatgatgtcccatatttgaatcaaattgttttaatcgacgaatcttttatgcaaagttagcgattttccggcaacaaatactataatttattacttttatttgcagaaagcggataagtcaacaatagtttgtacctttgtggaaaacataaatatactatttatatgaaacaattttgctgtacactgctttttttccttgccactctgacaagctacgcgcaaaattttgcggacttttttcaagataaaacattacgagtggattacattttcaccggagacgccaaccgtcaggcgatctatctggacgaactctcacaactgccttcctgggccggacgacaacaccatttatccgaacttcccctggcgggaaacgggcaaattatcgtgaaagacgttgccaccggacaatgtatttataaaacatccttttcttcactgtttcaggaatggctgtcgaccgatgaagcccggacaaccgccaaaggattcgaaaatacgtttctcctgccttttcccaagaaaacagtagaagtagaaattacattatattcgccccgtaaggatgttatggcaaacttcaaacatattgtatcgcccgaggatattttaatccacaaacgcggcacatcgcacgtcaccccgcatcgttatatgttgcaaagcggcagcgagaaagactgcattgatgtcgccattctcgccgaaggatatacggaaaaggaaatggatgttttctatcaggatgcgcaacgtacctgcgaaagcttgttctcacacgaaccgttccggtcgatgaaacagaaattcaatatcgtcgccgtagccagcccgtctaccgacagcggcgtaagtgtcccccgtgcagaccaatggaagcaaactgccgtccactcgcatttcgacacgttctattccgaacgttatctgactaccagccgggtgaaatcgatccacaatgcgctggcgggaatcccctatgagcatattattatcctcgccaacacggatgtatacggcggaggaggaatctacaattcctacacgctgaccactgcgcatcatcccatgttcaaaccggtggtcgtccatgagttcggacacagtttcggtggactcgcggacgagtatttttacgaggatgatacgatgaccgacacttatccgctggatgtggaaccgtgggaacagaatatcacaacacgggtgaacttcgcctccaaatgggaagatatgctccctccacacataccggtacctactccggttgcccaacaaaagaattacccggtaggcgtgtatgaaggaggtggttattcattcaaaggtatttatcgcccggcgtacaactgccgcatgaaaaccaatgagcatcccgaattttgcccggtctgccaacgcgcaatccgccggattatcgaattttatgtgccataaagaaataacgtttatcaaacttaaaaacccaagcctttatgattaagcttcaaccgatcagcacatcggatttacaacattacaagtttatggaagaactcctcgttgatgcatttccaccggaagaataccgtcaattggaagagttacgcgagtataccgaccggacgggcaactttcataataatatcatctttgatgatgacctgcctattgggttcatcacgtactgggatttcgaccgcttctactatgtagaacacttcgccaccaatcccgccctgcgcaacggcggatacgggaaacggacgttggaatacttgtgcaaccacctgcaattgcctatcgtcctggaagtagaacgccccgtagaggaaatggcaaaacgccgtatttgtttctatgagcgtcaaggattcaccttgtggaaaaatgactattatcagccgccctacaagcccggagatgattttcttccaatgtatttaatggtgtacggtgacttgaatccggaaaaggattacgaagatattagacataagctccacactgttgtttacggggtaaaggagtaaaagcaaatcaaagcaaatcaaagtaaaaatcagtaagactccggttaagagattgaccggagtcgctttataaatatatattcttcttcaattttagtggtaaggttgattgggaaaataacaatttgataattgatagtatccaccactctcctccttcagggaggttgtgtaaaaagtaagcatcaagtgttctttgacatattgtattaaaaaggaaatgctctttatct

SEQ ID NO: 3000 - DNA, 52049 bp, Unknown
  gut microbiota DNA sequence
aatactttgtagcttagctatatttctgattgaatagccttttcttagtaaagcaatgacttctttatattcttctttcttcttatcatccgttttggttgaacctgtctttctgccaagtttaccacctttggcaatataattcgctctaccactattcaaacggtattggatattgcttctttcgatatttgccatttctgcaagtactgtcaccatgatagacgctattggattaacttccccatttggttgcaaagtatataagcccaagttctgtatgtaaaccgatactttcgattcatgcaatatatccaaagagcgaagaacctgtaatgtacttctccctagtcttgacaattcagacaaaagtagaatattcacagattcacgtttacagtattctaaacattctcctaaaatctgtctttcctctattttctttgcacctgaaatatgttcctggaatatgtttactatttctatatcctgtgagatagcatatttctttaaatcctctatttgtctgctcgtgtcctgtctgtcattacttgacgaaacacgagcgtatattacggctgttttcattttattctttgattaaattgataacatgaaagaatgtgttcaaaccacctttgcagatttatttgaacacattcctgttttgaacacaataagtagttaatgacgattattcgcttcctcaatatcccataaacctataaaaatcacaagccatatcaacggcacacacgcactaatcatagccaataccacaaaaaagagccaaacaagtatcttataataaaacatgattctttgttttacgtagttaataaaataggagaatacccattactgaatattcccttgtttaatcaatcaataaaccacttatatttagtgtctccatgcaaagcggcatttattcccgttgctatttcggttgcatttaccgctctatccaagaatgaatctatataactgctcttatttgctcctgtcaatagattatacaatttccacatactaatatcattccccaagctcccaaagttcttatcattgatatatgcttttgcaactgtatttatctgcgaatcagtgataagcattttaggaatatctttctgataaccttgtggcaatgattgataaagtctcattctcccaagtaattgacaaaattgatgttctgtgagatatgagttaccaagtgtttgcaacaaatgtagatgttttgcaggttgataactctgaaacatttccaatactgcccgatataaatctttggtattagtaacttccaagcaactaagaaaaccgtctgttgatacacacaaatttgtgcatactttacaggtaaagcctgcaaataccttaaacctttctgctcctttctttgaatacaaatttgtgtgattataagctctcacaccaccaatagtaagagttagcttatttccgttcaccgtttcgtaaatcgtaggaatctgaataataaaagcacacctttcgtagtagatagtcttgtcactttcaagaagttgatttgcaggtttgtgtattgcttcggggattcttcccttgataatgtgacttacacgaatatcgggcttatcaatgctttcaccactgaaaaacgtatttgcagcgtcataaacagtatcaataaatgcagggtgaggaattgtaagctcattatctttggcgaatacgggtgtaatacaatcttctttcaaatgttgcattgtaacctctagtgtattagcttccaagaaatgaggattctcttttttaacttttggttgttcttcgattattaccgcttcttctgcatattcaccaaagttactttcccttcttacttgtggcacattgccaataatttgtagatttctcataacgaataaaattttaaatgatttataaattgattacgtggattgaaatatatttcgttttctatccaactaccctcgggggacgttagaactactctactcattcgtacgtaactttcaattcagtaaatcataaaagaagtaagctgatatatatttaggctcttattttaacaggtagggggtattatatataagtacctatactttattgcgtgcctatgtattactattcactataatagaaaggagagtattatactgccatataaagatatgctaagtagtaatatcaaaaaatgagtattgtttatttttttaccttgtttataatgagtaactttgagtattcttaaaaatcaagaactacctgtttggcaatggttcaactccttgaattatatgtaaatcaaacaggtcatatttgcattttcccacacttccattgggaaaattaactcccatatttaaaattgcgaactgctatatcccttgtattagacaagaatttagaagttccacaaaaaaagccgtaattgagcacatttgtaagtgtactcgcttgcggctatttttgtttttagttggatagtagactaatttattcgtcaaagtctctataatgagcttatttgtaggcattgacatatttttcagtgtttcatacttcaaatacagagttagcctatataactcttaatctttaaaaatcaaaacagatactctgtcacactaaaaaatgaagttcatgcgcacataaagtttaaattctttagtagtaggggaaaatgtgtgttataatatataattaatatcagatactttttccccactaccttacctatgtaaagctaagaatggcttgtaatactaataatcacatttctctttgccgtacacagaaaaaatcacttttattgcatcctattctgtaaaacaggtaggtacaagggaaaaaatactgtatattaatatattaataaagaacactttttccccttacttggaaattatgatattcccattatcatctatctctactattttatttactttcttcgtgggtagttttttctgcttggaaaagtcgttttccaatagaatattttcagtatgtaaagttaaaggagtagtaattgatactaaatcagcgccaacaagttctattatatacttatcataagtctttttatctattctgattgctttgattatatttttcttaatcagctctatattgccatattgggataatagaagtaattggataaagaaaccctttatcgctgcatccagttcgattaatgcaaacttattggagatagtgatacattgttcttccattgcaggaatatgataaatattccgtctagttggataataaaaaccattatccacaaaataaggctttatatccaagtactcctcaaattttttattaaaactgcttactgatttacctccacttgttctttttaattcatctaaagtgattctcacattatacagtagcggattgaatattgtttataaatagtaaatctttcttctctttttctatcttgtagtaataagcactaccaaagtaaatctttgcttcttttcgattattgaatcgctttcccgtaggaatatgaataatcataggtcattggtttattttataaatgatgtatctgaatctaattaatgttgtggtgcaaaataaatcgtatagactttcccttgtatctttcttttgcttttaatatagccatttgaactagcccataagccaactctaagcctgttatctgttactccttgttttagtgctttttctctgatttcttcataggtgaatgtttgcatagtactgttttaaataaaaaatggtgataaaatagtgtatcttttgtgcctgtgctatcttatatactatttgtaatatattgatacaaaggtactaagtttttagggagtgacctaatactagtaccacaaactggaaaaatcgactagaagtattgataaagtaaaaaaagttcatttagcaattagacgaactctattttaatattaccatttcgctcttatcttacaattctattttatcaagtacatctaccatattaggtaattcattgtagtagtccttcacatccgcactcttaggaatattcaattccaatatccctaattccgataagttattaataaacatttgatatgctgtaacatcattcttgagctttcctatttgttctaacattggacgtgcacataacagtttattaatggcaacctcttttattgtatcatcacaaaataactctttagctctttccaaaacttttggaagtctctttctatccttaataatagacataagctcgtttatttcatcatctaatccatatatatctattcctttcattaatagcggaaataactcatttaccttatctaaagcaaatacataatttaaaataccttctatatcagttggcacatcattagctatcgggatttctttcgttattggtgttttctttgatgactttatttgattagcttcattttcaagaatgacattcgctgcatcattagatgttaacttaacatatttttgaaaagactcaacatcattatgtcctgtaattttcattataagatgagcatcaaatccacgtaacaacatattacaaataaatgaacgtcttgcagtatgggtctttatcagtttataaacaggaacttgcttcttagttacttcatcacctcgatgctccactacggtatgcaatcttgttataccagccttttctccaatctttgtcaaataatttaaagccgtctgattggtaaatataggaaattggttttcgtacttggctagtatctctttagctattggcaataatggtacagacaccttatgctttgtcttttcttggataatctcaattatatttccattatctttcattattccctcatttattgactgtgtatctgtaaaacgctgacctatccaacattgcaaaacaaacaaatctctcacctgttcttctttgccagagagttccaaagcatatatcttacttatctcttcctctgtaagaaatatatcattgctatcaccttctttacttctaggcttcttatatttatcaaggttagattcatgaatatcaatcattccttgctgctctgctcttttaagaatacatattatcttctctaccttattaccaaccgtagtagttttcgtagttttacctttaccaacatctttattaagaagataaagttcatatcccttaattaaaggtaggtttatatcactgaaactgataggacatctacctgtctcattcaaaaatatttcaaagaactttatttgctttatgtaatcagctcttgtactttcacctatattcttatcagcaattatagcattgcgtaaccaatgtatagcattttcagtttcttgcttctttaccatagtatctttatatataaactttcgtaacaattctactccctgctccatttcgttgggatgttgacaaagatagtatttatattcgacaaaacttgcttttaattctgtcaacttttcattagttatagtgttattactattatcaagttcagatagcctacaactaatgtatgcttcttgtttttcttcattccaatgctctggatatacttttacacccgtagagagtttaacctgcttcccatttattcgacataccaaataaatattagtaggcttatttgccttaggctttctcaaatgaaaccttgcttgtacttcattaaaaaaatactgctcttccataacctcgttcttcaaaacggttcttcaagttggttctttaaactcgttcttcaaattggttctttaaaggctaaaaagttaattaaatgaagaagtatccccttttgaaacaccgtagaacgcggcttcgccacctcggtgaagagcaaaaaaaaatggggcttttcacaaagctccatttttcagttttcaataggtattagttttttttaaggtaaaaagattgttttcaggataacggtgcaaatatagtcgcttttactgatactctccaaattataaaacatgtcatataacatctttttgaaaattctttggatttattatcatttgacgcaaaaacgcctgtaacttacccgttataggagacaaatataggataaaattttaaggagccctaatttctgtttaaaaaactgcaaaaaattatctattcggatagttctcgtctatctttccgctatgctttaataccttggcgtcaatgaagaaaacaatctcttcggcgatattattaatgtggtcgccggaacgttccaatttacggaaaacgctcaccaaatccacacacgtatgtactgtttcaggatgttcaatgatataatcggcaaggattcccgttgcctgtgcgttgatttcgtccagcagattatctttgccgaatacggtagttgccatttcaatactctcctcatgcaaggcacgttttgccagttccaacattgaaagtacctcagcatgcatctcacccaaacgcagacgcgtcattaactcagcgtcaagcaccggttctttgcaacgtatcacgaaacgggcaatcccttccgcaaagtctcccaagcgttccagattcgtattaatcttcagcatagccaatacaaaacgaaggtcgattgctaccggattgtatagtgcgataatatcttccacatcactgtctatttttagttcgaaggcattcacccggcgttcacggaccattacctgttgcgccaactccttgtcgagtgtcaaaacagcctccccggcacggtcaagctgattatacaccaacgtccacatctcgtcaatttccttcttcaatagaatgagttccgattctataaactttaccatagtctattatatataagtgttaatattcctatttatccccgccattccggtacaaactatccgaaacgtcctgtaatataattctgcgtagcctctttctccggattcgtgaaaatcttcttcgtattgtcaaattccaccatttcacccatataaaagaacgcagtcttatcacttacacgagctgcctgctgcatattatgcgttacaatcacaatcgtatagtccttctttaattcgtgaatcaattcttccactttagccgtagaaatagggtcgagtgcagaagcaggctcatccatcaacaacactgaaggagataccgccattgcacgagcgatacaaagacgctgctgctgcccgccggacaaagcataggccgattctttcagtttatctttcacttcatcccaaagcgcagcccctttcagcgtttcttccacccgttgacgaatgaatgcattatccttcactccattcacacgaagtccataagccacattctcgaagatacttttcggaaaaggattaggacgctggaacaccattcccacattcttacgaagttcgtccacttccactcctttcgcatatatattctgtccgtcaatacgaatctccccctccaagcgggtagcgggaatcaaatcattcatccggttgaaaagccggagaaaggtagactttccacaaccggaaggcccgataaacgcaacaaccgatttttcctcaatctgcatactgattcctttcaaagcatggaaatcaccataccagaaattcacatcacgcgcatctatttttactgtatccatatattatttaattcgtctttactcttttttcaaaatatttcctcaaagcattagccagcagattcaccagtaggataatcacaatcaggaccaatgcagtgccataagctaacggcaactgcgcctccatatccgttccactggtcgaaatcacatacaagtgataaggcaacgccatacactggtcaagaataccggtcggcaactgcggcaggaagtaagcggcgcaagtaaaaagaataggagccgtttcacccgaaacacgccctaaagccagaatcagcccggtgataatgttcggcattcccataggcagaattacatgccagatcgtttgcaactttgttgctcccaatgcccggctaccttcacgcatactatccggaatagccttcaacgcttcttccgtagtacgtatcaccaaaggtacacaaagtaagcctaacgtcaaagaacccgctaggatactgtcaccaaagcccatataattgacaaacaatgccataccaaacaaaccgaacacaatagagggaataccactcaggttattcgtcattacccggataaagcgtaccaattttcctttcggcgcatactcattcatgtagatgccactcatcacacctaccgggaaagcaaacaacgcactacctaccattagataaaaagtacctacgatagccggccagatacctccacccctcataccgtccgtaggtgctgaagtgataaactcccaactgatagcaccactgcctttatatataataaacccgagaattgcaaagagtatcagcacaatacaaagactcaacaagcggaaaattccgaaagccagcttctgcgaacgatgtttagccttattattactacaaatttccattttatttactacgttttaatcctttagaagaaatgtattccacgctaaagttaataattagtgtgatgaagaacagcacgacgcccaacataaacaaggcctgataatgcggaccaccggcaggagcttctcccaattccgccgcaatggtagccggaatggtacgcaacggttcgagaatagtagtcggaattacggcagcattacccgtcaccattaacaccgccattgtttcaccgatagcccgtccgatgccaagcactactccggaagtaatccccgaaatagaataaggaatcactaccttatatatagtctgccattgcgaagctcctaatgccagactcgcctcccgcatagcacgcggacagtttctcatcgcatcctccgtcaccgtaattatggtaggcaatgccataatagccagcacgacacttcctgccaatccactctcgcccaccggaagatcaaacagtttctgaatcaacggaacaataacgatcaatccgaaaaagccgtatacaacggaaggaataccactcaataattcaataataggtttcagccagctccgtaccttcggatttgccacttcggacatataaatagaaaccgaaagtccgaacggtaatgcaaaaagaatagcaaacaagcttacccacaacgtaccggcaatcaaaggcagaaatccgaactgtgctgccggagttgccgtcggaaaccattcggcacctgcaaaaacatcctttaccgagatcgtgttatcctctataagatgcaccgagtcaggatgaacgataaacttctgcggaacaaatgccacaatacccggcatcttttccactagttccgttatcttctcacctgcatattcataagcggggccgagttcttcttcggtataatactgtgttatatcctccagacggaaaacccggataggcaggtctttcccgccgagttctttccagttcgttatctcctcatcgaaaacattctttatctgcgccggagtcagcacgcttaccttattactcttattcagcgccaacacatatccttcttcaatcactttacttttgaatagcccgaaagcttcagtaaacaggaaaagaacgataagcagaattgtaatactcgttacgaaaccgctacaagtcaggacaccttctataatcttttcaaaaaactttttcatacctatttgaattctgatgcaaagaaagcatctccttattaaggggatgtgactaacgtttgaaggaaatgtttcaatcatattacatttgtattacaacatctatttccaccctacatgaaacaagaatgtaatatccaattgttttatttgcaccagcaataaaaagaataatttatgaaagtgagaagaaacttattaatcgccttttccctactctctcttagtgtcaatgcacaacgtatcaaaggcagcgacactgtattgcctgtcgcccagcagacagcagaacggtttatgaaccagcaccctgacgcccgtgtcacagtgaccggcggaggaaccggtgtaggtatctccgctttaatggataacacaacggacatcgccatggcctcccgtccgatcaagttcagcgaaaagatgaaaatcaaggaagccggacaggatgtagacgaaatcattgtagcctatgatgctcttgccgtagtggtacatccttccaatcctgtgaaacaacttacccgccagcaattggaagacattttccgtggaaagatcaccaactggaaacaagtgggcggagacgaccgcaaaatagtagtgtactcccgtgaaacatcttccggaacttacgaatttttcaaggaaagcgtattgaaaaacaaaaattatatgtcgagcagcctttccatgcctgccaccggtgccattatccagtctgtcagccagacaaaaggagccatcggatatgtcggtctggcctatgtatctccacgtatcaagactctctccgtatcctatgacggaagccattatgctacgccttcggtagaaaatgccaccaacaaaacatatccgatcgtgcgccctctttattactattacaatgtaaaaaacaaagaggcagtcacccccttgattcagtttattctttcacccgaaggacaggagattataaaaaagagcggctatattccggttaagtaatcacatccgtatctatcagaagatgtgttaaaaacctgaattagaaagcaattggcagatagtctaaactttttttctatttttgaggttttattcctttttttttcataatatagccgatgaatataattatcaccagagcattaaatatggaatttgaggaaaaagaccttgctgcaaaggtttttcatggaaaaaaagataaactactatacatactagaactttcttataagaagtactataatttgttgtataactatggattaaaactaaccaacgattctgagttggttcaggactttatccaagaaatattcactaaactttgtaaacgtgaaaatatcgataacatttctaatataaagatatacctactccgtgctatgcgtaatataatctacgattattacgcagcccaaaaagatatagtcagcatcgatgatatggaattcttaattcctgatgatgctgaagtattcaagacattcttttctaaaaatgatgaggaactgcaaaaatatcaaaccttattgcagacaatcaattctttgcccaatcaacagaaacaaattctttatttattttacataaagggattaactcataaagagattagcgaagtgttggatatcaatccgcaatcatctatgaactcccttgccaaatctatccgcaagctacgcatacagttcgggcagatatccgaaaaatagagaaaccttcatcgacggatttattttgtaaatatccgaaaatgaaggtttttctaaaacattaatatctgacgaatatattaacgaacaggtatttctacacgcctcccatcggcctggactgcataaagcttagcatcagccagatcaattccaccaggtatatcatacccatacatattaaaaaaataaagcaggtcaccgtccgctgccccacgacgtaactcgaaagccacagcattctctccattcttcactgaatatctacgaccgttaaccgtgcaatatacttcactgctgaccggttttacactacctttaaactgtgtataatacccgacatccgaaggctcactatccaaaccaatatctccggctttacggtcttcaatatattgaaacgcgtgtttcggtttgggatagatagacatctccgcctttgctttccgaatcatttcctctgttacaagataatcataagttccatattgttcgatgacaccctttcccggtataaagaatccccacaattcaaaaaagtcactcaaatcctcatgagcagcctgtgaagcctttaccgctaacttcaattgagcagctcccgggttattctcatcaatacgatctgcccgtaataattggaaaagcgtttgccaaaatttttcattataaccacaccgatgataataattccacagttgccaatacatacgcatatggatttcggtatcttcattcatgtgatgtgggtttcccatgtcgaaccaagcctgtccttctacaaaacgcgcatcagccaaatgaaaaagttcactaccacgagaacaatatttgcctaatttataaagcacataattagaaaataaattattggaagattcagtacaaccaggccagtttatcgctttctgatgaatgtgtccgatctcatgtgcaggtccccaggcattatctttatctgccattacattatccctcaataagatattatcaagataagtataaacaaaagccacacgataatccgacgcccacatatacccatattccggtgaaatagcaaaaatatgattattcatttgtgaaggccatacatcttcaatccccattaattcctgttcccagccaacaatatcatcccacaagttaatggcggaaagtattctatcgggaacaaaactccgtaatttttcagtatggaaataaaacatgatcttattaccacgaacacaaaaatacttatggtttgccgcagccaacaactgtgcatatttctgatccgtcttatgatctttcaaatcaaaaaagccggtcacttttccactacctgaaggaatatgaatgtttacaggtttagccctgtcatcattgagcatagctgtatacatcacaaataattgcccggattctttcatcgtcaatttgtttatacccggagatagaaaataaatagaaccacttgagttgactatccaacctctatcttcttcatcattcgtataagtctctcctattacttgcaaagagagttgctgtccgtatgtatctccgaccaatacgatgatttcttcatctttctccaccgatataccggtaggattatcaagattgccatattttttagtcatcaatttgtctgcccattcgacaacatcactgtacggggcatactttctgattcggaactctttctcatgtgtatcgtatgtatcattatacagagctaaagccaaacgggcaaagtatcccggcaattcattgataacatcttctgtgacaccttcgttcaaggcagtacatgaaagatctgtgaagactttaagtaattggtcattcaccgagctttctttattatatcggaaaaactccatttcatcacaactcacaaagttattatatcctgaatataccataaatttaatgccgctaacacgctttgtctcgtcaaacaaaacccgtgacgccatatcttgtccacgaaaatcgtattccccatatttcacccaatcagtatgtccgatatcagtggccgtataaacttccacccgaccaaaattaccattgccggcacgggtatgataaatcacataatcaatctctgtatccggttcaaaataatattcgagcgacactggaaaatttgctgattttccaaataaagaatgatagccatcagcttcaggagtaaactttccgtcaaaagaacattcaattccacgaccattttgatgttccgaatctttgcctccaataacctttacctggatatcttcagacacctcgaaggtagaaaactgtaacaccgtaatcgtataatcatgaatagcagatgttacggatatcgtagcagttctattatcacgagtattattagactctgccttcatcactataacctgtcctttttccggatcagcctctttataaactttaagccagtccgcatcactttccacctgccaatccgacataggaagcgtagtctttacctgaacgacaacggtagaagcattcccgtccaagctctgttgcaaagcagttccctcaatttcaaattttgaatttaattgttcctcatctttacaagattgcaatagaaacaaccaaactccaatgaatccagctaatcttatgatattatatattttcacaatttcctcctttctattcaagttcgaacactgttaatacagcagcatggtctccaggccatacgtcatctatctcaggcattgtacgtacaatcttcgaagcaacagtttttattccattacctttactataaataaaatcaacacgagaagtctgcgactgtccgaaaatgaccgcatacgttccttctccccgctccaattcatccgggtttatctctctgaaagtatccctaaaacctttatcaagcatataacgtgacacgggcagttcctcagctatatatccgaaatgaataggagccgccttatacgtccaatccaaatggctgcacgaattaaagtccccaccgataatgaccggcatagaagaatccacataaggaatcaagtcattctccaacagacgtttcatatcgaccaaagctaatatactatcctccgcagcccacctatgagtatccattccataattagcataataacaagtatattccggccggtaggcataacgcaaccagcaagcattcacatacacctttttcccggaagggagcgtgattatagcaggatttgaataaaaagtattcttcgtcttaattttctgtataggataacggctaaacaaacacaaattatcccctggagaaggagtctgcaaattaaatccgatagcttttgctatcatttcttgcgaaccgtatccttcttgcatagtaacaacatcagcaccggactgcttaatcagatcgataatacgttcgcgcccatctttgcccaaatgtttacctccgtgccagatattccattggagtactttcagatatttcttattattccggctatcagatgtaatcattaccgggagacaatcatcggataatatgggagtaatagaacgacggcctatttttacagactgaacgtttactcccaagcaattacccaatacagcctcagcattgacatcgaccgtaactaatagatagttggtaccatgtttcaaccgcgtggattcgttttccgaaagacgtatcttcatctttccggatttcgggatcaatccgccttttaccaattcaatccgtacattcgaacgaggtttcgacccggtattataaatatggatccgttcgatatctttcaacgaagtacaatttccaaaatcaagcaccagttcttttaccgctttaggcgactgttcaccttgagtctctatacgtagttttaacagttgaaagtctcgttttccccggtcaacatcccattcggcaggcaaagccactaccttgaacaattcttgttctccatattccgcacgaaataaagggttatcattttcaaccgcataagctaaaggggcagacttatattgctccagacggccgttacgcaaatgaaatgacaaccgtccctccgcagctctattgatagagatatcctccgataaatcatcaaaattataataacctttcaaataatcaaactgactgtgccgtgctgtgaccggacgatacatccattcattcaattccttttccgtcaatcctgttttccaaatgcgcacttcatcaatgcaaccaccaaaagcgctctctgatgattcattgattccgattgctccgggtaaaatgacagtggcagtatctttacgagcgacttcccgtccattaatatataacaaggtacaacgtccattacagactgctgctacatgcgtccactttcctttaggaatttcttccccaaccaatcctgtagctacattgcacaatcgtccatgatctatcaccaacggcagatagtccaacgaattgagttcactgtattctccaccgccaataatcacttcctgcgacttccattcattattatcaggtttaatccatgcttccaatgtccaatggcggcataaggtatccatacctatacgcagattattgtctttaccgtccaaacagacaaccttgttggattgtgccaataaatgtattccaaacaaactaaaaaaaatagtatataacaatgtcttcataatacttattataaaaagtagggccgggaagaccaaagaataactgcggtcgacccggccactaaataaaaaagttaagagagaaagaatcaattataatatggattctgcactaattgtggcattttattagtttccttcatcggaataggcattaagtactgtcctttatggaaattacggatcaaaggaatctctcttacctggaagaatcctgcatcatcattggcagccacattcaaacctaaatcgggtatccccaaatatttctctgcaattttccaccgacgaatatcaaagaacttctgaccttcaagataaaattcaagagaacgttcctgtctgacaatctccctcaatccttcttttgtgtcttggtaaccggggttagtagaaaaattatcccaggcctcgtctactttgggaatgcccgcacgtacacgcactttatcgatataatctttagctttatccaattctccaatctccaccaaagcttctgcataattcaaatacatttcagccatacggaaaagaggtagcggatagtgcaccacgccatcttcatacgaaggatgcaccagttttttgttatgatatccggtaacagaataataaaggtcttgatttcgcttaccatgacggtcattattgcgtaattcctccacaatgacccgcttggcaggatcatcactcgttatctcgccgtcatactgcgtgatttcatagaaaccatgatgaaaacctatgtttgcataaaaacgcggctctctgtcaagatgcatttttatagaagtaccattactaacattcgagtaattgtttccgtcataattcaccggtagctcaacaatattaaacctcccgtcataatcatatgtcttatctttatccattggcaatccattctttgtataaaacgattccaccatttgcaatgtaggcgctataccgcctgaaccatcatacacaatgtcaatatattggcgaggaatagaccgattctgaatatcatagtatccttctttccgggtatcagcccaaatgacttccggacttggatttgaaaaatcaatcacagaataacgtattctacgttgtgccggattagataatcccggacgattatcgtcaggagtacctgcatcattatcatcataaagccggaaattcagtttttccagttctgtaatagcctgcaaagagatttccgcactttttctccatttgtcttccgagtattcctgtgcaatcaaatggcgtccgtctttcttacttttaaaatcggcatacatctcactgttaccattaaataacggtgaagccgcatataaataaagccgggatttcaatgcatagacagctacttgtgtagctcgcccaaaatcttttccggaatatgtggtagccaaatcaggaaaagcttcatcaagcttgcgatttatgaactctaccacctcatcataactactacgttcaggaaattcttcaacatccaactttgggtcataaagtttatcaataatacatgtaggaccgtaagaacgcaaggacagaaaatgataataagctatcaaaaaattagcttcgccacgataatgttgcttatctgtaggaaccagattttttgccttatccaggatatccagaaacatatagcactgccggataccttcccagataggagaccatgtatcagaagtcatgtgcagactggaaggcccgtatgtaccttcattaaaagtagaaaacatttctttacgataaaaagaagtttccgccccacacatcatccaataagcattattactaatcgctctgttggtaggaagaaaagaataacatgaataaaggtaattccgtaccaaatccggagtttcgtaagaatcttcttctttcacaacttcatctggtacaatatccaaatagttacaagctgacaagcctagcaaaaaaagtccacagaacaaatatttaagtttcatagttttataattttgtatcgtttgattactgtatggtcatttgaaaaccaatattgaacactctctgggtaggataataaagaccattaccacctcccatttcaggatcccaatgcttgaaaggagaaaatgtcagtaagttgaccccacttaaataaaagcgcatacctttataagtataacctatctccgcattttttaatttcaagaaagctgcattccttaaccaataagtagaatactgatcgttattaccattactatctttagtcaagcgtggatacgctgcatttggattaggattatcaacactccaatgatcatcagccacaaattgtaacatatttttaatactcgttgtgccaaagggatgcataccatacatcatgaaagaggtacgagccactccttggaaaaagaaagaaaagtcccagtttttccacttcatagaagggccgaaaccatatacaagctccggatcataaggatgaccaatagccacacgatcattactattaattacattatcatattttccttttgcattaggctgatttacatatttaatatcacccggctgtggtgtataacctaaatcttggcgcggagaattgtcaatagtttcttggtcggggaaaagtccatcagctacatatccccagtaagtacccaatggatgccctacatcggacaatcccggatattcaaaatacggagactcatccattttcaagaccttgttacgagcaaaagtcaatgtacttttgaaagaaaggaaaaaatctttcgtgatttgtttattgtagtctatagctaaatctaatcctttgttctccatttctccattgttggaagtaattttagtttcacctgtaccaacaatttccggaatggaattttcacgggtcataaaaatatcacggcgcttttctctaaatatatcaaatgtcagattaaagtcattgaataactgtaaatcaagccccaaattaattttttcaccaacttcccaagttaaatcagggttaaaatatctattccatgacggaccggaataatacgtatcttgcctaatacccgtcgtataggaatcgctaccacccaatacaagatcttccatataagcaaagcgccctgcattcgtagcatcattgccaaccaatccccacgaacctctgattttcagatttgaaatgaccggttttattggctgccagaatttttcatttgagatgttataaccaacagctattgaagggaaaaagccaaatcgatgtcctttagcgaaattctccgaaccgttataaccaaaatttccctcaatataataacggccatcataagaataagatacacgtccagctactccttgcttccgttgcggcaaagatgaaaaaagtgtagtaggaccattaatatcatattgttcctgattataaaggaacataatattcaaatcgtgtacttctttaaaaatacgattatagtccaagatagcctgaaaatacattttcctatccccgttccgactaccgtcatttgtcaatgcggtactttgttcgtcaccaatacgggttattttatattccatggatgaaggatcataagaagacatatagtaatggttatagctagcactacgttctgtagatgaactactataatttttaaatgaaaataatcctgtaaatttcaaacccttagtaatcatatctaattcttgtgccaatttgaaattagcagtaatagtagtacgcaaatttgttttgtatcctgtcacgtattccgccaccggatttctataccatccttgtccatgaatgccaccaggtttgtctccccataaaacaaaatcacggtctgacatatttgcaggaaaacgtactggaaaatctaccggatttgcttccatagaaagttggaaaatatcattcacatccattaaaggagatttcttatcggcaacagaaagattcaaccctaaagatattttagtagttctggtcgcactaatattcaaattgtttataaagtcgtaattataattacgcacattattattatatgaaaaatagtccttgcttaatgactttaaatgtccgttactatgcttaaaactggcactcataaagtaatccattttcgaactacctccacgtatattaaaattggcacgttcagaaaaagcactcttattaaatatttcatcaaaccaatctacattaggataaatataaggattcaatcctgcaatagtaccgtcaattttttcctgtgaataagggcttacatcgcatcccggacgcgataccgcttcattaaacattttcatatacgtgggaccgtcaaccatattgggcacacgcgtcattgtagatatagctccttccaaccgaaaattaataataggcttatccagattcttaccgtttttagtcgcaacaatcatcactccattggcaccacgtgtaccatacaacgccgtagcagtagcatctttcagaatagaaaaactttcaataacctcaggatccaacgcattcaattccgttgaactaatttcaaccccatccatgataatcaaagcagaagtgttaccattgaaggtcgatttaccacggatccaaaagttagcgccatcagctcccggttcaccactgcgttgcaccgctatcacaccggccatacgtcctgcaaaagcagtactcaaactcgaagaaggtactttaagttcctgcggcttgatctgctgaatagatcccacaagcgattctttcttctgccctacaccaaatgcagtaacgactacctctcccagttctgctgcagactcttttaaagcaatagcataaatattaccactctttaccaaaaccgaccgatcctgataaccaacaaaggaaacagtcaaggtatctcccacagcacattccaaaacaaagtcaccttctatattcgaggtagttcctgtcatacttccgttcacccttatagtagctccgataataggttcctgtgtgctatcatcggaaacgattccacgaattgtttttttcttttgcgttgtcttttgctgcgatttttcggaagcgtttttctctcgtataattatctgcttcccgtctatatcatagattagtgttgtgttctttaatatttcatccaaaacttgagtaatatctttcttattgacatccacattgatttttttcaataagtttttatccgtagaatataaaaagatatattcactgtttttctcgatatacttgaatatatctttcacagtaacatcctgtaatttgaatgaaaatactccattgttttgttccatggcaaccatggaaatcggaagaagcaatgcaaagaacaataacattgccgaaatttgttttcttctaaaataatccatatttttgcataatagtttagatgctcatggcataaaatgtcattcatccaggctcggataatgtgaggttatccgggcttttttatttgaatgaaaaataccacgagggattaataaaataaattaaaagattaaaggtagagcagtctttgactatatcttctaccagaagttgagtgaagtgttactttttctttttcataggcatcgtgtgtttttaaagattagtatttcggttaataaacaaataatatccattagcagttgcacggataccgatagggtgtatttttgaaattctttcaagaaccttttgcagtggcacacttaaatcaatcgttccttgtaaagggaaattttcgatagacggatcacaagtaatttcacaaccataatagagggaaagtcgttgcaatatagtactcatatcacgcccttccaaaggaaagtgtcctttcgtccatgccgtatattcttccgcattaacagaacgtttgacattagccaccccttcggataatttcaacaactcgttcggttttacggcggtctccttatttgcatgatctttcactatgatagagccacgcaccaaaaccacttctgcctcacgcattgctttgtaagcatcgacattgaaagcagttcccgtcacacggatatcaaaaccggaagttttcactataaatggtttttcagtatccttctttacatcaatgaaaatctcgccgtctacatagatttcacgggatttaccctcaaacacactaggatatacgaccttagtaccagcgtttacatacagcgaagtcccgtcagccagtaccaaccgcgatgttttccctttaggaacaatcaattggttatactccgtcttttgcggtttactttccacttgctgctcattgaccgaagcctctccttcctgcgaataactgatacgggcgcctttatccacttctatccgttgctgtgcatgagtgataagaagcacctgttgcaccgtatcagtcgtacattgttccaataatgcaatagcagtatctatggaatgtgaatgatgatccatatatatttttgttccccaggcgatacctgcaaataaagcagccacccctgccgctaacatatatattcgcaaatacctgtgtcgtttggaaacaggctcgcgatttacattttgcattaaagcattccagcgtttttctatatccgcttcgggtacttctttctccaaagtccggaaataggaaatcaacggatcacgttcattatctttatcttgtatagtgtcttttttctgcataaattagagttcgttttataataaagacggaatggataaaaaaacctactccattattctggattttttttaattctatggctccgtttttctcatttccactttttattgttacttttgcagctcttaaatagagctaacacacttaccgttatgacagatataaaaaacgaagaagcaggtgaaaagaaaagcttgaactttattgagcaagcagtagagaaagatttgaaagaaggtaaaaatggaggaaaagtgcagacgcgcttcccgcccgagcctaacggataccttcacatcggtcatgccaaagctatttgccttgattttggcattgcagaagcacatggaggtgtatgtaaccttcgtttcgacgacacaaaccctaccaaggaagatgtggaatacgtagaagctatcaaggaagatatccaatggttaggttaccaatggggaaatgagtattatgcttccgactacttccagcaattatgggacttcgctatccgccttatacaagaaggaaaagcatatatcgatgagcagacttccgaacagattgcacagcaaaaaggaactcctacccaaccgggtgtggaaagtccgtaccggaatcgtcctatcgaagaaagcctcgaacttttcaaaaagatgaatagcggtgagatcgaagaaggcgctatggtgctccgtgcaaagattgacatggctaatcccaatatgcacttccgcgatccgatcatctatcgtgtggtaaaacacccgcaccaccgcacaggcaccacatggaaagcctatccgatgtacgacttcgcccacggacaaagtgacttcttcgaaggagttacccattccctgtgtacgctcgagttcgttgtgcaccgcccgctttacgatctctttatcgactggttgaaagaagggaaagacctgaacgaccatcgtccccgtcaaacggaattcaataaattgaatcttagctatacactgatgagtaagcgtaacttgctgacactggtgaaagaaggcctggtaaacggctgggatgatcctcgtatgccgacaatctgcggtttccgccgtcgcggttattctcccgaatctatccacaaatttattgataaaatcggatataccacttacgacgcgctgaatgacatcgctttgctcgaaagttctgtaagagacgacctgaacagccgtgctatccgtgtgtccgccgttatcaatccggtgaaacttatcattaccaactacccggaaggacaggtcgaggaactggaagctatcaacaatccggaagatccggaagcaggaagtcacctgatcgaatttagccgtgaactgtggatggaacgtgaagactttatggaagatgctcccaagaaatatttccgtatgacaccgggacaggaagtgcgtctcaaaaatgcctatatcgtaaaatgtacaggatgtaaaaaagacgagaacggtatcatcaccgaagtttattgtgaatacgatgcaaatacccgtagcggtatgccggatgccaaccgtaaggtgaaaggaacacttcactgggtaagctgcaaccactgtatgcaagcggaagtacgtctgtacgaccgtctgtggaaagtagaaaacccgcgcgacgaactggctgctatccgcgaggccaaaaactgtgatgcattggaagcaatgaaagatattatcaaccccgattcactgaaagttcttccgaactgctacatagagaagtttgcagcaaccctgcctccactctcctatttgcagttccaacgaatcggttacttcaacattgacaaagattcaactccggaaaaactgatattcaaccgtacagtgggcttaaaagacacgtggggtaagatcaataaataactaagccgtcaggctttactttataacatggggctgtgtcaaaaggaaatgaacaagaacttttgtagcagccccatgtcagcaattaaaaagaaaaaaataaaatggggagaaaaaattcaccaagtgcaaaaaaagaactgactgaaatcatccaaagatacgaagccgccaaagcagaaaaacgacaactatacctggatggcgaccagctcgctgatattgccgattggtatgccaccgaacgcaaattcaacgatgcacaggaagtcattaattacggacttcaactgcaccccggcaacactggcttactgatagaacaagcctttctttatctggatactcaaaaactaagtaaagccaaagaagtggcaaacagtatcacagaaacgtatgactccgaggtaaaaatgctgaaagcagaactgttactgaatgaaggtaaactggaagaagcacaacaactgataaatacaatcgaggacaccgacgatctggcctcaatcatcgagatcgtttatctttatatggatatgggatatccggaagccgcgaaagaatggatagaaaagggacaagaccaatatggcgaagaagaagactttatcgtacttcaggccgactatctgggagcaacgcaacacatgaaagaagctatcgagtgctttgacaagttgattgacatcgctccttataacccttcttactggatgggactggcaaaatgctattttatgagcgaggatataaacaaaactatcgaaacctgtgatttcgcactggctgccgatgataaatacggagaagcttacgcttacaaagcacacagtttcttctacctcaacaaccccgacagcgctatcgagaattacgaaaaagccattgaatacaaagccatcccccccgaattggggtatatgttcatggggatgtcctatgctaccaaagaagattgggaaaaaacagaagaatgttgtaaccaggttatccggatttttgaggaaaacggagacagcggttcgattctactgatagatacttataccactaaagcaaatgccgttgccaaaatgggaagatataaggaagctcaccagctatgcaagaaagcaaaagaaatcaatccggacgaaggccttattttcctgacggaagggaaagtatacctagaggaagatatagagaaaaaagcaacccaagcatttaaaaaagctgcaaaaaccagtaccggtccggaaatgtggtacatgatcggtactgcttattcggaacacaattatatgtacgaggccaaagaaaattatgagaaagcctacaaaatcaatccgaaatatgaagacctgccggaaagattgagtgttatcagtatcatgaccgatgacctggacggtttcctcaaatacaataaagattgcgaacgtccattcagagaagaaaccattcagcagttgttgaacggtccggaccatagaaaagaggatgaaccgatcttaaaagaaattatgaaacgtcttaaagaagaaaaagaaaacaataaatcaaattaaatcattcatcccttaaaaaatggaatcagtagcagaacttctcaaatgggtattagaaaacttgaactattgggtagtcacaatctttatggctatcgagagctcttttattccctttccctctgaggccgtagtgccacctgccgcatggaaagccatggcagacgacagtatgaacatctttctagtcattgtattcgcaactgtgggagcagacatcggtgcattagtcaattattacctggcccgttggttagggcgtcccattgtttacaaatttgctaacagccgtttggggcatatgtgtcttatcgatgaagaaaaagtgcaccatgccgaagaatatttcagaaaacacggtgcggcctccactttcttcggacgtctcatccctgctgtacgtcagcttatcagtattcctgccggattggccggcatgaagttaggccctttcctactttatacaacgctaggcgccggaatatggaatacggtattggccgtgctcggatatctgatttatcggtttacagaccttaaaacaaccaatgacgtttatgtaatggcaaccaaatatagtcacgaaatcggttatgtcattatagctgttgtcatactggttgtcggattcatcgcttacaaaggactgaaaaaaaagaagaaataagtagtagatataaaatataaagcgcatctaccagtcaggtagttacgctttatatttatacttgaattagaaattaaactgcactcccacgcccaatatctctttgaattgtacacgtgatccttttgtaccgtctttctgagctattttcacatcatcatcatacatcagattggtagtcagagtggttgagaaccatttattgataatcatatttacttgtacttcccaattcacatctatattcagaggtttatgcagatagtcggaatataagtcaagacgagaatatacggtcatattctttagaaattcatatttgacctcccccttcaggtttgcaccaaaagctgatagcagatgtttaccgggatctactccataagccccctcatcagagagacggtcgtttagtacgaaggtgccacgccaagaagcaggagatagtacaactgtaaatatcttgcccggatcataagtaaatcccaaaccggtagtcaaataaccgggagccataaattcggagattgaaacatctttgttgatcgaatagtcataccccggagagaattgagtttggaatgtcgcaaatgcactggcataccaatttttggcaatggaataaccgtaattcgtattcagataaatcttatcatttgcttttctcgtaccatcttccccagtcttattaagtccgtatgccaattccagacgattggtccataaatgtttttctttcttgtaattaatctgatatgtaccttgcaagtcaaaggccacagagttatcacctccggcagcccagttggtcagactaacttgtgtcagtttcagtccggcaaatccttctttagtccagggagaagtttgagtactatcggcagtttgagccgaaagggttccaatgcccatagttgacagggcaaagaataaaattcctattttgttcatgtcaataaggtttagtgtataaaaaaacacaacctaacaagaatggaggtctggtgtcctgccagacctgtctaccagttctcattaggtcaaaatcttataattccaaattaaaaaatcatttcacagcagccagcgccttatcataatcaggttcttgcgtgatttccggaacaagttcagtataagctacctttccatttttgccaatcaccaccactgcacgtgccaaaagtccggccaatggcccgtccgccatacgcacaccgtagctttcatcaaaatccgaaaaacggaagtctgacaatggaattacattctcaataccttccgtcgtgcagaaacgaccgtgagcaaaaggaagatctttagaaatagccaatacaaccgtatctttcaatccggcagccatcttattaaatttgcgtaccgacgttgcgcatacacttgtgtccaaacttgggaaaatattcaaaatcacatttttaccattcaagtctttcagagagaaagaagataaatctgtttttaccagctcaaaatcgggagctactttacccacttgtataaattcaccgatcagtttcaccggttgtcctttgaaatttgttgttgccataatgcatattttttttaaaatttactttatatagaaaacaactattcctcgaaatatgttcacggaaaaccttttctaaattcaaattgttattccacaacgaaattactctagtattcaattttaaatataaaaacgtatggaaacagtattcaatgagattcaacactcagtaaaaaattggtgggcttctcttctcttgggaatcgtgtatattattgtagccctctggctgatgtttgcacctttaagcagctatgtagctctaagtatcgtattcagcatatccatgttgataagcggtatcttggaaatcctctttgcagtcagcaatcgaaaaggtgtgccaagctggggctggtatatcgtgggaggaatcatcgacgttattctcggcatctacctgattgcctatcccatggtcagcatggaagtcattccgtttatcatagccttttggctcatgttccgcggcttctcctccaccggttactcgatcgacctgaaacgttatggtactcgcgactggggctggtacatggctttcggtatccttgccattatatgttccttattgatattgtggcaaccggccataggtgcactctacgcggtctatatgatttctttcactttcctcattatcggactattccgtgtcatgctttcctttgaacttaagaatttgcataaaagaaaataaaattctttcggcacttactttggtattttgtttatctttgtaggcaatttacatgaatcaattaattaaaaaggaagaaaattatggcaatgcatacttggtttgagtgcaagattcgttatgaaaaagtaatggaaaacggaatgcagaaaaaagttaccgaaccatatcttgttgatgcactcagctttacagaagcagaagcacgaattattgaagaaatgactccattcatatccggagaatttacagtttccgacattaaacgtgccaattatagcgaacttttccccagcgacgaagaaagtgccgaccgttggttcaaatgcaaacttattttcatcacgctggacgaaaaaagcggtgcagagaaaaagacttccacacaggtattggtacaggctgccgacctgcgcgatgcagttaagaaactggacgaaggcatgaaaggaaccatggcagactatcagatcggcatggtatccgaaactccgctcatggatgtatatccttacagcgccggaccgaatgacaaaccggagtttgatccgtcaaaagcataagcaacaatgagtattgctgaaaatttaaagcaagtactggccgaactcccgcaaggagtccggctggttgctgtctcaaaattccaccccaatgaagcgatagaagaagcatatcaagcaggacagcgtatttttggagaaagcaaagtgcaggaaatgacagctaaatacgaaagtttgcccaaagatatcgaatggcattttatcggacacctgcaaagtaataaaattaaatacatgataccatacgtagcgatgattcatggaattgacacttataagttactggcagaggtcaacaagcaagctgtcaaagcaggacgcatcatcaactgcctgttgcaaatccatgtggcacaggaagaaactaaatttggtttcagccccgacgaatgcaaagatatgctgaacaccggagaatggaaagaactgacccatgtccgtatctgcggtttaatgggaatggcgagcaacaccgataatgttgaacaaatcaaccgggaattttgtttactagacaggctctttaaagagataaaaacaacctggttcgccgattcggacgctttccgggaattatccatgggtatgtcacacgattatcacgaagctattgctgcaggaagtaccttagtacgggtaggaagcaagattttcggagaacgaaattattaaattagaagtagtaactactaaaaaaagattcattatgaccgatttaaaaactactttcgcagggctttctcttagaaacccaatcatcatcagtagctcgggactgactaacagtgtcggcaaaaataagaaattggcagaaaacggcgccggtgccattgttctgaaatcactgttcgaagaacagatcatgctggaagcggaccaactgaaagatccggctttctatccggaagcaagtgactatctggcagaatacatccgtgaacataaattgtccgaatatctgactttaatcaaagaaagcaaaaaggaatgtcctattcctatcattgccagtatcaactgttacagtgattccgaatggattgactttgccaaacaaattgaaacagcgggtgccgatgcattagaaatcaatattctggctttacagtccgatgttcaatatacatacggttcgttcgaacaacgtcatatcgatattctccgccacataaaaaagacaatcaacattccggttatcatgaaactgggcgataacctgactaatccagtggcactgattgaccagttatatgccaacggtgcggctgcagttgtcctcttcaaccgtttctaccaaccggacatcaacattgaaaatatggagcatatgtccggtgaaatattcagcaacgcttccgacctcgccaacccgcttcgttggatcggcattgcatctgcggtagtagacaagattgattatgcagcttccggtggtgtagccaatcccgaatcagtagtaaaagcgattcttgccggcgcttcagctgtggaagtgtgcagcgcaatctatcaaaacaccaacgcattcatcggagaagccaaccgtttcctctccgcctggatggaaagaaaaggattcaacaatatcgctcaattcaaaggtagactgaatattaaagatgtaaagggcgttaatacatttgaacgcacccaattcctgaaatatttcggaaagaaagaatgataaagagtgaattataaataatgaacggtgaactcattgcagcatgacagctcaatttgttcaccgttcgtcgtttacagtttatcgtttaataaagattatctgtttatagcaagttactcgccagttcactcaactcactacgttcgcccttcaacaggttgacgtgcgcaaagatattctgatctttcatgcggtcaatcatatataccagcccgttagactggctatccagataaggctggtcaatctgttggatatctccggtaaataccattttcgtaccttctcccgcacgagtgataatcgtttttatttcgttcggagtcaggttctgcgcttcgtcgataatacaatacatctcgcttaaactgcgtccacggataaaagccagagcctcaattaccagttgctcgctcttttgcatatcctcaatgcgtttcacctctgtggagttcgtcgcaaactgacgtttgattacattcaagttgtcgaacaacggttgcatgtaaggagccactttttcctgtgcgtctcccggaaggaaaccgatatccttattcgaaagtgccactaccggacgtgccagtaatatctgtttgtaatcggtcaatttacccaaagcggcagccaatgccaataaagtcttgcccgttcccgcctttcccgtcagtgccaccagtttcacattcgggtcattcagaatttcaaaagcaaaactttgttcggcgttccggggctcgattccataattcttgcctttcatcacccggcagatagaatgagtaaaaggattataacgtgccaatacactattacgatcactcttcagcacaaaacattcattcggatgaatcagatccttaaagtcaaactcgctcaagtcgagtccctctttagaagaatagatacggtcgatcaatgccggatctacattttcaaatatttcattggatttttcaaagacatccacattcacgaccttatctgtgatataatcctcacaaagaagtccgatagaacgggccttcatacgcaaattcacatccttggtcaccagaatagacttcattttcggatatttcgccgtcagatattcagttgccgcgagaatcagatgatccggtttcctgatagggaaagactcccatactttagtagccggcacattgctggtcacaacaaacaaacgtcccaatccttctcccagtttcaccccttcggagaaaagttcgtcgcttgtcaacacatccagttcacgtacaaactcacgagcattgaaattaatctgctcgtttcccttcttaaacttatccagttcttcgagtacgacaagagggagatagatatcattttcctgaaagttcttcaagcaattgtagtcgtgaagaataacatttgtgtccaacacaaaatttttcttagttcccatggtttctttaaatttaaatgttgatatttgcactctcattcaccaatcccgcatataaagttgaattggtggttctaaagataaacaaattagcgggcaataaagattgcccgaagttaaatattataaaacatggattatcagaacactttaaagtacttatatgagagtatgcctatgtttcagcagataggtggaaaagcatataagccgggattagagacaacacacaaattagatgaacatttcggatatcctcatcaacaattcaagacgatacatatcgccggaacgaacggaaaaggttcctgctcccacactattgcggcagtattgcagtcggccggatatcgggtcggattatttacttcccctcatctggtggacttccgagaacgtatccgcatcaacggagaaatgataccggaagaatatgtagtaaactttgtcgcagatcaccgttccttcttcgagccactgcatccttcatttttcgagttgaccaccgcaatggcattccgttattttgccgatcagaaagtagacgtggcagtgatcgaagttggcatgggcggacggctggactgtaccaatatcatccagcccgacttatgcatcattaccaacatcggcttcgatcatatgcaatatttgggcgatacattacccaaaatagccaaagagaaagcagggattatcaaagaaggagttccggtagttatcggacgggcaaaaggtcacgtgaagcgcgtgttcacaataaagggaaaaaaagtaaatgctcctgtcatatatgcacaatccattgccccatacaactgcatggactggctttcctattcacaatcacaagaattaagagaacggctgactaatatccaacaaactttgtatgaatcggtagaagataaagacgaaaatttcgaacaaaatttccgggagctatgtctgtttttaaatccggcagacagcatgcacgcgctggacaaaatacttgataaaagaaaagatgccatccgaattacaaatggcatgtttccttgcggactttttatggagttaagtggtatttaccagtttgaaaattgcctcacaatactaacagccctcgaagaattagaaagaataggctatcgcattcttcccaaagactatctcaacggtttctccgatgtatgccaactcaccggactaatgggacgttggcaaaaggtgtacagttatccggatattatttgtgataccggacacaatgttgacggaattaaatacatctgcgaacaactcgatttttaccaacagactctcaagcagcaactccatttcgtattcggcatggtcaacgacaaagacataagcagcgttctgaaattgctaccgaaaaatgctatctattattttaccaaagcaagtgtgaaacgggcgcttccggaaaacgagctcttgaaacaggcagaagaagcgggattgacaggaacggcctaccctactgtggtagatgccgtacaggcagctaaaaagaactgcctccctaaagaccttatcttcgtgggaggcagcagtttcattgtcgccgatttgttagcgaaccgcgatacactcgatctccactaacgcatcctttggcagagcttttacggcaaccgccgaacgtgccggaaaagctccgtcgaaatatgtagcatacacgccgttcatcccggcaaagaaagacatatcttgaaggaatacagttgttttgacaatgtttcccattgtcaaacctgcttcttcaagaatatgttttatattctctaacgactgacgtgcctgttcttcaataccttccgccatttttccggtagcagcgtcaataggcaactgtccggacacaaagatcattccatttgcttctatcgcctgactgtaaggtccgatagctcccggagccttctcactacaaattacttttttcatatttatttctttttctgttttattgattttcaaagatagcaaaaaaaagcctctcacaaaacgaattttgcaagaggccgtctatttcttcttaaaaaagattattcagctttttcttcttcaacagcaggagctgcttcaaccggtttttcaacttttacttcttctcttgcaacattcaccgttacatttaccgaagaaggctgtgcttgatacggcatacggtttttcggatcttcaccatattggttagggcctaccgtaccgtctgcaaacaacatataaagtccgaatagtgcgttaacaataggaacaaacatcagcagaatcaaccaacctgacttgtccaggtcgtgcaaacgttttaccccctgtgccaaagagaaccacatggaagcaaccaatgcagcaagaccgatcaacaaaccgaataccgaaccacctgcagatcccatacccgcacctaaaataaaggtaccgatacccaatgcccatgcaatactaaacactataccaccaacaatgcctgacaggaaatattcgattctacgaatacgaccgtcaaaagaaaaaggagctttgaacataatttattaagttttatatgaataaaataagtgaattattattcgtgtttctcaatatggaagcaaagatataaaaaaaattaaatagagaaagcaattaggcaaaaaaaacgaaaaagtgccccattttctgtagaaatcacaatctcaccccatcccattccattactatcacccattctttcggctgacaagttccgtgagaacagtgaggaactgtagcaaccaccaagtcacaattggaagatagtacaattcttaattctttcagcaacatatccagctgaatcattaaatgaagatacttcgtcatacaccggatcactcgtacatactgataaatacacatatcctctccccgtcttattccccccaatgtttttgaggaaatagcaaattcatccataaaaaatgcattaataaatgcgctatctgtatccattaaagccaataccaaattgcttaaaaactcataaggtttttgtttttctttcgccatgtcattctatgattaataattttaaatttttcagtttatatttgctttatcaagtactttccacataggaaagtaaccctatttttaatataccgacctttgctcccgctatctgatagtcaggtagcacaatcttacaaaaaacaattttatatgaaagttctagaagaaatcaaagtctcggtttatgaaaatgtgtattcaaaaaagcccaaagtcatgtctttccttgaagtcattattatgtgtattcatcctgtttatgcaacgattatcaataccatccgtagatattatgcagatggagatcatgctgccgcacagaaattgaaaaatcaactcccttgcttcactccggcaggtacattcaatggagcgcatgctatcaaacacttcctcctccccagtcatattgtcggactcgattacgaccacgtaaaaaatcgtctggaagtcattcaacgttgcgcggcagacccgcatacggtagcggccatagaaagtccgaccgacggtgtgaaagtcttcgcctatgtagaagatatcgaaggccgccatcgtgaaggtcagcaattggtgagccgttactacaatcagttgctaggtctggagagtgatccggcatgcaaggacgaaagccgtctgtgttatttcagttattctcccaatggatacgttgccagtctctatcaggcatttactttggaaccattaatgagaaaagaagaaaactcctcttccgaaaatgaaaaacttcctcctttccccctccaaaacaaccctacggaaaatacttctgaagacgaaatcaacaagttcatttcgtcctatattttccttcatcccttaacaaccgggcaacgccattccaacgtgttcaaactagcctgtgaagcctgccgccgccactatccgcaagaaagcatattacgcgggctaacagtctttttcgagcacacagattttcgtgccgaagaactgacaagcgtattatcatctggttacaaacaagttaacaatcagacatccgcaacagttccaccggcttattccccctgtcaaaaagacataaggacaaaagtcccctatggtactttagaaaactccgacagcaccgaagaagcctattggctgggagaagaattcagaaaagagacgcctttatttcctcgtgatttgtacaataatcttcccgacctactgaatgattgcatcatcgaagacgcgagtgaccgcgagcaagacatctccctcctttccgatctcacagcgctaagtgcggtacttccacaaacttttggaatttataatcacaaaaagtattccactcatttgttctgtgttatcttttcttctgccggtagtggcaaaagcattgctcaaaccggacgctatttattggaagaaatacaggccgaaatactgtctaccagtgaatccatgcaaaaaaactaccatacagcgcacaacacttggcaagcagaatgtcagcaaaaaaggaaaaaaggagatacatattccgaagaacctcaaagacctcctttcaagatgttattcatccccgccactaccagttatacccgcatgcaaattcagatgcaggacaacggttcgcagggaagcatcattttcgatacggaagcgcaaacactctccacagccaatcatctggattgtgggaacttcgacgatatgctccgcaaagcttttgagcacgaaaacattgattcttcctataaagccaacggtatcagtccggtttatatccgtcatcctaaattagccttacttctgacgggtactcccggacagatagacagtttgctaagcagttgcgggaacggactccccagccgtattctgacttacactttccgtgaaattcctcactggaaagaaatgggcgatgattgcatttcattagaagactctttcaagccgattgctcatcgtgtctacgaactatataatttctgcctggcccatcctgttctatttcatttcacccgtccacaatggaaccgtctgaatgagattttctcacacatgctgtccgaggtagccatggaaggcaatgatgatctccaagccgtagtgaaacgctatgcctttctggtgatgcgtatcagcatgattcaaacccgtatccggcaatttgaagctaatgatctttctcccgagatttattgtatagatgctgatttcgagcgttctcttcaaattgtcctgtgttgttacgagcatagccgtctgttacactcatccatgccggtcccttcggtccgtccactgaaaaatccgaacgttattcgcaatttcgtcaatgagttgccaaatagcttcactacagacgaagcgatccggctcggcgcaaaacacgatttcaatctccgtaaggtaacacgtcttctaaaatcgcttaacggaataaagatcagtaagatatctcatggttcctatatcaagttgaacaagcaatagtcacaactgtcttttttgtccttttgtccttttggaaaatcggaaaaacattggaggatttgaaaaaaacatctcaataattgaaatcaaacattgggaagtttcgatacaaatctcccaatgttttttctatttatctatgcgcctgtatacgtcactatgcgtcatgccgattccccgatgtattacttttgtcatgtaatcgattacaaagttatcagaaattaataattaaaatttaaaaagttatggcacagaattacactctcatggctcgcaagaacctgttgaaacctgatgaaactccgaagtactatgcagtggcgcgtagcggtcgtaaagtgactgtcaaggaagtctgcaaacgaatctccgaacgttcctcttattcaaaaggagaattggaaggttgtatcggtgagttcctgctcgaaatagtcaacgtactggatgaaggaaatatcgcccaaatgggtgacctgggcaatttccgcatgagcatcaaaacgggcactcctaccgatacggtaaaggaattcaagacatcgtgcatcgataagggcaaagtactcttttatcccggaagtgatctccgcaaattgtgtaagacgctggattatacattgtataagagcgattcttcggcagattcggacaaagatccgcttcctgatgacggtgacgacaatcaaggaggttccggcagtggggtaactccggatccgtcagtataatcaaccgattgttgttgggttattgagttcaaaatgtataagtatttattctttaatttaaattcgtatgaaaaagcaactttggaaaaacattctccagtttattgtaactattgcaacgtcggtcatttcggccttgggtgtaacgtcctgtatgggacagtaatcttctggtcatctatatgaaaaaaccagaagataattatctcccccgtgagattaagttattggtgattcattgcagcgcaacgcgctgcaatgttcccttcaccgtagaacaacttcggcaatgtcacctgcaacgcggattcaaggatatcggctatcacttttatatcacccgggacggagagcttcatcactgccgtccgatatcagagccgggtgcacacgtgagaggcttcaaccgacacagcataggcatttgctatgaaggcggactgaacgaaaatgggtgtccggcagatacaagaacccaagcgcagcgctttgcattgctcgacctgttaacgatactcagacatcagtatccggaagcgcaaatcctggggcattatcaactcagtgcttcgattcataaagcttgtccatgttttgactgtcgcaaggagtatatggatatataaaaagaactacgggagctgtcgaacgtgcagtctcccgtagttctttttatgtttatatcatttataaatctcccggctttcccaagtaataggtaataagccgtacttctctcacagaaaaagctttcgttttcggatgaaagtccgtagccagtatctcatccatcaatggcttgcatttccgcatccaacgccgaagtttattgaccgaagcacggatagtcaaatcaggaaaatacatctgggccaactcttgtttattataacatttcactacaaattctgaatgttccatcgtttctttattactgttttatatgctataaagttataaaaaattaaacatataaacaaagaaagacgatactattatccgatataatgagaataaaaagaaaatatcaactatcttcacagaccgttgatatcgtgggaaattaacaccagatacacctccggtgccagggcgtaaattagaaaggtaccgtcgtactctttctaattcacaaatgtaggagaatcatgcgttcagcatgaaactagggacctacattctcttcatctcacatacaaacactctattagtgctgattacatctcaacattttattttataccactcttaaaacttctttccaaagcaaatgtttataaaagtcttcactaatattttaaagtcaaaccaccacgagcgatgttgcagataaaacaagtcataccgcaaacggcgtaacatcttgtccatcgtatccgtataaccattatacaaagttgcatacgaagtcactcccggacgaatctgatacaagaactgataacggggatcatgcttaataatctgatcaatataaaatttacgttccggacggggaccgataaaagccatatctccacagaagacattccacaactgtggcaactcgtccaaatggtgttcgcgtagaaatcttcctattttagtcaatcgagcatctcttccccccgcataaagttgagggcccatagactctgcatccaatcgcatactgcgaaacttatagatataaaacggccgtccgaaacgcccgatacgctcttgcttaaatatagctgccccaccatcttcccgtttcacagctatatagcaaatcaaaaataacggagaaaaaacgatcattaaaactgctgcaacgatacaatcccctattcgctttacattgcgctcaaaagcattcattccgtccggaatgaagtcctcactataccccataataatttaattagaaaatttaaatacaataccgtttatttgatatatttaaaaatgccgcgaaatgcgtaattaatgaaatagaaagcacttctaaagtatccaagtttctcaatattcatataaatattccaaacccatggaagtacttttattttattagaagacaaagaagattttcgaattctatattcagccaaacagctttgcgtattcactgctaaataacctttttttaatatggaaagccataatatatagtcttcatgaccttcagatacaaaaaaatgttttcctgtttttaaagtatcatatactcctgtagaacaacctataacatttccgcaaagtaattgatgataggtacaacttttaggagctaatattactcgtccatatctgtttcctgattcatcaatcttctcataatttgaataaactacagctatattagatgtattaaaaaaaggaagttgtctttctagtttttcaggtttccataaatcatcgctatcaataaaagctataaaacgtccttcagcttcctcaatagctttattccgaggaatagtagcagaaccagagttcttctccaaacacaaaagtcgaatccttgaatctagtttacaatattgttctactacttctttcgtattatcgtgtgaacaatcgtccacaataatcatttcccaataaggataagtctgatttaaaacagattcaattgttttagaaataaatctagctgaattataacaaggagtaataatagaaactttgtctttcatatcaaaaaagaagccaactcttcaactgaatttcttttccataaggtgaatgtgcccacaattttggagcaatcacaattttctcaaaaaatgaataggatatccattcctcattaataacaaaagccaaacaaattattatagctataatacttccatgtttcaacaaagaaaatattttatcgcacccttaaacataaaatacacttctctccaaaaagaatgtttatttttatacatactatacttccttatagcaaaataaaagatcataaatggaaataaatatttagacaaacaagcgaatagggcacctcttccttcttcataattttgaataaattgaataccagaatgaaggcaatctggatgttttacaataactccaggcacataatacatattactttctgcattgtaacaatccgtcaagaatataagatattctcctaacggaaattttgcacctaagccaaaaagggtattaaacaaaactttcttttctattatagtcttcctgaatgtaatttctatgtctgagatatttttcaatgtatatttattatgtttgaaagagttatcactataagatttgaaatactttcctgagaaatattgcgactgaaatgtaatgatatcagcatctttatgttctatataggcatttgctattctaatcatagaatcatgttccaataccacatcatcatctagaaaaactcctatatcgcctttcatatgtagcattgccaaatttctgctattagaagtccccttatcaggtactgaaatcagatgtatattctcatgaaaagtagaaattccatttagcggtacagcaatatcaatacattgatttatcactataacattacaatcatttaaatctatattcttaaatataggatataagaactcacaattagttctattaattgtagctactaaaaaatcaatcttcaaactatccatgaccgatatggtataaacacgttagcactagtaaatacataatgtagaaagaaatatacaactaaaatattaagtgctaatgttaaccacttctgagtttctttagttgaacttcttaataacaatacccaaataccaatagttgatagctgaaatataaatacaagtctctgttgaaatatatacatttgaaagaatgaataataacaaatgatagacaaaacaaaaatattaagaaagagattgaagcttttattttcagaaagcctattacggtactttaaacaaagtagtaatagaataaacttctcaatcaaagctatattaatcttaccagtcatccccccccaaacctcatgctttgaatattccataatgctctcacttataaaagaagggagataagagttcagcgttcctactatatttacaaatgaaagtaatattgaaattattacaaaaccaataatagttctattactatatctcctattcaaaaagaaatataagggcaaaacaatatacaaacttgaatgaaataaaattgctataatgtttattgcaatatattgccaaaacttacgttcttctacatacttcagagaaataaaaaatattgaaacagctataccttgcctgacaaacatcatgttcgcttgtaaatatccatatctcatataaagcaatatagctaaaaagcaaaaaaaagaatacctatttaaagcaataaaaagtaagccaacagtaataatacacgaaatcaaaaaaacaatatctatcgtgcctcccaatgatttcacaatactattcaaaatgacatagcctggctccattctagaaacaacaaacatttccgggttattacataaactttcaaaaggtggtatcctattaaatgtatcaacatatgccgtccagtcattacctgtttcaaatctagtaccacaaaacatgattaacaaaccaataagtagaaccaagagaatcttccgactttttgtattcagttttacataatctaaaacagaacaaaatgaaactaaggttataagaaaaaggtatggaagcatttaatacgagataacaatttgtaataaatataattacataataacggcaacacataaaacttatacctgtatggaaaccaacgagatatacttaatcctctttgatagatcgaacaagcaaaaacgaaaaagttatcaatgtgtttatagtaatctatcaatttttctaagtgttgatatactattctaggagtattaacatattccgatttagtaaaccgttcattatccgatatgagaaaatgaatccataattcttcattagataatgatatattattatataacaaatagttttgatatataagtttatgtacttcataccgggattccaaatccttatttgctactctagttacactcccttgaagtattctatatttcaacaatactttatttatattagcaaattgtgtatatttactcagttctacccaaaatccataatcttccgcatttcgataaactccgttatagcataaatgatattgatctaataccgactttctaattatcacagaaggatgagcgaaacaagtagtaaacaaaagggcagcattattagctattggactccgtttaaaacgatgaatataaccgtttagtgatttcccgaaaacctctatatctgtaccgcaaacacctatctccttatgtttttccataaaagacacttgttcttctattctttgaggaagactaatatcatccgcatccatcctcacaatataagtccctaatgcaagttcaatccctttatttaaagaaaatattaaaccttcatttttaggattgaccaatatttttatcctttcatccgaatattcatttatgatattcaacgagccatctgtcgaaccatcatctataataataaactcaaattttttatatgtttgtgatagaatactgtctatagcttctttcaagaacaactccccattataaacagacatcacaacagaaacgaaaggtttagtattcataaacagatccaagtttcaggtataatatcatcaatgtttacacggttatcattaatccaccttttgggtgatataactattttaccgggattagtattaagccaagctccccaccagctaaacgaactatttgctataatattatgcttacaagaagacattaaatacatatcccaaaaagaatttgtaccagtattatgagacaccacagtacaattttttaaattcaaattgttcaaacaccattccacatcatttgaaaagagaaataacttcatatttagaacattcttatccatatagtccaatgctctttgataataatccaatgtggcaatattttcatatatagaattaccaacataatctcctctacgtatatgaagactgacagaatttgaagataaaatcacatcactgagatttttattatagttatctattatcgaatttggaaaggtaaaaatcttccttaactcactctctatagaagaaaaatatttgtaactttgccaataccctatgtaatatagattagacgaattatctaaaacgcgtttgtcatatttgagatattcttcaatacactctgtattccgttgttgaatcactttttttaatatccttgaaaggatatctcctccatgaaaagataattgcatacgtttcaatagagatgcctctttaaactgtactccaaatatttttgctagttcaaaaccattgtgaagtttataacacgaaaataacgaagtatcaatttctacatctttataatgactttgcaaagccttatagaaagcatattgaaacatttggttacccaaaccacctataatctgaacaatcttcattactctatatgttatataagtattctatccatactccatgtaacaccgctccttactatacaagaaggattacctactactaaagataaacaagatacatctttagtcacaactgttcccatacctactattgaggagttatgcccaatctttactccttttaatattattgctcttttaaccacccatacatgttcttctagaattattgatttagattggttaattggaattgtaatatcatcacaataaatagaatgagtgtctgttgcccacagcttaattttattagacaacatacaattaggaactatatgaataaagttactatttcccatacacactaatttgccaccacctattgaacacccttcactaataataaccttgcaatctttacctattaaaacaatactagtattatcagtatttgtatcaccaagcaatatcactttcattattttctcctgacatcgatatagagagattttgattatagctattttctaaaatcaattctcttaataacacgacatggattacctgcggcaaaaaccccagatggaatatctcttgaaactacactccctgcacctattatagtattacttcctattgttaccccaggtaatatagtaacattacttgtaatccatgtgttatcaccaataactacaggtttcgctattatagtactataatcagatatatcatgtgtaccagttaatatcatatttctataactaaaggaacaattttctccgattgttaccatagctatgtttcgtatataagtatcacctaatccagtattctctccaacagataaattatatgataaacaaaagaatcctttagtaatagaagtagaaaggggtaagtgcaaacttcggagaagagaatttctaagataagaaatcttattaaatggagatatagaatataataagagtaatattcttactttcaaattaacagtaggtcttatagaaccttttttataaacgtccataaactttatttttcaaattagacaatacattccataaaacatttttttcctctctcaaaagcccccaatagtaagtagcgcaaacaaaagatacgctactaataataaaagttgatactactctataataactatcttctattaagtaatatggtatcattcctcctataaaagaaatagcagatactattactaccggcataaaaacagctttcatgaatagtgaatatttcatatccgagtatttactcaaataatatattttcaaacatgaagtcaaaacgccacaaaaaattatattcaatacatacatagttattggcgaaaaacctaatatgaacaacaccccacaaaatgccagaaaaacaacatttaaaacggttgtcataacattaaattgctttatatttcctattgctaaaagagatgtccccaacgcaattgtcatttgctctaccaaagaattagttaaagtcaatcgaccaaagaccacagcccaaggaggaacattcttcaaccaaagtgataatattataggcatttctattattaaaggtatagcaaaaaaagccaatatataatatgagaatttacatcctttcaacgagattctaatcattcgttctgtttctcctgatccttcacttttggctattgtaggattcaaagcttttaacatgttatttgtgaaagaaagtatttgtccattgatttgaatagcaataccataagcagcattcacaactacgccaaaaaaatgatttaatataattcctctgccataactacctatcatagatcctgatatcccgatgaaattccaaccagcgaaagataccatttctcttaatatatttttattccaatattgtagtggtgaaacaatacactccttatatctatgatgacaaaatattctcataattgttaaagtgcaaattggaagtagagtcatcaaaataccatataaaattagcttatcttgtaaagtccaacaaataataaaagcgatgaataacttaagaacagactcaaaaacacctacaactgcataatatcccatatcttcatgtgcattaataaccgcctcataaggtactgacatcatagaaaacacagtactaataatcaaactaaaaaagacaatttttcctgcataaactctttcgctcggtatattaaatacataatcaaagaaaaagacaagaagaagaagtaatataagaccaactattatagctaaaaaaaaatgaagaacaatacttatattaaaaatagatttcttcttacacatattatcttcgccctctgcaaaagacataaaacgctgagttgcaacagccattgaattatttacaaatcccaacattgcaattagaccacctacaacattaaatattccaaagtcaactacccctaaagcttctaacaaaagacgagttgaatacaatgtaataaacattgtaatagccatctttagatataagtatcccgtatttctaataattcgtgaagagttcataaagaacagacctaagttttttgttacatacaataatcaacaattaatttggtcgtcaaattaaacaatgcttttggttttctactgatattttgtaatatggaataaaatgcaagagccacttcattgttacattctctttcgatattcgaaatcaaagcagaatcaagttgtctcataaaatatttatattcaaaaacagatttagccgaactttgcaaatattctttaatatggcatatataattgcaatactcttcatagctcatgttaataagaaagtgattcaaatcgtcaatggaactgaaatcagtataacttataaaacattgtttaggaatatatttttctatattactagctccccaatatacaggcacaattccagctgtaaaacaatcaaatatcttttctgtaacataaccattcacattacacatattctctagacacaaagcaaatttaaattgtgtatatactttctttttacttatacatactcctttataaactctcaaattctttagccatccccgtccatacaatgaaaaataagtacaactatatttattataaaaagatataacttttcttcttacagaataaagctcattatgttggaaagatattttattaccagaaatattaactaataaattcctcttttcaaaattctctctagtaggacattctattacatttgtaaaatgatatggataatttatcttcaggtatttgtttccatcaacaatatcgtcattccacgtaaatattacattaaagaaaggttctagtttcgccaaattctttttagaatgatgattatctacaacttctggttcccatgcaaaataatataatcgttttactttagatttaatacaacgtatcaattcattataatcaagtttaaagaaaagtacacaatctaggctgtctaacgtattatattgatctaatgtatttatagaaacacctcgcttttcgtattcttgcttaatataataatagggagttatcaaatcatcagaattagtagactcattatctttatcaaataatatatcattagccagcccactatgaaaagggacaattgcaattttcataataaattcattttaactaatttcaatatacttataattttttttataatataattttcacattttccacaaacaaaaactcttattttatctatcactatccctaacacaaatactacaataacaaacaccattaaataaagaagaaaaaaatttgattctgcatacaatgttatatcaaaaatatgatcagaaacatataaacgaagattatctaatagatacacagccaaaacacttgcagcaatactattcaccaatctcgatttcaatgcaagacctttaaaaaagaaaaatacacataaagaagaaaaaagtaccaatggagagcaatccatagagaaaattctacactctttatgaaaaacataactaatcgttacatttagcataacaataagaatggtcaaagacaagaaagacaatagacataatgattttgaaattttcttttcagaataaaagagagacaaatagcgtcctattatatacaaaaaaagaatatatgtcaaacatttaccaccatccgtcaatatcgtataatagtaagatacaaacaatgttggcaataccgaaaacgtaacaaacaaaataatcaacaacctattatactccattttagaaagagcgagcattgctttatttataaaaggagagagtagcattaaaattaaataacaagcaatgaaccaattcttatatcttaaaactactatcaatgaatcaaaaaaagaaatattaaaaagccaaccatgatttgcgataaaagaaattacagtgcaaaaagtagtaattaaaattaattgtataaaacgctgcattttaaatttcacaccaaaatacccacttaacaatacaaaacaagatacacctatattacctattgcagatattacatatcctacaaataaattaaacaagttttccttacaattcgcttgagcataagaatgcattatcaaaatcagtataattgctaaaattctaagacattcgaaattagatgaacgtgtttccgacatatcaaattctccttaatatactatactctttattaccttacaaggatttccagccgcaatacaatcagaaggaatatctttggttacaatactaccactaccaataatactacgcgcaccaatagtaactcctttcaatataatacatcttgctccaacaagtacattatcttcaataactataggagcacttgcagcagtcaccatatccaccgattctccatattcattagtttcttcagaacatcttattttccaatctagattatgggcatcagtatccattataatacaatctgcccctatagccacagaattcccaatcgaaacgctttcctttacccaaagagttgacgaacttatacctacatcattacccagctttagagtagcctttttacccacatatatacaagttttaatattacgacttaaaggatttaaacccgcaccactcataatagtgcaattattaccaatttgtactaatgcacctacatgaatttttaaatataaatgattaaatactctaaaattctttccatactttatattattcaaaaagaaatatattttgttccatcctatatataaggaagaacatattttagagcagaatcttaatgctttaacatacatcattttaatagttatcaaaataaatataatcaccgacttactcatatattggtattaaaaatcaatcagctaaaaaaacacaaacaatagttattaaactcactgttttttcaatccaacaacatatcctaaatattttatactgaaaaaagactcaactcaatgaaaatgatttctttgaaattaatatactaataattgttacactgataaatttaagctgaaatttccttcaattgattaaataaatcttttccaaaaaatgtccaagccatcaccccccccactaatagaaatacaaaagctaaaacatatattttcttactgattcccgaaggtgacaatggtactacagcaggctctacaatagcaaatacaggtttttcttcctgaactttggccctggcaacttgaagttgattagcaacctgactatacacttgataagctaagttcatatcattctgcaaccgttcctgttccgtacgcacactttgtaaaataatatcatcatgagaatccatgtaattagcatactctttctgagctatgtaatattcttgttggcgttctttgaatagtttctccaaataaaggcaatcttctttagccttagaggtacgataagttataatgtattcctgtaatttccctacaacagaatcagcaactattgcagcaactttaggattttgcaaagttacagttacggaagtcatagatgtattcttatccacagtaacaataatcatattttttaaagtttcaattttctgtaactccttcctagataattcaaatatcccctgattcactctattagaaactatttttttatcttctttaataaacagtgacttcaccccactcattaccatgcttggaaacccaatcacatacccccaccagggagaagattcttcatctaaatatgagcttaaagatatttccctactccctggaggttgtgtaaaaagtaagaatcaagtgttctttgacatattgtataaaaaggattttatatctttgctc

SEQ ID NO: 3001 - DNA, 71936 bp, Unknown
  gut microbiota DNA sequence
gtctaacttttggggtgcacttcagaattcagcctcttttttattctaaaataatttctttctctcgaagttgataaccgattccggaagaaccgaagacattttccaacgtcgcattcaagtctctagtcagaactgttccactataagtcagcccttcacatttctcatgcccgataactgtcaatttgaatatttgttcgatatccgccactacattaatcagcgggtcgtcttcatagcccagaacttccgggtattcggcttccggtgttggtacctttctttccacaggtactatcttagtttcgtcacaccgaacactctgtcctgcagtcaatgtccgttgtcccaccggcgtcgcaactttcacgctgccctcttcacagtttacaagcattttctttccttgttgtaccaccaggaatttggttccgagcactgaaacgtctccggcttcggtctgaaccgtaaaagtctttccgggagtcactttaaacaaagcttttcccaatagttgaagtttacgttcccaaaaccatgtgacgcgattataagacagagaagagtttcccatcagctttactttactgccatccggcagttcataatccattgccgtagtttccgttactagtttttcctctgagaaatagtaaccacctattcccaaaagaacaataaacatagccgctattccccaatacagggctgccgacctttcacctccccgtttccgttggcggcttacagtaatccgacgactttcttcacgatacaacctcaacttctcagcaatcttcgccttacgggaaaacaactcgcctttcagaggaagcttaccttcttcgatatatttttctaaaagttccgtattatcctccatgcctcacatcaattaaaaatccataaattagctcccaccgcaagcaggaaagttttactcaactgctctcttaacctggatattgccgtgtgagtcgtgttatatacggtacgggaagtcaatcccattacctgcgcaatctcatctgaactcatcttcttataatacttcagatataacacttcccgctgttgcttcgtcaggttattaatttctctctgcaagacttttaattgttctctttctaattcagagcggataatcgccgtttcaatgtcgatttcgagatcaaacttatattcattcgtatctacatcgtccaacgatctgaatataccaccattctctttcttcaattcattgactatgatatgtctcaacgacacacacagataggcagatatagattgaggcacagcacaggtttctcttttttcaaagatatatacgaacaacgtctgtatcgcatctgtgaccaaatcatcatcaccggctatcttcatgccatatccatacagcaaatctgcatattgctcataaagctgccggaatgctccttcatccccccgctgaatcttactccagaataatgtattcatttccctcccctctcatttatatgagatatgtttctttcgtttttaccctttcttttagttaaattctataaaacagcgattaaaattcacttgtaaaatggaattttatgtgtttaaaatccatttgagccatttgaagtacataaccggagtcggcaaggaacacatcgcgtccctctctatcctttgccatatactgatatttacgtttcttgaaagcttccaactctgccggatcatcactttccacccagcaagccttatacagacttaccggctcccaacgacaagatgcattatactcgttcaacaaacgatactgaattacctcaaactgcaactgtcccaccgtaccgataatcttacgtccattgaactgattgacaaacaactgtgccacaccttcgtccatcaactggtcgatacctttcgccaactgcttctgtttcatcggatctgcgttctcaatgtacttgaacatctccggtgagaaactgggtaaaccacggaaatgcaatatctcaccttccgtcagcgtatcgccaatcttgaaagtaccgttatccggcaaaccgataatatcgccggcataggcctcatcaatcgttgttttacgctgtgccataaactgagtaggcgacgaaaagcgcatcgtcttcccgtggcggacgtgctgataaggtgcattgcgcacaaacttaccggaacaaatcttacagaaagcaacacatgaacggtggttcggatcgatattggctgtaatcttgaagataaatccggtgaacttaggttcgtccggttttacttcacgttcttccgcttgtacaggacgagggctcggagcaatctccacaaagcagtttaacagttcctgcacaccaaagttattcagtgcagaaccgaagaataccggtgcgcaatctcctgccaaataagactcgacatcaagttcgggataaacgccttcaatcagttccagatcaccacgcaatttgtctgccaacggctttccaatctgctgatccagttcctccgtatgtatatcgacttccaccttttccgtcaccatttgtttagacggttgatacaagtccaatttctgctcatatatattgtatactcccttgaaacgtgctccctgctcaatcggccaggacaaaggacgtacctgaatcatcagttcttcctccagttcatccagcaagtcgaaaggatctttaccttcacggtccatcttattaacgaaaataattaccggagtctttctcatgcggcacacttccatcaatttccgtgtctgggtttccacacctttcgcaccgtcgaccacgatgataacgctatctaccgcagtcagcgtacgatatgtatcttcggcaaagtcctggtgacccggagtatcaaggatgttaatcttgtaatcccgataatcaaattccattacagaagtcgtcaccgagataccacgctgtttctcaatctccatccagtcggatgtagccgttttcttaatcttattactttttacagcacccgccacctgaatctgaccaccgaaaagcagcagcttttccgtcaatgatgtcttacccgcatccggatgcgcaataatggcgaacgttcgccgtctctgtatttctgtattatctgccatatatattataaggtgtcaatgcatcttttgaggctttcctcccaatgagggatttcgatgccgaacgttgtttttatctttgtcttatccagtacggaatatgcaggacggttcgccttcgccggatattctgccgtgtgcagaggtttcactttacatgaagtaattcctgccaagcgatggatagccaccgtaaaatcataccatgagcaaacaccttcattgctgaaatgatagatgccgcgaactatacctttatttataatggtatagatagcttgagcgaggtcattggcataagtgggcgttccgatctggtcgaaaaccactcccagactgtcacgttctttccctaaacgaatcattgtctttacgaaattattgccgaaagtggaatagagccatgaggtacggataactaccgctttctcacaataattcatcacatcatattctccttccagcttagtagtgccatatacagaatccggacaagggtcacaatcttccgtataaggaatgtgggcagtgccgtcaaacacataatcggtagaaacctgtatcattgccgcaccattaaattgtgcagcacttgccaactctttcgccgcttcacaattcaacttataggccagttccgggttatcttccgctttatctaccgccgtgtaagctgcacaattcacaatcaattctattctcttttccgcaatataagcccatacagcttgtttatcacagatgtccagttcctgcacatctgtgaaataatacgtatgttgtggattctcttttgcaagtacttgcatttcgttgccaagctgaccgtcggcacccgttactaaaattctcatttattcatcaagttttaattcacctttacggtctttatcataatagtttgccagcatagaaagaaaactactgatagcctctatcgctttcgccgtcccttcactgatcggcttcttttgcaaacgtagtaagagcacaccgtacaacgcttcaaagcacgtttccagttccggttcctcctttttcccgttcttagtccgtagctctacaataaatggcaatgccttgaaataggcagcactgtaaaaagggaatttaggagaagaagataaagcattatgcaactccgtcaggttgagaataacattcttattgatctgtaaatgtcctttctcacgtaccccttcttcactcatcatcgttatcagattgccataccactctctcatggcagcacgctggtcctccggataacggacaatcacattagtctccagttcttccggttcacaatgattggcacggatgaggtcttcttcctgccacatatatataagatattcggcaatgtttctctctttcagttgttgagctatttgattcataatgttatctcctaataaattgactctcccaacaaagtataaatcaatccagctacagataccaacatcacaatgcttccaatgacacgattcagtatccaaatgccacgcagattgaacttagtacgtaccttgttcacaaagtaagtgattccgagccaccaagtcaatgcgccggcagcgatagcaaaatatcccgttatctcttcaaagactaaaacgccctgttgtacaaaggcaaaacgggcaaaaagtccgatgaacaggaatatgattaaagggttagaaagagtgacgaaaaatgcagttataaaattatgaaaataagatcccttattggacgaagccggacggatagaatttaccggattactgcgaaaggtataaattccgaaaacaagcaacataacgctgccgagcaattgcagataaaaacttcctttattaatataatcggaaacgaagctcatgccataacccgtaagcagagcgtaagctatatcgctcaaagaggctcccaggcctgtcacaaatccgtaccaacgccccttattcaaagtcctttggatgcataatacgcccaccggaccgagaggtgcggacacaacaacgccaataataaagcctttaactaatatatcgaatattgtctctatctgaatcattccgcaaatatcgcacttttttgtgatatgagaataggatattaacgttttttccaacgaatcatccctaattcatgaagcaggagaaatttaaaataagacttcgaaaacgcggacagcgcaaattattccctttatccctaaaagctaaatctttgtacacagagaactagcagcccgtaggtattaatttattcgtctgacagctgtcagacgaataaatggttgcaacatcaggaacagtttttaggtatacaacaaataaatccataagaaaccgatattaattcatcgcaacgcaaaaataagtcggcccataaaaaggaaagccgacaagatatttatttccgttttatttctcaccaccaacgaatttgcttatctttgcaccacagaaaaagagaagagtttctcccgtagaaacttcaatcgtaaatcgtaaaatcgtaaaatcgtaaatatacaacatgattctttttttcagaaccccttccaagagcgtgattgccgtagagagcaatcatcagctcaccccggacgaaagtaataaactctgctggctttttggagaagccgtgacggaaagtgaagaaaacctgaaaggctgtttcgtcggtccacgccgtgaaatgattactccctggagtacgaatgcaggagaaatcacccaaaacatgggactcgaaggtatcacccgcatcgaggagtattttcccgtaaaggatgaaaacgccgaccacgacccgatgctgcaacgcatgtacaaaggactcgaccaaaacgtattcactaccaaccgccaaccggaaccaattatctacatcgaagaccttgaggactacaacgaaaaagaaggccttgctctttcaaaagaagaaatggactacttgaaaaaagtagaaaacgacctcggacgcaaactgaccgactccgaagttttcggttttgcacaaatcaactccgagcactgccgtcacaagatcttcggcggaacgttcatcatcgacggtgtggaacaggaatcctccttgtttcagatgattaaaaagactacacaagaaaatccgaataaaatcatttctgcttataaagacaatgtagcctttgcagaaggtccggttgttgaacagtttgctccggcagaccactcaaaacctgatttcttccagatcaaggacatcaagagtgttatctcgctaaaagcggaaactcacaatttcccgacaaccgtagaaccgttcaacggtgcttctaccggtacaggcggtgaaattcgtgaccgtatgggtggtggtaaaggttcatggccgattgcaggtactgctgtctacatgacttcttacccacgcacagacgaaggccgcgaatgggaagaaatccttccggtacgcaaatggttgtaccagactccggaacagattctgattaaggcgtccaatggcgcttccgatttcggaaacaagttcggccagccactgatctgcggttcggtactgactttcgaacatacagagaacaatgaggtttacggctatgacaaagttatcatgcttgccggaggtgtaggctacggtacacagcgcgactgtctgaaaggcgcaccggaagccggaaacaaagtagtcgttatcggtggtgacaactaccgaatcggacttggcggcggttccgtatcttcagtagataccggtcgttacagtagtggtatcgagttgaacgccgtgcaacgtgcgaatgcagaaatgcagaaacgtgccaacaacgtagtccgtgccctttgtgaagaagatgtgaatccggttgtttctattcatgaccatggttcggcaggtcacgtcaactgtctgtcggaattggtggaagaatgcggcggtctgatcgacatgagcaagttgcctatcggtgacaaaacgctgtctgccaaagaaatcatcgctaatgaaagccaggaacgtatgggacttcttatcaaagaagaagctatcgaacatgtgcgcaagattgcagaacgtgaacgtgccccgatgtacgtagtcggagaaacgacaggcgaccaccgctttgctttccaacaagctgacggtgtacgtccgttcgatcttgccgtagaacagatgttcggttcatctcccaagacatatatgatagacaaaaccgtagaacgtcattatgaaatgccgaaatacgaattgtctcaactgcatgaatacctgaccaatgtattgcagctcgaagcagtggcttgcaaggattggctgaccaataaagtagaccgttcggtaacaggtaaagtagcccgtcagcaatgccaaggtgaacttcaattgccgttgagcgactgtggtgtcgtagcactcgactaccgtggcgagaaaggtatcgctacctctatcggacacgctccgcaagcagcattggccgatccggctgccggttctatactttctgtatccgaagcactgactaaccttgtctgggctcctatggcagagggcatggacagcatctccctgtccgccaactggatgtggccttgccgttcacaggaaggtgaagacgctcgtctctacactgccgtgaaagcattgagcgacttctgctgcgccctgcaaatcaacgttcctaccggaaaagattctctgtctatgacgcagaagtatccgaacggcgaaaaagtaatttctccgggaacagtaattgtatcggcaggcggcgaagtttccgacgtgaagaaggttgtatctccggtattggtaaacaacgaaaaaacaactctttatcatattgacttcagcttcgacgaactgaagctcggcggttccgcctttgcacagtcattaggcaaagtgggtgacgatgtgccttgcgtacaagacgcagagtatttccgcgatgctttccttgccgtacaggaactggtaaacaaaggattgattcttgccggacatgatatttctgcgggtggtctgatcactacattgctcgaaatgtgcttcgccaatgtggaaggcggtatggaaatcagcctcgacaagatgaaggaacaggatattgtcaagattctgtttgcagaaaatccgggtattgttatccaggtcagcgacaagcacaaagaagaggtgaagaagattctggaagacgcaggcgtaggctacctgaagttgggtaaacctaccgacgaacgccacatcctcgtatccaaaggagacgctacctaccaattcggtatcgactatatgcgtgatgtatggtattcttcttcttacctgctcgaccgcaaacaatccatgaacggttgcgccaaaaaacgttttgaaaactacaagatgcagccggttgaatttgctttcatgccagaattcaaaggcaaactttctcaatacggtattactccggaccgtcgtactccgagcggtgtccgcgcagctatcatccgcgaaaaaggaacgaacggcgaacgcgaaatggcttattcactctatttggcaggttttgacgtgaaagatgtgacaatgaccgaccttatcagcggacgtgaaacactggaagacgtaaacatgatcgtttattgcggcggtttctccaactccgacgtacttggttcagccaaaggctgggcaggcggtttcttgttcaacgaaaaggcaaaagaagcactcgataaattctatgctcgtgaagatacattgtcactgggtatctgtaacggttgccagttgatgatggagcttggacttatcaatcctgaacacaaaaagaaaggtaagatgcttcacaatgattcccataaattcgagtctacctttgtcggcctgactatccctaccaaccgcagcgttatgttcggttcattgagcggtagcaaactaggtatctgggtagctcacggagaaggaaaattctctctgccttacgatgaagacaaatataatgtagtggcaaaatacagctatgacgaatatcccggaaacccgaacggttccgactattctatcgccggacttgccagcgccgacggccgtcatctggctatgatgcctcacttggaacgcgctatcttcccatggcagaacggttgttatccggcagaccgcaaaaacagcgatcaggtaactccgtggattgaagcatttgtcaatgcccgcaagtggattgaagaaaaggtgagataaataattgctttatattttttaaggctggtacttcccaaaaagtaccagccttttagtttatcccaatattcctactacctaaattcgtttatatacaactaaagttccacaaataagcactaaatacaaatagctgaaaaagctcctcatccgcttcaattcaagtacgacgtaatccttactccaaaattttgtagtgtcgaaaaatcttcttaattttgtcaaactttccccctcagaacaagattcaataacccttaaaagtcctatttatatgaaaaaatggatttttctaatcttattgtttcctctaacctgtatcgctcagacgtaccaatatattggagtggaagatgggctaagcaaccggcgagtttactatatccagaaagacagaaccggatatatgtggttcctcacccatgaaggtattgacagatacaatggaaaagatttcaaacgatacaaactaatggacggtgacgtagaggttaattcgctactgaacctcaattggctatatattgataaggaagatgtattatgggaaatcgggaaaaaaggaaagatattccggtatgaccagatccacgactgcttcacactcgtatataaactgcccatagagaacttccgtgatttgccggctccggtaagtttcgcatggctcgatcagagcaagcatatctggttgtgtaatgaggaaactatctttatttataacacggatacaggagaagtcactcacataaagaatgacatcagtgaagaaatcaatgacatcgaacagattgacgacacacattacttcattggcacggaaatgggaatccactatgccaagttggaaaacaacacactggaacttattcactgcgacaagctggagaatgtgaaagcacaaatactcgatctacatttcgacacaaagattcgtaaattgtttatcggaactttccaacggggagtgctcatctatgatatgtcgaccaagtccgtcacacaacctccacatagtctgaaagatatcagcattacacgaatcaagcccttaaacgccaaagaattgttgatagcgtcagatggcggtggtgtgcataaaatgaatgttgaaacctatcagatggagccttacattattgctgattacaacagtaataacggcatgaacggcaacagtatcaatgatctttatatagaagaagaacggatatggttggcgaactaccctatcggaatcaccgtacagaataatcgctattccagctataaatggatcaagcattctatcggcaacagacagtctttgataaacgaccaggttaattcgattatcgaagacagtgacggtgacttatggttcggaaccaataatggaatcagtctcttaaattccaagaccggacaatggcgttccttcctcagttcttttgagaagaaccaggatagcagaagtcatattttcactaccctgtgcgaagtgcttcccggagttgtctgggccggcggatacttctccggcatttatcagatagacaagagatcttccaatgtcagctattttactccggcttcgtatgcatatgagaacatacgcccggataagtatatacgtgatatccgtaaagactcacaaggaaatatctggagcggaggattttataatctgaaacgtatcaatgtacacactaaaaatatacaactgtaccacggactgaactccattactgcaattctcgaacgcgatgccaaaagtatgtggataggcagtgcgaccggattgtttttattggataaagaatcgggtaaatatgaacgtatcaaacttcccgtagaatcaaactatatatattctttataccagaccaagaaaggatcgctatatataggaaccagtggctccggattattaatttacgatcctcacaccaaactgttcactcattatcatacgggaaattgcgcattgatttccaacaatatctataccttgctttcagacgctgacgaagatattctgcttagcacggaaagcggtctgaccagcttttatcctaaccaaaaaacatttcacaactggacaaaagaaatgggacttatgaccacacatttcaatgcattgtccggtaccctgcgaaagaacaacaactttattttcggaagttcgaacggggcagtagagttcaataaagacatgaaacttcccagaacctattcttccaaaatgatattcagcgatttcaaactgttttatcaaacgatctacccgggagacaaaaattccccgctaaaggcaagtatcaacaatacgaaagagctgaaattaaaatataaccagaatattttctcgttacaggtttcttctatcaactatgactatccttctaatgtcctttattcctggaaactggaaggcttttacgaagaatggagcaaaccggggacagaaaacacaatccgttatactaacctcgcaccgggaaaatatacgttaagagtacgtgctatctccaatgaggaccagcgtattatgctcgaagaaaggagtatagatattatcatcgcccagcctttttggctgaccgtttgggcaatgttgctctatatcgttatccttgtctttatcgctgctgtctcattacgtattctgatcctaaggaaacaacgtaaagtgtccgacgaaaagattcatttctttatcaacactgcacacgacatccgtactccgttgacgcttatcaaagcgccactggaagatcttcgtgaaaaagaagaactaagcaaggaaggaatatccaatatgaatactgcattacggaatgtaaatgccctgctacgtctcaccaccaatctaataaacttcgagagggcggacgtatattcctccgaactatatatttcggaacatgaactgaacacatttacaaccgaaatatacaatgctttccagcagtacgccaatatcaaacatatcaacttcacccacgaaagtaatttcaggtatatgaatgtatggtttgataaggaaaaaatggaatcaatcctgaaaaacataatctcgaacgccttgaagtacactccggaaaacggtaatgtacagattttcgtgtccgacaatacagactcgtggagcgtcgaagtcagggatacaggaatcggaattccggccagcgaacagaaaaaactgttcaagctgcatttccgtggcagcaatgcaatcaactccaaagtgacgggtagcgggatcggactgatgcttgtctggaaattagtgcggctgcataaaggtaagattaatttgtcgagtgtggaaaatcaaggttcggttatcaaggtatctttcccgaaagacagcaagcgtttccgtaaggcacatctggcaacactgagcaaacaacgtcaggaaaacagaaccctaagcaatgtacctgctccctcacccgaaatatacgaaaacgcacataagaagttgaacggtgaacaccggcggattctgattgtggaggataacgatgaattacgcaactatctgttgcagacattatcagaagaatatactgtacaaacgtgttccaacggaaaagaagcgttgacgatcatccccgaatacaaaccggagttggttatctctgatattatgatgccggaaatgcggggagacgaattatgcaaggaactcaaaaacaacatagagacatcgcacattccggttatcctgctgacagctctgaataatgagaaagatatcttgtccggacttaaaatcggtgccgacgaatacatcttgaaaccgtttaatataggtatattaaaagcgactgtcgacaatctgctgactaaccgtgctcttttgcgcagtaagtatgccaatctggagctggatgatgaggaagaagatgacgaatgcatcaactgctcacaggacattgactggaagtttattgccaacgtcaaaaagcatataaaagacaatatagataacccggcccttaccgtagatgtactttgcaacctggtaggcatgagccgtacaagtttctacaacaaactcagggcattgaccgaccaggctccgggagattatatccgtctgatccggttgaagtatgccgtgcaattattgaaagagaacacacatagcataacagaaatagcagaaatgacaggattcagtgatgcgaaatacttccgtgaagtattcaagaagcattttaacgtaagtcccagccaatacggcaaagaaaagagaacaaacaagaaaggaggagaaaagaaagaatgaacatctatctcgaatcatttggaattttttttaaaataggcgcctttactatcggaggagggtacgcaatggtgccgcttattgagaatgaaattgttacgaagcggaaatggattgcgcaggaagattttatcgacctgctggctatctcccaatctgctccgggcattttggcagtcaatatttctatctttataggatacaagttgcgtggtatccgaggaagtattatcacagcattaggaacaattttgccttccttcatcattatattggcgattgctctatttttccatagttttaaagacaacccgattgtggaacgcatcttcaaaggaatccgaccggcggtagtggcacttattgccgccccgactttcacaatgggccggtccgctaaaatcaaccgccacaacctgtggattcctgttgtttcggcactgctgatctggctattggggttctcgcctatctggattattattgctgcgggagtgggaggcttcctctggggaaaatttagaaaagtagaaagttgagaatggagagtcgagagttatcgttccctgttcattattcaagattcatggtaaaaaattaaaaagagatgatctatcttcagttattctatacgttttttaagatcgggctctttggatttggaggaggttatgcgatgctctccatgattcaaggggaagtagtaacccgttatgattgggtgagctcgcaggagttcacggatattgttgcaatcagccaaatgacaccgggacctatcgggattaatgcggctacgtacgtcggattcacctctacggggagtgtcgtgggatcggtcattgctacctttgctgtagtcctcccctccttcatcttgatgctgaccattagcaaattcttcctgaaatatcagaaacatccggtagtagaatccatatttagcggactgcgtcccgcagttgtcggcctgttggcttccgccgcactggtattgatgaatgtagaaaatttcggttcaccgacaactgacacttactcattcgttatcagtattatcatctttctagtcgctttcatcggaaccagaaaatataaagctaatcctatattaatgattatagcctgcggcattgcaggactattgctttattaattgctggggtggtaggcggatacacaatattgaaaataaacgacttatgtattttcctaccacctcccccctacggggactcctccttcccgaaggaggagaattgaagatactactgaattgttagtcagcctctttttctattcttcacttattacagttttacttttatcacagttttactttcttgctaaccgacttcgattcattatgaagacggtctaacgcagtcaccacatagcggtactttgtttttcctgtttcgtatggaagtttgtagaaaggattacgggtgatagcaacaatatgtgaagggtcgtcaagattcaccttttcttttctgccaaaacgatagaccacatattgcacagccttatccatttccgtttcagctttcggagcagtccagaaaagcacatagccgtcttcagtccatattttcttcatcttgcgcaccttgtccggagccttatcatccataaagtcgaatacggggattaatgccggatatttgtgatattccgaaaccagcgcatcgcgatatcttccctgattttcaacaacagctgccgcataccattgacagctaccgccaatcgtctgataagcacgctgtaaagccattttccggggaagctgattcatagaaggattctgcgggtcagcgtgctgaatcgtatttgtcactgactggccgataaataacggacggttctccgaatgcgtagcccaccacttcaccaatgtctcatagtcggccgccttatgaccgatttcccagtaaatctgcggaatattataatcaatccagccttcacgcgcccagagcagaacatcagcatacagatcgtcataattctgcaagccattggtattacttcccaacgggtcacttttctgattacgatagattccgaacggactgattccgaactttacccacggcttcaccccccgaatggtttcgtgcaatttcttaatcaacacattcacattactacgtctccagtccgccttgttagtaaagcctccgccataacgggcaaaacttgcgttatcgggaaaatcgactcccttaataggataaggatagaaatagtcatccatgtggatagcgtccacatcatagcgggacacaatatccgtcacgatcttacagatatattcacgactctcgggaagtgccgggtcgaagtacaattggtctccataagtaacaaaccattccggatgctgattatatatatgttccggcgccaactggttcttcagggaggttttcacccgataaggattaatccaggcatgaaactccatattccgtttccggcattcctcaatcatgaactgcatcgggtcccacataggcgaaggcatttgtccttgtgtccctgtcagaaaacggctccacggttcatgttgcgaagcatacaacgcatccgcttcgggacgcacttgaaagataatcgcattaatacccgccccttgaagcgagttcaactggctaatcagtgtttgtttcagtcgttctgtgggaacaccgcgaaactgtccgttgacagcctgtatccatgcagcacgaaactcacgtttgggatatttgtcgcccgtcggcacctgtgccctcactcccacagccagaagaagagccaaaagtaaaagatagtttttcagcttcataatattcttaaatcgtaataatgtgacgcaaagataatacaaactcccgataaattcgctaactttgccgactaccataaaacaaggagcattttatgtcagaaaataactatatttcgatcaaaggcgcacgagtaaacaacctaaaaaacatcgatgtagatattccacgcaacaaacttgttgtcatcaccggattatcaggttcaggaaaatcatctctcgcttttgacaccctctacgcagaaggacaacgccgctacgtagaaagcctaagtagctacgcacgccagtttctcggacgaatgagcaaaccggaatgcgattttatcaaaggcatcccgcctgcgattgccatagaacagaaagtaaacagccgcaatccccgttccaccgtaggaacttccacagaaatttatgaatatctccgtttgctgtactcccgtgtagggaggacatacagccctgtaagcggacaggaagtgaagaaacattcgacggaagacatcatcaactgtatgctatcacacccggaagggacaagatacaccgtactgacccctatccacctgcgtgaagaccgcagcctgcaacagcaactggaaatagacctcaaacagggattcaaccgtatcgaagtgaacggtgagatgaaacgtattgatgaatacaagcccgtagcaggcgacgaagtttatctgctggtagaccgtatggcagtagccgacaccaaagatgctatcagccgcctcaccgactctgccgaaacagccatgtacgaaggcgacggaacctgtatgctacgcttttacctgccggacggaacaacacaactattctccttcagcacaaagttcgaagcagacggtatcacttttgaagaacccaatgaccagatgttttcattcaactccccgatcggtgcctgccccacctgtgagggcttcggcaaagttatcggtatagatgagcatttggtggttcccgaccgttctttatctgtttatgaaggagcgatcgtatgttggcgcggtgaaaaaatgggagaatggaaagaagagctgatccacaatgcggagaaattcgacttcccgattttcactccttattatgaactgacggacaaacagcgccggttgctttgggaaggaaaccaatatttccacggtattaatgacttcttcaagatgcttgaagaaaatcaatataagatacaatatcgtgtgatgcttgcccggtatcgcggaaaaacactttgcccgaaatgtcacggtacccgtctgaaaccggaagccggctatgtacgcgtaggaggaaagaatatttccgaactggtagacctgcctatttccgaattaaagcagttcttcgatcacttggaactgaacgagcacgacagtaatgtagcccgccggattctgatggaaataaacagccgtatccgtttcctgattgatgtaggtctgaggtatctgacactgaaccggctcagtaactccctgtcgggtggagaaagccagcgtatcaatctggcgacatcactgggaagcagtcttgtaggtagcctctatatcctcgacgaacccagtatcggtctgcacagccgtgacaccgaccgcctgattaatgtgctgcgccaactgcaacaactcggtaacacggtagtagttgtagaacatgacgaggaaatcattcgtgcagcagattatattattgacatcggtcccaacgccggacgtctgggaggagaagtcgtctatcagggtgacatgaaagacctcaaaaaaggaagcaacagttataccgtccgctatcttttgggagaagaagaaattcccgtcccccaacatcgccgtccgtggaataattatattgaactgaaaggtgcacgcgagaataacctgaaaggagtagacgtccgcttcccgctgaatgtaatgacagtggttaccggcgtttccggttccgggaaaagtacgctggtacgtgatattttcttccgggcattgaagcgtgagttggacgaatgcagtgaccgtccgggagaattttcatctatcggaggcagtctgcgcgacttacggaatgtagaatttgtagaccagaatccgatcggcaaatcatcccgttccaatcccgtgacatatatcaaggcctatgacgaaatccgcaagctatggtcggagcagccactcgccaaacaaatgggatataccgcgggtttcttcagtttcaacagtgaaggcggacgttgcgaagaatgtaagggtgaaggtaccattaccgtagaaatgcagttcatggcagacctcgttctggaatgtgaatcctgccacgggaaacgtttcaaatccgacacactggaagtgaaattccacgacaagaacatctttgatgtactggaaatgaccgtgaaccaggcgattgaattcttcaatgaacacggacagaagaaaattgtaaaaaagctactcccgttgcaggatgtaggactcgggtatatcaaactaggccaatcttcttccactctttccggtggtgagaaccagcgtgtgaaactagcattctatctgagtcaggagaaagccgacccgactctgtttatctttgacgaaccgacaacaggtttgcatttccacgacatccgtaaacttctggatgcttttgacgccttgatccgccgtggacatagcatcgtaatcatcgagcataatatggatgttatcaaatgtgccgattatgtgattgacctcggcccggaaggtggagataaaggtgggaacattgtagcggtaggtactccggaagaagtagccgcttgcggagcaagctatacgggtcagttcctgaaagaaaagctgaaataagtcaagagtcagaaatggagagttgagagatgttttgcagcaaatatagcgcaataactctccactctccattctcaaattatttaaaagtagaatccgaatcctactttaatgccgaaacgtgaattatcggagtcatcaaaacgccatttataataaacagccggttcgatagttactgtccgcgacaggaaataagcatatccggcttcgatacccaatccccaatcgttgttatgaccgccacctttataacgtctgcgttcccaatcgaggccaccaccgatataaacacctgtagtattaaaataacaacgtgctcccgtacctaatgtatatatatctaccggttgtgaccagtcagctcctgcatttaccattaatgcaaaaccgtctgccagaaatgtaccggcttgcgcgccgatcccaaatttagcatcatcatttttactgtaagaaaagtccaaccctgtaacggaaggatttagaatcatagttcctttctcaaattgtgcctgtgcagctattgatgccaacagcagacaaatagctaaagctaatttcttcataaacttacttttttaagtgaatagattgttcgtcttttttacggcgttcacgcatctgttcctttttgcggaggacaagccaaagaagcaggacaatgacataagaacccgccaccgtcagatacttttccgtctggctcacttccgtattacggggtaacagataagccgccgtcacggatacataaataaggaatgcaagtgcaactcccgttgatctttttattttcttcattctgataattttcttgttttctgcttgctcagccagacaaagaaccacacaatagcaaccaccacacatcctacaccgatgtaataagagattgcgtgcgacagtcccaaaccttcaggagcaatacatatataagtagaacacacacttgtcataaacaaggcaggtatcaaagtaatgacatacggtttcttggataccgccagataaaccgttattgcccagagggtaaacacagccaatgtctggttggcccaggcaaaataacgccagatcatattaaatccgttcgcatcacgcaggctatacagaagtaaaccgatagccgccacgaacatcggaatacagatgtataaacgacgacgcatactcttttgttccaagcccaggaaatccgccacaatcagacgggcagaacggaaagccgtatcgcccgaagtaatcggagcagcaatcactcccaagatagcaagcacacccccgattgttcccagccactcttttgtgattgcatctactatgacggaagcattactttcttccatcccattctcatggaaaaagtaagtagcggcggcagcccaaatcagtgcaacgatgccttcggttatcattgcaccgtagaacaccggacgcccatgacgttccgaagtcatgcaacgagccattaaaggactttgtgtagcatggaaaccggaaattgcaccacaggcaatactcacaaacattatcggaaagataggaagttcactcgcctccgggttcgtattttgcagtccgtcccacagttccggcaaagcgggatgattcacataaagcatgacgagaatccccacagccataaacaacaaggcaattgcaaacaacggatatatcttacctataatcttatctacaggcaacaatgtagccaaaatataatacgcaaacacaacgataatccagaacgtagcatccagactttccggcgtcagtttcgccagcaatcccgcaggaccggccacaaaaaccgaaccgaccaaaatcatcaggataacggtgaaacctctcattatctgtttcgtcgtaagtcccaaatagcgtccgataatttccggcaaactctcgccctcatgacgcaaggaaagcattccggcaaaataatcgtgcaccgccccggcaaaaatacttcccaacacaatccataaataagaagaactaccgaatttagctcccattattgcaccgaatatcggacctagtccggcaatattaaggaactgaatcataaaaatcttccaggtcggcaatggaatatagtctactccatcagccttggtcagagccggtgttttacggtcgtcgggaccaaagacgcgttccatcaaacgtccatacgtaaaatagcctactatcaacgccagtaggcatagagtaaatgttatcatagtgtgtcgtttttttagcttggcaaatgtaacataatctcacgaaacagcccaacattaccgacacttttactaactttgcagggatttaaaacaaaaaataaagaatatgcgcctatctattctcattctttcacttttgtttcctttcctctccgtggcagcgcagcccaaacatgaagtccgcgccgcatggctcacagcgttgtatggtctcgactggccccgcacacgtgctgtcagtcctcaaagtatccgcaagcaaaaggaagaattggtggatatcctcgataaactgaaggctgccaatttcaatactgtcctgtttcagacacgcacacgcggggatgtgttatatccttcgtctatcgaacctttcaattctatcctgacagggaaatccggcggaaatcccggttatgatccgctcgcttttgccattgaagaatgccacaagcggggtatggaatgccacgcctggatggtaactattccgttgggaaacaggaaacacgttgcctcgctcggcaaccggtccgtcaccaagcggatgaaagatatttgcgtaccttacaagaacgaatatttccttaatcctggacatccgggaactaaagaatatttgatgaaactggtacgggaagtcgtgagccattatgatatagatggggtacatttcgattatctgcgttatccggagaatgcccctctctttcccgacaaatatgatttccgccgatacgggaaagggcgtacactggaccaatggcggcgggataatatttctgaaattgtacgttatatatataaaggtgtaaaagcaatgaagccttgggtgaagctcagcgccagtccggttgggaaataccgggacacttcgcgttatccttcccgtgggtggaacgctttcttcactgtttatcaagacccgcaaggctggcttggcgaaggtattatggaccagatatatccaatgatgtattttcagggaaacagtttctatccttttgcccttgactggcaggagcaaagcaacggacgacaagttattccggggctcggcatctatttccttcatcccgacgaaggtaaatggacacgggacgagatagaccgtcaaataaacttcatccggaatcataaaatggcgggtgaaggccactaccgggtaaaatatctcatggagaacactcaaggcatctatgatgaactaatcgagaacttctacgcatacccggctttacagccaccgatgccctggttggacaatgttccgcccacagctccgtccgaactgaaagtaaggactatcgacagtggatatacggaattgaaatggcaggccgctaccgacaatgatccacgtaataatccgatgtacattatttatgcatcgaatgaatatccggtagacaccagtcggccggaaaatatcgttgcacagaatatcagagagacaagttatatctacgcccctatcctgccttggaatgccaaaaagcattttgccgttacagccgtagaccgttacgggaatgaaagtacagcggcacagaaataacttccccctacccaggagcaaagagccggattaaatactacataaggcataagaatgcacgttttacagtaagataacccgtattttgcagcttaataatccggttggagtatcagtctttttatagcccacagacgcaggctgtacagcccacgcatgcaaaccgtacagcacacgtatggaggctgtacgtcacacagctgtgggctataaatttaacgcctttcaaggcggattattaagccatgataatcggatttatgcgtgcccattacaataaaaacaagccagcttacgcgacctttatccagttgtcttatctatgacagataccctgttttttgcagtaaaagtatgatagataccccctaatagaaggcatctatcatacttatttctctgataattagaagaatattaaaatcaatgatagatatgacagacatttatttcattatgtaataagtaaaaacacggataaaaatcaaagaggaataacaactttatgttccttctgatttctgaaaataacaagctctgcctttttacttgtatccacgtgcttcaacgcctcctccatatcatctaaattattgaccggctttccatttacactaagaataacatcattcgaagcaataaaatctcggacttgattactacctaagacatctacagaaacgacataaactccccgttccgtatccatacccgtagcagaacgttcctccaatgtatccagattcttaaacgttacccctttccaaaacatcgttttagtatccgttgcatgacctgccacaagtggaacgggcatcacaggacttgcagccaaccgtttcaaacgagaagacagcactccgaaattattcatcggaaaattacggaatcctcctttggttacgacttcagaatcgtcagctacattaaaattacctttcgcagcatttataaacttgactgtggttactatagaatgagcatccccaccaagttggcgagctgcaagatacgccaaactgtctgcaaatatgttataatctacctctctgccccaaccacgcacacttataggtttatatttggtcattacaatgttacgtgaaaagacatctccgctatttttaaaccacaaatgcgggtgaagcgtattattgacgataatattattctcaacagtccgataaaacccttcacgcaatttaatgccgccattcaaacaaagattattgtaaatctggtaattactggaaccatcgtccaaatctatatcccatcctctatcacaacgcaaacgattatggcggataatgataggttcgaccacgtctgccaaaatcaacgcaggcttttcattcgttatttgcgtcattatattataattcggatgccagaaacggtcacgcccccaggagttgatagttccatgatcacctgtttccttcacggtattaaaaatgtcattgtattcgataatatgtcctccccatgtgccttcgctgatattaattccggcacggggagtattgtaaatactgttatgacttaccgttatgttgcggcacatggaaagctccactccggtaatctgcttttcaaacaaaccgattgtacatatcaagttatcagagacctcgcaataagcaggatgattgtcattctgaggccctttcgtataatccattttatccaaaggaacaaatttcccatacctaaaactcggcgaacgtactcccgccacatccccgacgaagcaaatggcactggctccgatagaagtcagataagaaccggtcactgccgaatagcgattatatttatcaaaaaagacaccattccctcctacgttatggatataacaatcacgcagagcacatttttccgttcccctgaaaacaacggttcctccccgatatattgtccagtccgagcggagcagaggctcatactgttccataaaggtccgtatcgtttgtgtcagctcaattccttgaatcgttatgttcttcaccggctcggatgaagttcccgcaaactcaatcaagtttttaagttgcggggtctcaaacgtcagttcgtttattttttcatcaggtaaaggataataatacaaccagccttcttttttatcatagtaccattctcccggagcatccaattcttcaaagatattctccaccatcctgttttcattatggattcccataggacggttgttctgccaaccaccttccagctgtaactctcccttttcatttttgcctgtaatacgataatgaaaatcaccccaatcatgtttatgcatggcatgaaggtatcccccttccgggcatttccatttttttactcgttccggggctgttgccaaagcagatgtgccgttaaaacgaacagctttttcatcataattagggtaacgtgccatagatttcaattctccatttacgaaaagcatatccataaccggacttcctttcactacagcccgcatgataccgtttttatatttctcccatttcaagtccagtacaatcccactcgacagtacggttttctctccgggataattctttattatcaattctttcgaatcatttccatcatcagaagtcagcatcaagggcttatctaaaacatatttcccctcccgcaagtaaattgtagtgctattttgatcctttcgggctttttcgacagcttcgtgaattgaatgaaaaggagccaactgactaccatctccacccgatgatgcgtgaggggaaacgtagtatattgattgagcataaatacctataaatggtatcattgacagaaaaagaagaagtgtttttattctttgtgttttcatataatataattattttgactataaaaatatgaacaaagatagcttaaataaaatactctactaacgataaatgaaaaattaacaatctcaggtaaccaatgggatgaatcctatatcaaaaacaaccaagcccacaccattcctttttcaatgagtcggagcaaccaacatccacgcccggtaacagcttctcttatggacaggcaccaaaggtaaatagccggagcatactttcccctccctgatttccaacggataagtggccgacatccgttcatgttccttcaaagcttccccctccgaaggatgataatcaattcccgaacatcctgctgaatccggatgtacatagcagtcatacaggaagcgcgtcatgactcccatattcatgcgcagatttatttctacgcaaggatgaatccgaaaagctgttttttcattttccgggaaccggcaaatcatcatatcaactcccagataacctttataaacagagcttaccgacttagaaagctcacacttcaaacgactctccaagtccgtcaaagcccctaaaggtacgtattgtgaaagtttcccccggattgcctcattagagagcaggtagtttccttcatacattccactctttccggtacggaaaagagaatatccggcaaacgtcacttcacctgccccgtcagaataaaactccaaagcaaaatcctctaccttattatatatgggttccgcaataacccctccctgtaaagcagccacacgcgtgcaccaaccggagataaaaggagtaaatgtacctttgcaccagtttaaccctttcccacttcccgaaagcggagctttcaacaaacacccttcccgttcttccacgaaagatttccattcttccggcgttttcagataataagattctccacagaaatgttcattcaactgtagttcaggaagtaacgatacggacttagaacggtgagagtactcccgccatacacttatttgttgcatggaaggaagtagggattcatccactcccagtcctgaaagtcgtttccgtaaagccgcatcccacccccaaggacggatatccaatgccggttcggcagccaattccggttccgtcattaaatagaccggaatatccaacaactcctgcatccgcttcaaataatcgagattataagcagaagaagccagcaccgcacttccccgttccgcataccacacaggaagcaaagccagttcggaagccatacgcctggcagaagccggcggcatataattcatttcaccacttgccaacgccaaatcatgctccggattgaatatataaagagtctttttagccataccaaatgcaatcaatgctttattctgcaaatatatacaggaaataaacaggaatcttcacaataaagagaaagttgtatttaaaagcacatttttgctatctctactttgcaaatcctaaaaaaagcactatatttgccacccgaaaaacaaagaactgaaatggaatcattctatcgcacacacgcttaccttgttgagcacaccaatgcccccgttcgccgcgatcttatggacgagattgactggagtgaccgtctgattggtatcaaagggacacgtggcgtaggaaaaaccactttccttctccaatacgccaaagagaaattcggaaccgaccgttcctgtctgttcatcaacatgaacaatttctatttctcggggcatagcatcgtagactttgccaacgagtttcagaaacgtggcggaaaagttctgctgatcgaccaagtgtttaagcatcccgaatggagcaaagaactccgtatgtgctacgaccgttatccgaacctgaaaatcgtattcaccggttcgtccgtgatgcggctgaaagaagaaaacctcgaattgcgtgatattgcgaaaagctataatcttcgcggattctctttccgcgaatttctgaacctgcaaacaggtatgaaattccgggcgtacagtctcgaagagattctcagtacacacgaacagattgccaaaggagtgctttccaaagtacgtccgctggattactttcaggattacctgcatcatggattctaccccttcttcctcgaaaagcgtaacttttcggagaatctgctgaagacaatgaacatgatggtggaagtagatatcctgcttatcaaacaaattgagctgaaatatctttcaaagataaaaaaattactatatttgttggctgtcgacggtccgaaagctccaaacgtcagccaactggcaagcgacatacagacatcccgcgcaacggtgatgaattacatcaagtatctggcagatgcacgtctcattaatctggtttatccgaaaggagaagaatttcccaaaaaaccgtcaaagattatgatgcacaactcaaacttgatgtattcgatttatccggtaaaggtggaggaacaggatgtacttgagactttctttgccaactccttatggaaagaccataaaatacataaaggagacaaaaatgcctcttttatggtggatgaagtaatgccgttcaaaatttgcccggaaggtacaaaaataaaaaataacccggatgtgacgtacgcgttgcaaaaggcggaaataggtcgaggcaaccagatacctctctggatgttcggctttttatactaacaaagatttatttacttaaatatttaatttagttatgactaaacagaagaaattcatcacttgtgacggtaaccaagctgcagcacatatctcgtatatgttctctgaagtagcagctatctatccgatcactccttcttcgactatggctgagtacgtagacgaatgggctgccgcaggacgtaagaacatcttcggcgaaacagtattggtgcaggaaatgcaatctgaaggcggtgctgccggtgcagttcacggttctctccaggctggtgcgttgactactacttacactgcttctcagggtcttctcctgatgatccctaacatgtacaaaattgccggtgaattcttgccatgcgtattccatgtatcagcgcgtacattggcttctcacgcattgtgtatcttcggtgaccatcaggatgttatgtcagctcgtcagactggctttgctatgttggctgaaggttctgtacaggaagttatggatttggccggtgttgctcacctgtctactatcaagtcacgcgttcctttcatgaacttcttcgatggtttccgtacttctcacgaaatccagaagatcgaaatgttggaaaacgaagatcttgctccgctgattgatcaggaagctttggctgaattccgtgcccgcgcactgaatccgatgaatccggtagcccgtggtatggctgaaaaccccgaccacttcttccaacatcgtgaatcatgcaacaactactatgaagcagttcccgctatcgtagaagaatacatgaatgaaatttctaagattacaggtcgcaaatacggtttgtttgattactacggagcagaagatgcagaacgcgtaattatcgctatgggttctgtaacggaagctgcacgcgaagctatcgactacttggtagcaaacggtgaaaaagtgggtatggttgccgtacacttgtatcgtccgttctctgctaaacacttcctggctgctgtacctaagactgctaagactattgcagttcttgaccgtactaaagaaccgggtgctaacggcgagcctttgtatcttgacgttaaagactgcttctacggtgcagaaaacgctccggttatcgttggcggtcgctacggtctgggttctaaggacactactcctgcacagatcctttcagtattcgaaaacctggctatgccgatgccgaagaaccacttcactatcggtatcgtagacgatgttactttcacttctctccctcagaaagaagaaatcgctttgggcggcgaaggtatgttcgaagctaaattctacggtttgggtgctgacggtacggtaggtgccaacaagaactctgttaagattatcggtgacaacaccgacaaacactgtcaagcttacttctcttatgactccaagaagtcaggtgggttcacttgttctcacttgcgtttcggtgatactcctatccgttctacttacttggtaaacactccgaacttcgttgcttgtcatgttcaggcttacctgcacatgtacgacgtaacacgtggtttgcgtaagaacggttctttcttgctgaacactatttgggaaggtgatgaactggctaagaacttgccgaacaaggttaagaagtatttcgcacagaacaacatttctgtatattatatcaacgcaactcagattgcactggaaattggtttgggcaaccgtaccaacactatccttcaatccgcattcttccgtatcacaggtgtaatccctgtagaacaagctgttgagcagatgaaaaaattcatcgttaagtcttacggcaagaagggtgaagacgttgtcaacaagaactatgctgccgttgaccgtggtggtgaatacaaacagctgactgttgaccctgcatgggctaacttgccggatgatgcaaaagttgaaaacaacgaccctgcattcatcaatgaagtagttcgtccgatcaatgcacaagacggtgatttgctgccagtatctgcattcaagggtatcgaagacggtacttggtatcaaggtactgctaaatacgaaaaacgtggtgttgctgcatttgttcccgaatggaatcctgaaaactgtatccaatgtaacaagtgtgcatacgtttgtcctcacgcttctatccgtccgttcgttctcgatgcagaagaacagaagggtgctcagttcgaacaactgaaagcagtaggtaaagtattcgacggtatgacattccgtatccaagttgatgttctcgactgtctgggttgcggaaactgtgctgacatctgtccgggtaatccgaagaagggtggcaaagcattgaccatgaaacatcttgaaagccaattggctgaagctgctaattgggaatactgcgctaataacgtgaagactaaacaacacttggttgacatcaagtctaacgtgaagaactctcagttcgctactccgttgttcgagttctcaggtgcttgctccggttgtggtgaaactccgtacgtgaagctgatttctcagttgttcggtgaccgcgaaatggttgctaacgctaccggatgttcttctatctactccggttctgttccttctactccttatactaagaacgaaaacggtcacggtcctgcttgggctaactcactgttcgaagacttctgcgaattcggtctgggtatggaactggctaacgaaaagatgcgtgcacgtatcgtgaaggttatgaacgaagctattgctgccgactgcactcctgctgacgtgaaagaactgttcgctgaatggatcaacaatatgctggatgctgacaagacgaaagaattggcagctaagattatcccggttgtcgaagctaacaaagataaatgtaatcactgcaaacaaatcgcagaactgcaacaatatcttgttaaacgcagccagtggattatcggtggtgacggtgcttcttacgatatcggttacggtggtcttgaccatgtaatcgcatcaggtaaggatgttaacatcctcgttctggatactgaggtttactctaacacaggtggtcagtcttctaaggctactccggtgggtgctatcgctaagtttgctgctgctggtaagcgcgttcgtaagaaagaccttggtctgatggctactacttacggttatgtatatgttgctcagattgctatgggtgctgaccaagctcaaactctgaaagctatccgcgaggcagaagcatatcccggaccatctttgattatcgcttacgctccgtgtatcaaccacggtttgaaagccggtatgggtaagagccaggaagaagaagaaaaggctgttaagtgcggttactggcacttgtggcgttacaacccggctttggaagcagaaggtaagaatccgttccagttggatagcaaagaaccgaactgggaagatttccaaggtttcttgaagggtgaagttcgttacgcttctgtaatgaaacaatatcctactgaagctgaagaactgttcaaagctgctgaagaaaacgctaaatggcgttacaacagctacaaacgtctggctagagaaaactggggtgctgaataattaatcacactctgatacatataaaaatgggagcctgctcaatgcacggctcccatttttatttaaaccggctctgaatagaaatcagtaccgaccttatttggtttattgaattcttcttatttattctttgatttcggaatccaactgtcgaccaattcacaatgttcttttctccacttacgcgctatttcttcttcgtccatgcgggcgtctttcatagctgtcataaaagaactaagttcttccgtcgtcaatttgatacttgcaaagaattcagcagcaaacgggtctttctcactgaatcctttccaagcaacagcatgtatctcttcaaggtcaccatatactttcttcggatcattcagaaatttcaaatcaaactggtcaaacatccaatgtggtgtccagcctgtaataacaatccattctcctttatccattgctttcttcagagacgccagcatagttgagctacttgaagtcataagagtgtatccgtcaagtccgtaagcagagatcgccttatctgtggttttcataattcctgcaccggcatcgattcctactatttcagaagaaaaacggtctttattggctgccagttcgtctatggaattaatggtaacatattgtggtatgaccagtccgacacgtgcttctccataaacctcacccaagaattcaaggctatctccgtattggttcaagtaatctttcatcgttatcggcaaccaagcatccaaaaagacatctgatttctttcctgacatagatacgaaaatcggagcaaggtctgcgttttgcaattcgacttcgtaaccttgttcttccagtaccaccttaaccaagtgactcatggcaataccttctaaccaattggcataagctattttcactttctttttatctacgtccgaattcgtacaggaaaccagtaaaagcagggcggacaatactattcctactaatttatatattctcattttctttcctttctgtttttagtctttcttgttttttcgtcctgccatgccttgggtaatacggtctaagatgatagccaagataaccaccgctataccaccttcaaatcccaaaccgattttcatttgggtaatacctttcaagacgatttcccctaaaccaccggcagcaatcatggcagcgattacgaccatggaaagtgacatcattatcgtttgatttactccggtcaaaatagtaggtaatgccagaggaagctgtactttataaagtagctgccagcgggtagccccgaatgaccgggaagcttccactacatttttagggacttgccggattcccagtccggtaagacgaactacgggcggcatggcgaaaatgatagtcgcaaacactcccggaactgctcccaagccgaagaaaaggacagcgggaatcaagtagacaaaagcaggcatagtctgcatcagatcgagaacgggacgaagtattttatctgcacgcggactgttcgccgtccatacccctaaaggcacgccgacaaccagagccaagcaagtagacgacaaaacgagagcaagcgtttgcatagttgcttcccaaaatcccattccatagataagcaacaagcctaatacggtaaagatagccgttccacgcccggccttcatccatgctgcgacagcaagcgccaggatagttatataaaaaggtattccgaaaagtacatgttgaaatcctataatgaaactaccgatgcctgaattcacggcatcaaaagaagtagaaaaatgcaccatcatccaattaatggcactctctatatattgtcctatattgatcataagtctattgcgttttgaattatttcgtttatttcttctttatctttccccgttacttcgatgattaaggatgataacggaatagtgcccaggaactcacgggtttcgtcaattacccaaacgggtgaattgctctttgtcatcagggggagaatatcttccagtaccgtatcacacaatacggaatggacttccgtacgcacaaccgtttcgatagatttttcctgtttgttacgcagtttcaacaggtcgttcaagcgtacttcacctaccagtttatcgtcggcatctatgacgggaagtactgttatattcttcgcacgcattttacgaatcaagacttcgggaccttcttttttcagacgggctaccaatggtttgtcaatcatcaaagatgaagcggtgataattttactcctgtcaacgttttctacaaagcgggctacataatcgttggccggttcggtcagaatctcttccgaagttcctatttgtactacttctccatctttcatgatagcaatacggtcgcccagtttaatcgcttcactcaggtcgtgggtgataaagacaatagtctttttcatctttgattgcaaggcgagaagttcatcctgcatctgtacacgaatcaaggggtcgagagcagagaaagcctcatccattaaaagaacttcgggattattggctaaggcacgagccagtccgacacgttgctgcatcccgccggaaagttcgcctaccatttggttctcgtagcctttcaatccgacgagtctcatactttccatggctttcttttctcgctcctctttcttcactccttgaagttcgagaccgaacgctatattatgtaatacagaacggtggggtaacagaccaaagttttgaaataccattgccagttctttacgccggacttgcaacaattctttttcagacaccttggatatatctattccattcacaagtacttgtcccgaagtgggacgtatcagacgattaatacaacgcagtaatgtcgatttcccactgccggagagccccattatcacaaaaaattctccttcgttaattgaaatattagcatttttcactcctactgtacacccggtatcttttaggatctccgatttacttttatcttctttcagcatcttgagagctttctgtttctcattaccgaaaatgagatataaatcctttatttctattttgctcatataataatatattggtttagattataatatttgttttgttttcaactgtcgcgcctaccattctcaccaatgataaacaagttgaaagttcgcttggttcggccacattacatgatagcatggcaaccttatgagttttaaatgattaaaaaacagactgagtagtttaaaaggaatagaatttggtaagattatcctctcaatgaacagtaaaaacagtatttttatatatgaatgacagcctgtttttgcatattatttcgacaaagataggcaaaatagattaaagatacaaattttattcagaaacggagtaattccaaaggtgctttttcaggtctacacacccattttgtttgaaagaaactccttcttccaataggatttgtttttgttcttcccaaccgggaacaagacgtcctgatgcattgactactctatggcaaggagtggaaacattatccggcacttgcttcaaagcacgtcctaccatacgggaacattgaggcatccccagtaacgcagcaatacttccataggtggaaactttacccaacggaatctcacacaccacctgatacacttcctggcagaaggtttcagacagactcgctttatctactttataatctttcattgttttatcacttatttcatgtccaaagctaggcaaaaagtataaattttgcaaattataaacatacaacaaacaatatttgcaactttaattgtttttaataaaaataacaccgtactttgtactcgttaaacaaccatattattaacaagacaaacataagtgttatgaaaaagaagaattttctgttcgcctcttgtttattaggcatcttcgcttttagttcctgcgagaaaaacctttatgatgaaagcaaacagcctgaagaagaaaccaaaatgactgacttaatagttcccaaaaactttgattggtcagatactcaagaagttaaagctcaaattacgcctgccgaaacaatagtttccgtgtacttagacaaagaatgtaaagaagaagcattacttttccaaatggatatgaatatcgaatctaatgataaccaatcagtagagtttcctatagcaataccaacatacgtagaaaatgtatatgtgaaatatgaaggagtagatagaatatctattgtaccagtccaagacggaaaaatcgctattaaagctcctcaaatacaaaacattaaaagcagagctgtcataaatacaaaaaatagcaatgaatatggccttctcagtattaacggaacccttatgtttgaagatatgtaccctcaattaggtgattacgattttaatgattttgtagcacggtataatcttagaattctgtacaaatactcacgtggaaaatactatgcacataaaatgtgtataagtgttcaaattagagcagtcggaggtatatataaatatgaaccatatatccgtctgacaaaagtaaaagccgacaatattattatagaaacaactgaaaaaaatgtaaaatctataaaaggtccaaacggagaggcaattatctcatataagagtcctacacctcccagcggatataaatattataatacagaaaagaatgagatgactaaaccagataagtttaaagagatttggatcactttaaaaaatccgattgaatacgaagacgtaatggataaaaactataatatagatatgtatattgccaaagaaaatcataaacaagaaattcatttaaaaggatacgaaccggtttatgatcaacatcaagattatgcggacaaaaataattttgtatgggggattagaacatggggaatttttgatcatgctatcgaaggaaaaaatttcctaaaagcatatcctcaatttaaaggttgggtcactagcggcggaaaagaatataaaagatggtgggaggaagtagattatcgatatgtaattagaaattaagaagtttatcacactcttaacataaaaaagaggtaaaaggaatcattatgaatctttcacctctttttcttttggctataaccaacagccttttatcctatttttttcaataaacctaccttttgataatctatatccggtatattatcaaaagaaagataaatatacctcttacgaactattgaatatattttgcaaattacaaatgaacaaaaaaataatatttgcaacttttcttgctttatctacaaattattacgaaatttacaacggtaaaacaataaagttactaacaaagcaaactactctgttatgaaaaagaaaaatatcctatttgcaacctgtttattgggagcattcgctttcagttcctgcgagaagaatctttatgatgaaagtaagcaatctgagaaagaaatcaaaatgaccgatttagagattcctgctaatttcccgtgggaaacctccaaagacgctaaatgtaaaatcgtatcttccacaacttctttagtgtctatattcttagattccaattgtacccaactgttatctacggtcaatatagaccctgcagctcccgccttgccagtagtagtaccagattatcttgagaaggcttatttaaaatatgagactgtttcagcaggtaataaagtaatagaaacagaagtgacaaatggaatgattaatttctcacttcccgaagatgccaaaccttcagttgctcctgttgtaactagaggtggtggcaaaggagattatactccgcaaccaggtatggaagataatatactcgagtatcctatcggatatggtactgttatgtttgaagatatgtatcctcaattaggagattatgactttaatgattttgtagcctggtacaaataccaattacaggatttcttccacaaagtaggaacatggtatacttatgtcatgcagatcgggtttcagatcagagctcttggaggtattaacgatttttctccttacataaatctggcaggagtaaaatacgatgatattgatgaaataattttccaagaaacaggagacgggatagaattcataaaaggtccgaatggagaagcaattctttcttataccaatccatctaagccggcaggtagcaaatacctgaatacagaaccggaatacataaccacctccggtgttaacacatctatttatatatatttcaaagagcctgtcgagctatccagattacaagataaaatggtagatatttatctagccaaacctgaccatggaactgaaatccatttgaaagggtataagggaatctatccttcttcacaaaatgccaaatattcaaatgaggataattatgtatggggactgaaagctcctgctgcactcaatcatatgattgaagaaaatgatttcataaaaggatatcctaaattcaaagactgggtagaaggcaaagggcataagcaatggtgggtaagccctaagaatgactacctcattctgcttaattaagtttcatgtcacaacatatatttaaagccggaatcatgataaatcagacatgattccggctgtatttttctgaagaaagtttctaacccttcctctttaataaatctgtcgggctctccccaaacagttctttataacatttggcaaaataagaaggggaactgaaaccgacttcataaccaatctccgacactgtcatatccgatgaagcaagcagagacgcggctttctttagacgggcaatacggagtaattcattaggagaataattagtcaaggattttatcttacgataaagctgtacgcggctcaaccccatatctttgcccaaatcttctacgttcaaaccggaatctcccatcttctcatcaatcaaagctttgaatttctctacaaattccttgtccatatcacaaacatcttctttcgccaatgcctgtccgtcaccaaagaattgtttcagacggcgatgcgaatctatcagattacgaacacgtgccaacagtaattgagaactgaaaggtttggagatataagaatccgcaccaccgtcgtacccttgaatcctctgttcatctaaagaacaggctgttaataagataacaggaatatggcatgtttgcagttcgcttttcagacggcggcaacattcaacgccgtcaataccgggcatcattacatcggagataatcaaatccgggacatatttcatagctttgcggataccttccgaaccatctgccgcttcaatgacagtatagtctgcatgaagtaatccatgaacatacagacgaatatccgcattatcatcaatgataagtacagaaggtttggaagaatcatagttcttctccagttcctcttcttcaacgggcacagcgttattcaagggagatacttcggaaacagaggttgcggaagaatcttccaaagaagacacttcgcaggtccgtaccggtaaatcgacagtaaaaacagttccttgcttttcatcactttccactgatatagttccaccgtgcagttcgacgaaagcctttactaaagccaatcctattcccgaaccggcatgatgcatatctattttataaaaacgatcaaaaatattacgaatatgttcggcagaaatcatcgaaccagtattagatacagtaaaacgaatccaacggctatcatcttttgtcaaggtggacaaacggacggcaatttttccattttccggcgtaaacttaaaagcgttcgacagaagattaaaataaatccgttccaacttctccacatcggcttgtgtatgataattcgaatccggcatattatcgaaagagaaatggatatgcttcttacgggctgccgcctggaaagattcattccacccttcaaaagaagaaaggatatttaccggaacaggagtatattccatttttccgttctcatatttacggaagtccagaatctgattgaccaagcgcaagagaatatttacgttacgctgaatgagcaacaacatccggtgctggtctccggtcagcgttctgtctgccaataattgttccacaggatcagcaaccaaagtcagaggggtacggaaatcatgagagatattcgtaaagaaaaccagtttggcatgagtcgcttcttccagttgatgcgacagttgaatcagttggtcacgctgttcctccaatttatcccgctgttcttcgagttgcttcttctgttctgataattccctattcaaccggttcttggaacggagagatttataaacgacaagtagcaatccggccaccaataacagaatcaacaaacttccatacatgataacctgctgggtagctacccttgaaagataaccactgatacgtccgttcagtgtttcgattttttggtcgagttctgaaatatgagtagtctgaagttgcatgatatgcgcattggtacggtcgacaacagccgtattcatcaccgtttcgcgaggataagatttcttttcgagaatgttcattgccagttgcagtactttatctccattggtaggataaatgaaagtcgcgtccaatacactatcgagcacgagttccagaccatttcccttaccaggcagggcgtcaatgcctacaaaaatcatttctttttcccgtccggcttttttggcagcctgataagctcccggagctattcggtcattatgcgcatacacagcatcaatcttcgagtgacgtcgaagcatactgtccatttctacttctgccggcccacgctcccaagccgcatctgctttatcaatcagctttatctcgggaaaatgactgatagcagccataaatccctgatgacgttccatggcgggagtcgagccacttaacccagtcagttcaacgatattacctttccctttcaggcgggaagcgatataattgcctaccgcacgaccgatttcataattatccgcaccaatataagcagtatatttatccgaaagaattttccggtcgaccgtgatgaccggaattcctttccggtaagcctcctcaacaattggagtcatgggggcagcctcattagctgagatgatcagcaaatccactcccttatccataaagtaatgaatatcttccgcctgtctgcggttatcatcaccggcagaacgtatctcgacagatacaccatcatagaacatcgcttcacgaagtatctcatcattcatcttatgtcgccacgaatcatcactacattgcgccacaccgatacgaaaacggggagtatcctgccgacacgccgttatcccaataaggcaaagcagtattgccgtccaacgaaaatatctcatagcactgtgcttttctttcttcatcgtacctcttaccatacaaaatcctattctatatcgggataaagataatggttttctttcaaaagaacacaaagaacagattgaataagacggaaaaagttctccatatctgttatatccgttaatctcattttaccgccagtagcttgctttttcaaagcatacgttatcaaaacagaacctctcaaagcataacatttaactttgagaggttctacatagataacagatactgattcaatctgccaatatgtaaaataggattataatagtctgtctttcaacacctgcggcagttccggcatcgccccgctctgcgtacaaacgtaagcagagacttccacagccagtttgtgtgcttcgggcaccggctttccattcaatatggaagcacagaaggcagccgtaaaggaatcgcctgcacctaccgtatcggccacggggactttcggagtctcctggaaggaaacaacccccggagtaaatacatagctgccattgatgccgcaagtcagaatcagcattttcaggttgtatttagctaacagaatccagcacttatcctgcaagtcaatgcccggataaccgaacatacgactgatagtcaccagctcttcatcgtttatcttcaagacattacaacgttggaaagagtcacgcaacacttctttggtgtagaagtcctgacggagattgatgtcaaatatctttaattgtccatctatctcgggcattgtatccaagaaacgattgatagtggcacggcttgcttcgttgcgctgtgccagtgatccgaaacaaacggcacgtgtgttcagcgccaaacgtttcagttcgtccgtgaaaggaatgttatcccaggcgacaccttccttaatttcatagcaaggcaccccttcagcgtccagtgtcacttgtactgtacccgtaggataatctacccgttcaatctgagtattcagtttcttttccttgaataccgacatgatctcgtcacccagttcgtcattgcccactgcactgaccacacggctgtcaaagccgaattgtgaaacatgataagcgaagtttgccggagcaccgcctattttctttccttcgggcaacacgtcccaaagcgcttcacccattcctactattatattattcatgataaacagagtttaattgattctcaaatataaaattattttctgatacggaacgtataaaacagcaaataaagtacaccgacagtcatgacggcaattgcgccgttctgccccattgaagtgtccgaagccactcccatagccagcgggaacaccgttccgccgaaaagtcccataatcatcagaccggaaacttcgtttttcttacccggcaaataaagcaatgcctgcgagaagataacggagaacacattcgagttgccaaaacctatcaaagcgatacaaacataaatgattgccttttcgtggaagataaacaagccaatcatggctgccaacatcataataacactgacagcgaagaaagacttcgcggacatcttgcgcaatatgaaagatccgaggaaacaccctgccgtacggaaaatgaaataaagactcgttgcaaaagctgcatcatccaatcccattccgatgcgctccattaaaatcttcggggcggtagtgtttgtgcccacgtcgataccgacatgacacatgataccgacaaagcaaagcaggataaacggcttgccgagcaaggcaaggcattgtccgaaagtagacggtttgccttcttccttttcttcttcaatctgcgtggcgttgagcagaagaatggcgacaacggccactatcatataaaccgggaaaagaatccgccagcccaaatcgaaagacggaatagcttgcgttgctccccacatggcaatgtatggtgccaggaaagaagcaatcgcctttacgaattgtccgaaagtcaggctgctcgccaagcggtcaccacgcacgatattggagagcaacgggttcagagaagtctgcatcaacgcatttccgattcccaacagagagaaggaaatcaacatcaacatataactgtcaccaaaaaccggcaacaataatgaagcgaatgtcacgagcagactgagcaatacggttttcttctgaccgatacggctcatcaacatccctgtcggtacggagaaaatcaggaaccaaaaaaagacgagtgaagggaaaatgtttgcttgtgagtccgacaggccgaggtctgcctttacataattggaagcaatgcctaccaagtcaacgaatcccatggcaaagaaacatagcatcaccgggatcagtttggagagagaagagtttttactgttttccattgttatatctattattttataaattctgtgtccttatggcttaaccggtccgcccctacgggaataaacccgtttaccgcttatacagttgatgtttcatactgatataataggatgaaagctacggtaatgttgattcgccacggccgtgacgaattctttccatggctgtggagagatctcttcatggctgtggagagaagttaccacggccgtggtgaggtattaataccgtaagcctgacagaagtataccgttgccttcagtgtactaatccgtaggggtagacatactctgccgtagggaatcaggaaaagagcgcatagattaaatggcagaagcttattgcttcaaccggtagacgataaacgagtctaccttgtaggctccgcctttgctgtaaaaatcgatgtgattgtaaggttccgaagggaagacctgattggtcattgcgaaacgcccgccgtcaccaaatgcttccacgcttgatttatctacaaacaaatgaagcttcagctcattcttaccgctttcaacagctgtccacgtcagtgccgggaaattctcgttgaagccgacatcaccacttttacgacggtccatagagaatctattctctttcatatcatattgcatatccacttcttcgcccttgtcattgtaaagacggaagccgataacgtccgcatgcaggttcttgatagacagttctatttcgtaagcgccttcgttgaccggaattatttcttttaccgtacgtgttccgttcactttgaacgaacgtttctttgagatgtcacgcagtttctgcaattcgggagatggggcagattgaagataagtctcaccgccgacggtaaagagacccaaatcgcggggaacggagttcggactgcggtattgggaagtcggaacatcgttggcatattgccagttgctcatccatgcaatagcgatacggcggttgtcgggagcatcgctccaagtcacggttgcataatggtcttttccccagtccatccatttggttttggagggagattcgtttacaaattcttttccgttgaaggttcctacaaaatattgagtggcacttcctccgaacggaccgccgggattcaaattacaaagcaacacccacttcttttcattcgtcccttctaccggaagttcaaacaaatcgggacattcccatacgccaccatgtgcgccctggccttctccgaaactgctttcgtacgtccagtctttcagattgggagaagaaaaaatctgcatctcctgtcctactgccaatatcataatccagcgccgggtttctttatgccaaaagactttcgggtcgcggaagtcacgtgcatcggatgtcagtacgggattgttctcatagcaggtgaaagtgcgtccgttgtcggtactgtaagcaatgctttgtacttgccggtcgctgttttgcgtataaatggcgatgatagctcccgcaccgaaaccggcagtgttatcggtatcgacaacagccgaaccgctgaagatagttcccaatgcatcgggcgcaatggctacggggagatgttgccagtttacgaggtctttgctgatagcatgtccccagctcatatttccccatttggagccgtaagggttgtattggtagaaaaggtggtattcgccatccttgtataccattccattggggtcgttcatccaaccgtaaagaggtgagaagtgataggtgggacggaacttttcgcggttgccggtatcgaaggtgtcggccaacttcatctccttgcagcaaacagcagaaagtttgccccgtacagggtcgttcgagcccaacttaaacttcaatagtacgtttttaccggtatagcccgaaaggtccagcggaacgaaatagtccactctgttcaccgccagacgaacgtccgcagccttcacctctttattattaacgatcatgctgacacgcacatcaggcatcacctcctcaacggggagaagcaaatatcgttggttcgtgtttatctgtaccagacaatgcccttcgcccaggtccttgattatcaaggaaggtgcgtcggcaacagcgtccggaaatgagaaaatcatcatagccagcattgccaataaggtccgtaactgtttaaacgagaataatacattcatatcaatatggtattagattaattattagtattcatagcctttcatttgtcacaatgcaaagataggcgtaacggatagctacacctatcacttttgtttcaaaagatagaaaaaatgttacctgcctatttcttagcgcttagataatgcaatatgttcttcgtcatgagcatgatattatcctgataaacgttcagattactattctggttccattcgtaagcagccagtccgagagcgatgcaagttccttgatattccgttgtcggggcaaattccaccattccggcacaacaatagtccgtcacatgaccccatgttgccaaaacggtagcgttattttcctcttcaaacgctttcaccacatttcctgcattggggtaaaggctggggaaaccataagaattcaaatcccacatacagttatggtcttcacgctgtccgggaccgatcaacgggaatgtttcgtgagagaattggtcggaagtaaccataccggtaaaagcaggatgcgagcgatggtcatactccattccgatattggcattaatcgtccaaatgtctgcacctgatccgccttcaccgtctccaaatattccgggagcccgttcggtacgtcccaaaggtacaaccaactgagtcgcatgattgctcaggaacaggtttccaccattcttataataggttgtcaacgcggcaaccgcatcggcagacaaaggtaacttgtcccagccggctccaatacccacacggtctatatgtacccaaataacatcataagcagaaagatcctcgccagccaatgcagcggcagtaatgactttgccatttacaaactgtttcttgaaccatgcataggaggccttttcatcatcatcttctatctcttcgggagtgtcatacgttatcacataaactgcgttcgtcaagtcctgcgcttcagacggtttcacctttatattttcttctgtcactccgcaatctatcacttcggacgattcgctgacataaaagacttgattgctgttcgtattttctatcgtgaaacttgcgaaacggttattttccccttccgcagcattcacagtcacggggttttctataccgtcactccaatccgcatgaatggtgttcgacgtgaagtggttatattctcctttcacatgaatcactccatagtccgcctctttgccattgagttgattatcgctcctgtttacggtgaacacgttgtcacttatcagattgttttgcccgcttatatcaaagaaggtcattttgtttcctgtaaattcattatccgagatattcacccggctgcaacctgtaaagctggcacaacggtcatcttccgccgtcagtttgttgtgagagaatatcaggttactttcaccggagatacgcgccgccacaccgccctgcgctgatccgaagagggagttggtcaccatattctgtatgccgccgttcatttcaataccattcactgcgtcggttgcatctatccgagccaatgtaatagcatcacatccctggagtttaataccctggtacatattctccattctgatgttgaagaagtgcaggcgatcgttatcgtgctcgacaaagattccggttccctgatgatcggcctttcccacaagtgtaagtccgtttacctccacaccgctgatacggttcttacgtccgtctatatcggcaacaggggcaacgtgtaatgcatattcggcatttcccagtatcaggcgactttcccgggcatcggcagcagtagcagcgacgtcgtcattcacgcctttcagcgtcacgaaattgcgggtgagctgaatgggactatccaaacgaaacgttccttcgggaataagtatcgtacctccctcgggcggaaggtcggctattatggcattgatgaggtcggcacaatcggtagagccgtcggtcggaagcccgaactgggttatatctattatcttctgaccgttacattcatcacaaagcgtatagttatcgtcattactgcaagatgtgcccagtataaagagcagtccgcttattaagaatttatttatcttcatggtgttattatattaataatggtatatgatagggaggttattctactatgctcaccttatcggatgatacacaattggagacttcggtttgtgcgttcaccagaaatacccgatagctctccaagttgtcaacaaagcaattcttgaacacgttaccggttccctgaacggcatttacagtcacagcgccggcataagcccattcgcacgacaagctattggatgcaaccatattattgttgccctttacgttgatgatgccaaagtcgtcgccgtggtcgagcagctggttctgaacagctcccgtaagccagaagatgttcttattcaccgtattatcattaccgttcaacaccagaataccattatagtagctcttgaaattgttgccctcaatcacacaattatcacaagcgtcaagtaccagattttcacgtccgtcgggataaacctgattattgatgaacgaaagtttgttcacttcctgcaccttgcaagtaatccccgtaggttgagcacccaattggcagttcttcacaacaatattttcaccgccaatcaactcgatactattagggagttcgcatacccagcaattgactatctgcatattttttgcctgttctatcttaacaccggtatgcaaatttataccgataatattagaaagcattccattatcggtcgcgccgacaaagtgtatgccgatgttcttggcttccgtgccgcctgacaccatcaggttcataatctttacgcctttcatgcccgtctccacttttatggcagcctcggcattacgcgccaccaatttacttccaccgccaggacccaagaggtcatttattccattcacgtcaatattgctgcgcataccgggattcaatcccttgatcgtcacattatgcttattgattacaatgggagcgtcaagtacaaaatcaccttcgggaatcaccaatactcccccttcggcgggcaacgaggctattgcactatttatagctttcgaacagtcggtctttccatcgccaacagctccgaatgcagtaacatcaccttcgatatcagtatgggtaccatagcacaacaggttattgtcatcactatcgcaggccgtgaacatacacaggcagaaggcgctcatcaagtatctttttattttcatcatatctatatttaaggagtttatattagttaaacttaccatatcctgggttttgtacataagtaccttcagagaagttatattgtgcattgggaatgggtaagtattcatccctgccaccgatgaagcgggcaccgcgataataaacacgcttgttttgctccacaacgatgtaactgttcatggtttcctcagcaatcccccaacgtaccagatcgaagaaacggtcaccttccatggcaaactccatgcgacgttcccaacgtaatgctttgcgggcaaagtcctgattccaaccttcagccggatattcgcctatcaggtaattggccgcattttgttcgggatgcttaaagtccttcacataaggactattcttggcacgtagacgaatacggttaataatcttgcgggcttcttccagtccggcagcttcgccaatctctatcaaggcttcagccttccacaataatacatcagcatagcggattatctgccagttaagatgagaggctccccaaggccacccctggaacatatcttcactttcaggcgagatgtaaaagcgcttggtgcagttaaagccatattcgccactgttacgtatccagtttgctttgcaaggctcaactgtgtaagttttccaggtaatgcccggacgaccggtaacaaaatccagacggggatctactgttgcctcaacgttagtgagctcattcccttcgtacgttccataatcactgttgttgaaggtatcaaacaaaggcagtccataggcatctgtcttatacgcgtttatcagattctgactgggcaggaagaatccgtcgccaccgtaaggacctttgggggcattgagcaggttgctccaatttatgtttccggcaccttcggtttcatcatccatcgaatattgtacggcaaacacagactctaccccattttcatattccagttggtcgagcttctgaaagtcattcaaaagatcatacgccttcccttgcgcacctactttatcacaaagagccgctacttcagcaagcaactgtttgtcgacagcaatgacctgattattctcatcttgttggtaagcctgataaagtttggctttggcagcgtatgcgtatgctatgttcttggtgatacggcctatttgggattgagtgtcaggcaagtcgttagcggcgtcaagaaactcctgcgcaatcttgccaagaagttcttcgcgggtaaactgattgttggggatgtatttataatcatcaatatccacgttttcgtcaaagtaaggtacttgtttgaaaaggcgaaccagttcgaagaagaaatgtgcacgaatcactttcatttcagctttacggctcttaagtaccggcaaggtgttctcatcaagtgtattcatgactctcaatgcactgttgcaacgttgcaagcaacaataaagttgaaaccatttttcatcggcattagcccatgtagcatctatcttaaaagtttcaagcagtgtacaaaagtcaccatcgtttacaccaccgccacctttataggcattgtccgaacgtacttcaccatacgtccaattggtcatcggtacccagtgcatatcacgattgggacctttcagcccggcgtaagccgaagtgaccaggagttccacaccttcagccgacgacaacaaatcgtcattgagtgtaccctgaggtttagtatcaagaaaacgactctcatcacaaccggccaatagtgccacaacacctgccgcaaggatatatttcaatttcataatgttctgtatttaggataaaagattaaaaaccaagtgatagaccgaatgtgtaggtacgaggctgaggatatggatagcccaatccttcagggtcggcaccagtataattagtcagcgtgaagacattctgcgcttgcagatatacacgcaaattagaaagacgtgctttcttaatccacttatcggggaaggtgtagcccagtgtcaaagtcttcaacttcacataagaaccatcttcaataaagaaagtagaactgcgtgtttccacattattatcaaccaccgtcagtgcagggatattacaattatagactccggtttgctcatacacattccaagcattcattgcatcaatcagacgcgtagagtgattgcccgtccagccttggaaaagatccgtatagaactttgagttattccatgcatcgcgaatcataccgttgaagaatacggaaagatcaaaccctttgtaggatgcacctatgttcagaccaccgataaacttaggctggtcactgccttgccagtccatatcggcagtattgatgatgttgtcgccattaagatccttatagcgaatacgtcccacaccgggagcaccaatctgtacatcatacttgctcaggtattcatatacctcttgcttggtcttgaatatgccatcggctttatatgacatccatgaaccgaaaggctgtcctacaatggttttatccacaccattaccacctccccaagtgtatttgatgacatccggaagttcggttatcttatttttgtaataagagaggttgaatgagatgtcatatttgaagtcctttatttcgtccctccaggtcaaagtcgcttctacaccgttattatccatactggctgcattataccatttataaccaccttcaccgatcacaccgatatatggtttctgaattaacatatcagtggttttcttctgaaaatagtccagagtcacccccaaacgagcgtcgaagaaggctgcatcaataccgaaattcaattgtttagtttcctcccacttcaaatcgttgttgcccgaacggtctttctgtacgccgggtaccaccgtcgccccgtcgccgttgaaattgtaggaaccattggacatattggtgtaatagagattgtatgtagcattattgtcaatctggtcgttaccattaataccccatgatgcacgcagtttaaggtctgacagccaactttgtgtacgttccataaatttctcgcgtgaaactctccagccggctgataccgaaggaaagattgctgaattgttacctttaccgaaacgtgaggaagcatcacggcgtaccgttcctgatatcaggtacttatcatcgaacgcatagttcaccttaccgaagtaagaaaccatagcataagtggaagcattgttactcacactttttccttcggtcactgtgtccagatagcgatagtcgaggtcttctatcaccaatccgcgaccatacccctgcaaatgttcaccgttttctttcttggcctcggttcctatcacagcactgatattgttctttcctaattctatgctataattggcggtattcgaccatacccactgcacactattatcctgccgcacagtcagctcatttatatcgaccttacgatcggcttcgctccacttcgggacgaaggttgagttgaaaccggtagtatagttcaatccaaactgactcttcaataccaggtttttaattggctctacttccaaataagcactgccaaagatacgccagcttttatgacggttatcagcttcgttatctgtcaagcgaacggcattcggcttatcccccaatatgtctacgtaaccaccggcatatcctccgttttcatcatacacaggaatagcaggatgctgggcaatcacaagttcttctataccggacggattgagatgttccaaccagtggttcacggaaatgctttcacccacacgtactttgccatcaacaaagcggaaattagaagccaggcgagaattaaaacgttcatagtcagtgttgcgacaaagaccatcctgattcatatagtttatagtaagagctacattaccgtctttgaatcccttagagagagaaaggttgtaattctgcatcaaagccgtaccgaatatctcctttgcccaatcggtgttacccgattttattttgactccgttctggtcgaaataatattcctgcaactgggctttttccccatttccatacactacactgttcggatgagttccgtaagtgtttttataggcttgccaataaacatctccccattggtaagcatcgagcatatcaacaccaccggcaaaagtctgggcagtgagtgacatatcaaaactcactttcacatcaccttccttagcacgctttgtggtaatgataatgacaccgttggcggcctgcgcaccatagatcgctgcagaggccgcatctttcagcacctgaatggattcaacatcattggaagaaataattgaagcgacattgtcatgtgtctgaatgccatctatcacataaagaggggaagaattattaatggtagtaataccgcgcaacttagtatccgtgttccccccaccgggtttaccatcggttgttacattcataccggctacccgaccctgcaagcccgacatcacattacctgtgggaatatcagccacttctttcatcttcaccacggctaccgaacctgtcaggctggctttcttctcagccatataacctgtcacaaccacttcatcaatcatcttggaatcctcttccattactatcttcaacgaaggttttgctgcaataatcacttctttatatcctatataagagatagctaatgatgcattcttcggcacactaatagtaaagttaccgtccaagtctgtaatagtccctgttgatttcgaatcgttttgcaccacggaagcaccgataatcggttgcccgtccgtcttggaagtcacatttccctttaccgttatgttttgcccccaaaggactgacacgaaagcaaacaggaaacaaacactacaaagaatttttttgttcttcataatactgagcattagtttaatgttattaatttaaaagtacgaatattctctttatcgctgttgcaaattacggttgatttatgtcaatcgactaaaaaaaatgtttcaaaggctgtaatatttgttgcatacctccttattttatgggatttcagaggtgtttctccttgtcataggcttaatctatgtactttaaaagtatcgactttgaatgtcccgcccttgctgtaaaaacacatacgattgtatggctctgtcgggaaaacaagattgctcatcgctatctttccttcgttcaaaaagatctctaccgaacatttatctacgaaaatatccagtcggtacttattctcttttcggacaggtgcccatgtagctaatgcaaaatcatcaatgtaattgatagaagtcgttttccgacggtcgtgcacctctatctcatgtgtcacactgtttttgccaaaatctacgataccgctctttgtacgatccattaccagtttcctttcaggaagattaaagtaaatatccaccttctcacctttatcattgaacaggctgaatccaataatttcagctttttctgccgtaatgtccaatgaaagttcgtaagcaccttcattatccggtaataaagattcaatatgataatcatttgcaacggtaaaagcaggaatttcttttatctctttccttagatttttcacttccgctaccggagctgcagaaagataaatgtcaccgctttgcgtataaagtcccagttcacgcggcaaggcgttgacgccacgaaacggtttggtcgggacattattacaatattgccagttactcatccaaggcactacaatcacacgtcttcccatattcgaaaaggaaactgtcgcataatggtcttttccccagtccaaccatttcgtaacatccggtttgctatcacaaataaatcttgttccgtcaaaatcacctatgaaatattgggtcgcactgcctccgaaataacagccgggatttacattgacaatcaatgcccatttcttatgttccgtatcaccgtctaccggtaactctaccatatccggacactcaaactgacaaggctgtacgccataaccttcaccaaagctactcatataattccagtctttcagatcttctgaatcatagaaacgcatctctttatcggcagcaacaatcattatccatttatttcccggagcataccagaataccttcggatcacgaaaatctttccttctatcggaagaacgcaaaatcggattcttatcatatttggtaaatgtgcgaccgttatcattgctataagcgagacattgaatctgcccgtttttatcgctggcagaagtataaaaagctaatatggcacctgtaccgtaacctgccacattttcctgatcaacaatagaactgccggaaaatatatgtcccaacgtatcacgaactatagcaggtgccaaatgttcccaatgcatcaaatctttgcttatcgaatgcccccaatgcatattcccccatttagaaccataaggattatactgataatataaatgatattcttcatcttcataaaccagcccgttcgcattattcatccaaccataaaggggagcatggtgatatacagggcgaaacttatctgtatgggacggatcgaatgtatcggataatttcatttctttccagcaaagagcatctccaaggctcttttgcacacgtactgttacagttttagcatcagcaggtaggacaaacggaacccaatagtctactttagtctgtgcaagccgaatatccatatcagtatccgctgcatctcctatgtccagacgaacccggctttcttccgctgcctcttcgatcggaagcaatatataattagtaggattggtgatgtgaatgagagtcaggctgtctcctttctgttccaacataaatttgcttttattcgtatggcaataaatcagtccgtaagagaccgccaatgcaagtaccgcacctttacataatttcatccaagaggttgttttcatggtaacaaagtattctgttttatacaagtatctaatcaaaattgacggaggcaaaaataggtcatatcttcacctccgtctatcaactttgtttcaaagggtatcacttttgatgcaagtcctgaacattttcttttttgcctgtcacatcgcaatgaagctatccctctctttgcatacctgaatttattttcctacttttgagacaaagctttattcttctgcttatgccagctaatagaatactttcttcgatgatctggtaagagtaactaaaaattccggaagcaaagcagaaatagtgagcttcaaagtagcggttgccgaacagtataagtaacttacttctttcatctaaaaaatagagctatagagatgtaagaatctgtttatttttcgaccaaatttcttgcacattcgtacccttcctcataaaattctgtcagtttctgcacatcccgttcaatacgatctaccatcacaggattctgcggacggataacgaaaatctttccttcatcctccattttctcaaccatttccaactgttcattgtagacagcacaacggcggctgagtgcttcacggagtttaggatatttccggtatacaaacgaagggacacgaatatcttttgaatctttccggtatccccggttgcgggtaagtactacgacatttctcgtataaccatcagcaatcgctctttgcaaaggaatagaatctacaattcccccatcaagcatgggaatattatctacataagtaataggacatacaaaaggcagactactagacgcacggacaatgtctatcacccggcgtttatctttcttttcttcaaaatagttagcttcccctgtgatacaattggtagttaccataacgaaacgttccgaagaagcaaaataagtttcgtaatcataaggaagaatatgttccggaaactcattgaacaacagatcgaaatcgagaatattccgttttttaagcagatgtttcagaccgatataattgtatttctccaacaagtcaatattactgtatttagcacgtcctcgttggcgcgatgcataggacagcccgttgcacgcaccggcagaaactcctatcgcataaggaaaccggatatcatgatccataaaataatcaagcacgccgcaagtaaatactccgcgcattcccccgccctccaacaccaaccctgtagattcatcaattttcaagttcttcatcttaatcttcccaattttatatttatcactctctttacataccccgttttattactgtttgttgcatatatattataaaaacaaacaaaaaaggcagaacgtttggcaaaaatagcaaatatttaaacaaaaccttgcttttttgcttcaatctacgtaactttaggctagcttaattgttttaaggaggaaattataaaaaagtcctgcccgcaggcaagcaccatgagaatacagtttgagattaaagaaaagttgccggaaattattgaagaaatcatgaattccggaaaatggcaaacttccgtgaaagaagaacttagcggtcggacgaccgttgtgatccgtgaccaagcgtatggctcagaagcaaccattgaaatctatgccaaatccattgagattaaaaccgcatggtcaaagtactcctaccgtatatttgtcgctaacgatattgtatggtgtgaatataacggggcttatcgtggcctactggaacaagtactcttaccaaccattacccctaaggaaagcttgcttgattctgacgtaaccgaaagttcactctatggacgtgaacataaaaaattaagagaatatgctgaagacaatctgaaactgaaacaattccgacgggaaaacttcaatgaacagagaaacggaacagcagcatttgatcatccgaagcgtgtatacgacgaatttattaaagaagattacgtagtaacacctaaagacaataaataatgaagaaaagggtatccccaaaggatacccttatactattatctattttattttaatttagctctgtaagtcttttccgagaaagtgatattcaggaagaaagccagtttctgtccttgaaacctccctgaacttaccttaaattgatctgtatattttacccctaacgaaagcgtactgcggctacggtattcaaaattaattccggtactgagataataattagttgtcgtcttattctgaatagaaagatacgaattccctattccggccccgagtaacagacgtacaggtttccgataggggttccctaatgtataactccctcccaacattaaacggtgctggttatgaaaactaacactagaacgagaagactccaaccgactccagtcaacaaacttataatcggcggaagccatccaacgcaacgtattataagatacccctactccgaaaaactgcggtaagcaggtacgatacttcttacctttttctgtaatactcccactactactgctactacttaccgaatgatcgttgtcttgaagcaaatcctgggaatatccatatacagcacccgctaccaacgaacggtcacgctctatctcataagtatactgtaatccaaaatcaacatacactgtatgtttatacgaactgtttgtttccgtagcacttccctgactctccgattgcgtaatagtaccacccacataagaaaagttagctcccagcgaaagccctttccacaactgatgagcaacgctgattccaactttggataatccgccttccccttgaaaaagtgaagtcacagtctcgccatttgtacccgctacatcctgctcgagcgatatggcataccccacactactgacaggagccataaaaatagccccataccaccggggagcaatacgaaacccggcacccaaattattaagattaccattaaaagaatgattgtttgcaccggactgtgaatacttttcatacgctccgctaactcccaaatcgaagaaaaaatactgcggcatcaatcccgtcaaagaagccgggttcgcactattataagcattttctccccgcaatgcgataccaactccccccataccggaatagattcctccttctccggtagacaattcacccagtccgaacatagaagccggagagttcgtcatgttttgagcagtaagattcaataagtttgcacttaatatgaaaatagataaaacttttcttttcatttcgtatatgtcttgtaataaatagtgagagatacattattattatggtcattcacgggatgtttactatctccgaaaatgactccctgaactgtgttataaaaatcattgtcggagagaaacaactgtaatttttcgcggctctgtcctgccgtccccagattattctgaatgaacgaggtaatatcaaatgaataatgagtatcctcataatagacattgtcttctaccagatttcctgtttgtacggaatttccggaaaggtccgttatgacactttgagttgaattgttctggtctgccgtatagagagtcaatgatttcggcaacggatattttccgttataagtaccttttataggatagagtttaagtaccgcactttcaatggagacaagtctccctttctggttcagattattcagatgcggaaattcgagattgatatacataccggtcaatccttgcagatacacctgatgatcactttcagaagaaaaaagattataatcagtaccggctctgagagattctatgggagtaccggtacggtcgtgttccacctttgtataattcaatgaactgctggccttaaacactaaagtctgttccgtaggcttttctttgagttcatgataataaagagtcagacaaaaactggaatcattcacctgaaagccgttaatgcacgtcccattttcatcgggtataaaagctattcctttaaaaaaagcgcggaaacgctcctgcgattccatacattcttcatcttccaacatcagattaaaccatttttttccccattcgtcaggcagacgtaattcatgcatctcgttacggtgtccgggagtaggacgtatagaaagagtagcaagaagattattccggttataattaacattggtcttattaaaaaggtaaccattatcttccaatgagattccttgtgacagactaaataactcaatacgatgataaaccagtgtatcgcccagataattccctgaagaataccatttgaaggtaatagagtcaaactgatattcagttgtttcattaagagaatgagaaggtacttcatattccgcataaaacgaagtcttaatctctccatatagattgtctttatatcgcccgatctggcaaaccgtatctcccgaagttgccaaagagtcacttagcaaagtacttaacgttactgtacacgtatctgttacagcattcataaaagaactatccacccatttagccccaatggaagaggattcatccctgcaagagaataggatacaaaacaacagtaaagaataaaaaagtgtaataaatagtctcataacgaatcttatttttgagttgcaaaggaacccctttaggaaaatatccccaaaatttatcgactattacccgctatttatagactcgcattttttagatagaggaaataaagctgtttgtcgataacttttttctcaaaacacattgatagctacatttgcgccaagtttaaaatgtaataaaacgaatggaaataatgaaaaaactacaactattattagtgtcggtagctatgctatcaattttctcatgttcggatgatgatgatgacacattaggagtgtggtatcgccgttccgacttcgatggaagggcaagagaggatgcagccggatttgtgataggtaaccgggggtacttatgcggaggatatcggggaaaagaccaacgggaaaaagactgttgggaatacaatattgataatgactggtggacacaatgcaaagatatgcccgacgatgcaacagcccggaatggcgctgccggattcgcagtaggctcgaaaggatatgtgaccaccggatacaccgtatataaagatgatgatccgatgcataccggaggatacgcatatctaaaagacacatgggaatatgacccggcaacaaatgaatggagacaaatggatgattatcccggagatgcgcgaatcaatgcaatagccttcactatcggtaactacggttatgtgggaaccggacaatccaaagacgataaacagacaaaggatttttatcgtttcgacccgacagccccttcaggtagccagtggagcattgtaaacggattcggcggtcagaaaagaaccggcggcttatcctttatcatcgacaatgtagcttacatcgtaggaggaaccaacaacggtcaggatgttaccgacttctggaaattcgatcccagcaagagtgaagaaaataaatggacccgtctccgcgaaatcaaggatgacagcagtgatgattatgatgatgattataattcaatcacccggacatacggctgcgcttttgttatagacggccaggcttatatcactttagggcagacatccggttcaagcctacgaaataactactggatatatgatcccaacacagatttatggcgtagtagtgacacggaagatgattttgactatacccctttcgaaggaagtgcacgcacaaaagcgatttgtttctctaccggcaaacggggtattataactaccggaggaagcagtggatactattatgacgatacttgggaattacatccgtatgaatgggaagaagatgactaagaaaaacagcagccggctctttgttgcaggaatattaacagctgccatttgcctggcgttttccgtagcaaccacctccgacacgcattattcgatcgaaataatcgaagtaaacggaggatacggttatcaaatatcctacaacaaccatataaccatattccagccttttattcccgccatttcgggaaaaaagcctttcatggaaaaagaggatgccaaaaaggtagggaaattagtcatgagacgcatgaaaaccggagaaaactatactgttacccgtcatgatttagagaatctcggaattaaaataaaataaataaaaagcggaaagtgaattggaaataattctctttccgctttttgttcatgaaaaaatagaatatacactattttttattctttttttatgcaaattgtatacaggaatatggaattaccccaaggattctctatctttgtaaccaaaacaaatttaatattaatgtcataagaatgaaaaagagtatccttatcgctgctctaggcctattcagcctgagcacaatggcacaagacgcaaaacccgaagagggcttcgttttcacgacagtgaaagaaaatccgattacttcaatcaagaaccaaaaccgttcgagcacttgctggagtttctcaactctcggattcgttgaatcagaattgctacgtttaggcaaaggcgaatatgatctggctgaaatgtttgtggtacacaaaacgatgcaagaccgtggagccaattatgtacgttatcacggtgacagttctttctcgccgggaggaagtttctatgatgtgatgtactgcatcaaaaattacggtatcgttccacaggaagtaatgccgggaatcatgtacggcgatactctgccggtacacaacgaattggacgctgttgcttccggctacattaatgctatcgctaaaggtaaactaagtaaactgactccggtatggaagaacggtctggcagccatttatgacacatacttaggaaaatgtcccgaaaacttcacttataaaggaaaggaatatacaccgaaaacttttgccgaatcactgggactgaatccggacgactatgtttcattgacttcctatacacatcacccgttctattctcaatttgctatcgagattcaggacaactggcgcaatggcctctcctacaacttgcctatcgacgagtttatggctgtaatggataatgcagtgaagaagggatatacttttgcatggggtagtgacgtcagtgaacaagggtttacacgtgatggtattgccgtaatgccggatataaacaaagaatctgaactttccggttcggatatggcccgttggactggcctgaccactgccaacaaacgtcaaataatgacaaccaaaccacatccggaaattgacgtcactcaggaaatgcgccaggtggcattcgacaactgggaaactaccgacgaccacggaatggtgatttacggtatcgctaaagaccagaacggaaaagaatatttcatggtaaaaaattcttggggtaaatcaggtaaatacaacggtatatggtatgcttccaaagcattcgtcgcttacaaaacgatgaatatccttgtacacaaagacgcactgcctaaagaaattgctaaaaaactgggaatcaaataaaaggagtatctccacttcttaaaataaaagtctcattagctataaatagcttctgaggcttttatttttaagtagttattttccggacaacataccgcatcggataaagcatgaccaatgtttaagagaagcttagcttactgataaattccgtaaaccgttctttgtaattatcacccacagggatgtacgtattcttatcgaagataatacggagacgggagatttcggaaatcttacgcaagttgacaatataagaacgatgcacacgcatgaaatgtacgggaagccgttcttccattttctgaagactggcaagtgtgatgacaggcttgttctccccctccacaaaaatacggacgtattcgctcataccttctatatagcggatattattaatatcgatgcggactaccctgcaatcgcttttcacaaacaacgaatcgccttttacctgcgaagcatttcccagttcactctgttgctccaacaatttatattcaaactgtttgcgggccttatccgccgccttcagtaagtcctgaaactcaaatggtttcaacagataatccaccgcatccaacttgaagccgtccaccgcatattcggaataagcggtagtgaaaatcaccagcggaggacttatcaaagaacggataaaatccagcccgttcaaatcgggcatattgatatctacaaatatcaggtcgacatctttgtcggacaataccttcattgcctcaaacgcatcctgacaaggtttcactaacgacaggaaagggacgcgggatatataatccgataactgtgccaatgccaacggttcgtcgtcaattgctaaacatttcattataataaaggtataataagtaatacatcaaatttattcttatcctgtgtgatagaaagcgtataatcattaccgaacagaagtcttagccgcttacggatattatccagcccgatgccgtggtgttgttcgtcagcccttccgttattgctattcgtacagcggaaagtcaatcggtttccctcctcttgctgcacgatgacacggacgaaagaatcattccggtaactgactccatgcttgaaagcgttctccacaaaagaaataaaaagcaaaggaggtatctgtacttcaggaacttcgatgggaaacttcatttcaatggagactttatcagtatagcgcaatcccattatggcaatataattctccagaaactgaacctcccgtttaagaagaattgttttgttactagcctcatacagcacataacgcatcagtttggaaagctctacaatcgtacttttcgccttccccgtatcaatatctaccaatgcgtggatattattcagcgtattcataaaaaaatgcgggtttatctgatacttcagatattgcaattcggactgcaagcgctggtgttccagttccttcaacatttcttcatcgcgaaaagacttgaagaaaagtttaatggctatattaaatcctaccataagaaaggcaatcataaaatgaataagatagcgaactgtgataggaggataaggaaacggaacaggtttaaggagagcctccggacgttgaaacttttccacgggatatttcacctggtccggtagttcccaattagccgtctctttcttccgcgccttttctctcatttcaataatctgattccgtcggctttcctttgctgaatgatacacaggctcctgtctgaattctttcgggaaacgccctttcatcggaaacggaacaatcaaaaaaataacacctattgcaaaaactaaagaaagtgtatattgccaatatttttttttaaaaaggaaataaggaaccagcacatagttattcaacagaaaaagcataaaaaaaggaagaattcccaaccaggagtcacgtacaagcgtgcgaacttcttctttctcaagtccaccacttacggcaaaatattctccgatcaacggaagaaagaaaataacactccagattactccgtaaatgctttgttccaataattgttgcttgcgcactctttccatgcctcattgttccatgttagcagaaacaaagataaaaccgacactcctttcatacaaaaacaatcgaccaaaggacatatttcaacgacagtacatcaatcagtgacgaatttcacaacttacaaagttgcctgtaaatacatgtagagaatctaaataaaccttaaaatggatgtgatattctaaaacggctcttttcttagttagaagtaggaaaaaataagaacggtttcttacacgcgaaatgtgtgggacgccgttcttttatatacatataccttgtcttgttctatcttattccattcttcgctatgcttcttaaaagaagaacatattacattaaaaatagaacattaattcaaatgcttttatatcatttttctccgtataattaaaaatagaacattaattcataaaaacagaccttgtaaataaatagatgttagccgaactttgcaaagttttattaattacgcaataaaaacaaaaaagaatgaaaaacttacgaaaactattttgtgtagcttgcgcagtacttttctttacatcatgtgaagaaacctataacgacaagttattttggccgggagaaatcagccaggaatatggctcgtacatcaagccgtatacactggatttaacttacaacggcgagaaactaatcggaaagactgccagtttcaaaacggaagatagtgaaacgggaacactgacactaaacggaattatcccgggagaagttactactcctatcagtcgcatcaaacttaatgaaaacggagaaaaagatgcctatacctttagcggaacgaatatcacgatggggggagtaacggtgaagtataatggaatcattactccaaaagcaatgaaactctcactggatgtcacaatggctcatgccaataatctggctcatacttatgcatttcctgcatattcacatactacaaatgaagaagcaaccattcgtaatagtggagcaagctatgtgaatattacaacgaaagaaggagccgaatccattgctcctatcgttttgcaaatgcagcaaatggcaactaatatattagatgtactctttccgtatgtactaaagaatattacattagaaaaggatggtattgtaactgccaactacaccacaagtcccatagacatgaaagagatcatggaggtggctaatgcaggtaagacggatgcagaattccgtggattaatcggccaacgtacttatgtttcttccccgaaaggtttggcctactggaatcagacgggtgataaggcatttgtagtacaattgaacataccagccattatttcactcatcgccgagaataacggtcagcaaattgatccccaacttattgcaggtatcagcgaagctcttttaaaatcggaccctgcccgattgaagctagcattaagtacgctcaacatgattttaaacaatgagataatcacctatattttaaaaatggatgataacacttttgtaactttactttcatggatgagaaatggtattccaatgggtattagtcaggctacaaaagatcatacttatatctatttaaaaaaagagacactaactccatttatcaatatcattgatattttattaaaaacaaacttagatgaggttgtagcattattcgacaaaatggaaatcggcgtagaccttactatccaaaaataaatcattttaaaataaaaaacgatgaaaaaattatctatcttattcataagcttccttaccgtaatatccgcattcttaacatcttgtgacgaagaccactatggaccggctccagtagacgtgacagccaattattcaaacaagatttcgaatcctaatcccaatttagttcttacatacaacggtgatgcaatgaacgggaaatctgttgatttcagtactgttacaggagaaactgctatcattactctctacgatattcttccgggagaaaaggcaataaagattacatccattcccctttccggagatacagaaggatactctttttcgggtaatggtatgggaaatgaaacattgactacttttagatacgaaggacgtgtaacaaaaggaaaactcaccttaaacatatccaatatccaaatgggtaatgccgatttgtgggcaaatacttataagttacccgaagtcgttaacggcgtaaaaaaaatattagttggtgacacttggggaaatgaatatacatggcaggaggttgatggccaagtattaaatgcgtcatgctatttccatgcagatgtagaagctacagaaagcggagctacaacccaaacatggggtaatggaatccaaaatatagtaagttacattttgccacaagttctgcaagacatcactttaggagcagacggaaatgtaacggcttcctattcaaatgatccgttgtcaggagtagatatagacgttatttttggatttctagaaactccattaacacaggagatgattactcccaacattgctgaccgtaagtatatcccttctccaaaaggatttgctacttggtttcaaaaagacggtaagttaatattaaaattaaacttagctaatatcatttcctcaatagccagcagcagcgatacatatatggatgtgaacataatcaatgctatcattgatgctgtatctcaaatggatgccatgaaagtgaaagaattgctaaccacacttaatcaaagtttaaacaatgaaacacttggattcttggtcaatgtcaacgacacttccttcaacgctattttcaattggttaactaccggaatcccgatgcaggttacttcaaaagaaggacatacttatatttacttagataaagaaggatttactcccatagctaaattactaccagatcttagtccgctaatagttagtatgcttccggaggacatgcaagggctgggatttataatttcagcattcttaaatggtatttcagaagcttttctatctcctgagagaatagagtttggtttagaacttgttccgaataaataaaacgtaagaaacaatgaagaaaatatatatactaactttattaatctgccttacttgttttgggacaagctttgcccaaacactgaaaggacatatatacgacgccaagaccaacgaaccgttggtcggagcagctgttacctacaagctccacggcaatcagggagtagtatccaatattaacggagaatatgaaatcaaacttcccgaaggtggagtcgacctcgtattcagttatgtaggctatgatgatgtactgatgcctatcgttatcaataaacgcgaagtagtcaccaaagacgtctatatgaaagagagcactaaactgctggaagaagtggtagtgagtgctggacgcttcgaacagaagctaagtgatgtaacagtttctatggatgtggtgaaatccggtgacattgcccgccaggcaccaacagatatttcatctaccctccgtaccctgccgggagttgacattgtagacaagcaaccttccatgcgtggtggcagcgggtggacttacggtgtaggtgcacgtagccagattctggtagacggaatgagtacactgaatccgaaaacaggagaaatcaactggaacaccgtacctttggaaaatgtggagcaggtggaagttatcaaaggagcttcttctgtgctatacggttcctcagcattgaacggtattatcaatattcgtaccgcacgcccgggtttaacgcccaagacacgattcagcgcatacgtaggcatatacggtgatgcagagaatgatgaataccaatggagcgacaagaatttctggaaagatgataaatatgcagtaaaacctattctgcgtggcagtctcctgagtggagtacggaatccgatttacgaaggtttcgacctctcccactcccgtcgtatcggtaatttcgacgttagtggcgggatcaatcttttcaccgatgaaggataccgtcagcaaggatataacaaacgtttccgcatgggtggcagtttgacctatcaccaaccggatatgggactgaaaattctgaattatggttttaatgtagacttcctttccaatcaatacggggacttctttatctggcgttcaccgaccgaagtatacaagccttctcctttcaccaatatgggacgcgaagaaaacaacttccatatcgatccgtttatcaattatgtaaacccggaaaacggaacttcacataaaatcaaaggacgtttttattatagcgcagacaatatcgtccgcccaaccgaaggttcatctatcacagatattctgggaaacatgggaaccgatgcgaatacgattaaaaatatcgtaaacggcgattacagctcactataccccgcattggtcggtatcggttcgggaattatcaacggcaatctggataatgccatgaacggtgcattcacttcactgggaaacatctttcccaatgcaacaactgccgattattgcgaccttatctcatgggttatggataacgggctgcctgatcttagcggaatacagaacggacaattgccaagcgatctcgtaccgtggctgtctaatgttatcaatccgtctcgactcaacccgaaaactcaaacagacaagaactttgactattatctcgactatcagttcaacaagaaatggaacggtggcgcacagatcactacgggaatgactttcgaacacatccgttatgactctgctgtaatggatgaagtgtacaaaagtgataatgcagccctcttcttccaatatgaccaacgtttttgggatcgtttgagtgtatccgcaggcgtacgtgccgaatactaccgcgtaaacaaccaccgccgcgaagcagaaacaaaggtattcggaacaaaaattccgttccgccccgttttccgtgccggattgaattatcaattagccgattacagttttatccgcgccagcttcggacaaggttaccgcaacccgtctatcaatgagaaatatctccgtaaagacattggcggagtcggtgtttatccgaatccgaacattaaacctgagaaaggatttaatgcagaattaggtttcaagcaaggatacaagatcggtaacttccagggatttgtcgatattgccggattctatactcaatataaagatatggtagaattccagttcggcctattcaataatgcaaacaatacgatgataaatagtattggcgatgtatttcagatgttgactgacggcaagggcttcggtatcggagcacaattccataatgtatcgaaagcacagatctatggagtggagatttcaacaaacggtgtatataacttcaacaagaacacaaaattattctataatctgggatatgtatataccgaaccgcgtgacgcggattaccaggaacgcaatgctgtagaaggactgtataccgacccgcttcagatgaaagagaaatcaaatacgagtaagtatctgaaatatcgtccgaaacatagtttcaaaacgacggtagacttccagtggaaacgcatcaatgtgggtgccaatgtggcatggaaaagcaaaatccttgcagtggattatctgatgctggacgagcgttctaaaacacaaaacgacttaatggattatgtacgcggtatccttttcggttattcaaaaggagaaacactcgctacctactggaagaagcataacacagattatgcaaccgttgacttccgtttcggtgtaaaagcaacgaaagaagttgctttccagtttatggtaaacaacttgtttaataaagaatacagttaccgcccaatggcagtagctgctccccgtacttttgtgctgaaaatggacgtcacattctaaataactcttattatttacacattaataaaggagaaggtgtgtcgtaatacacgatgcgccttcttttttttcattgactataaaaatcggttcat

SEQ ID NO: 3002 - DNA, 1595 bp, Unknown
  gut microbiota DNA sequence
gaactcttttttctcccaatacgcgttgctttaccagtttttggatcaaccgggttcaagtttgaaatgtggatagaagcttcctgcttcacgataccaccttgcggattctttgcatttggcttagtgctcttagacaccatgttgataccttcaacaaatgcacgtccttctttaacaagaaccttcaatacacgaccagttttgcccttatcttcaccagcatttacgtaaactgtatcgccttttttaatatgtaatttactcattacttaaatcttttacaaaattaaagtacctcaggcgcaagtgacacaactttcatgtttgtagcacgaagttctctagctactggaccgaaaatacgacttcctctaatttcacctgcattattcaacaacacgcaagcattatcatcaaaacgtatataagaaccatcaggacgacggatttctttcttcgtacgtacaatcaaagcctttgatactgcaccttttttaacatcactagaagggataacactcttcactgaaacgacaatgacatcccccactgaagcataacgacgacctgttccacccaaaacacggatgcacaaagcctctttagctccactgttatcacatactgtaagtctggattctacttgtatcataattacttagctctttcaattatttctactaatctccatcttttagtcttgctcaaaggacgagtctccataatgcgtacagtatcaccgatattgcattcattcttttcatcatgagcatggtatttcttcgttttgctaacgaacttaccatatatagggtgcttttccttaaatttagaagcaactgtgatagtcttttccatcttgttgctcagcacaacccctgttctttcttttcttaaatttcttgcttccatcaagctgatcatttattgttaagttctctttggcgtaattctgttttcatacgcgcaatagtcctgcgtaattgtttgatttgagcaggattttccaaaggagaaatagaatgattaataaccatttggtcataattagccgtttctgcctctactctttctactaaatcactagtagtcatttctttaatttctgcaattttcataacacttacgcattttgattttgaatatcataatcacgtcttacgacaaacttcgttgtaataggaagcttttgagcagctaagcgcaatgcttctttcgcgatttcgtaagatactccttcagcttcaataatgattctacctggagtcacaggagccacaaatccctctggagcacctttacctttacccatacgtacatcggcaggttttctagtgatcggcttatccgggaatatacggatccagatctgtccttgacgttgcatatatcttgtcactgcaatacgagcagcttcaatctgacggcctgtaatccacttagtctccaaagcctttatgccaaaagaaccaaaggccaattggttacctctttgggcattacctttttgacgacctttctgttgtcttctgaattttgtctttttcggttgtaacatagtttcctaaaattcaaattcgtttagcgattat

SEQ ID NO: 3003 - DNA, 7355 bp, Unknown
  gut microbiota DNA sequence
cgagcagcttcgatctgacggcctgtaatccacttagtctccaaagcctttatgccaaaagaaccaaaggccagctggttgcctctctgggcattacctttctgacggcctttttgttgtcttctgaattttgtctttttcggttgtaacatagtttcctaaaattcaaattcgtttagcgattatttttctttcttttgaagttctttccgccgttgtttccaccattgtttccacgaccactttctttgctttgtgtaaagttcggagccaattctctcttgccaaatacttcacctctacaaatccaaactttaatacctaaaagacctactttagtcaacgcttctgcatgacagtagtcgatatcagctctgaaagtgtgtaacggagttcttccttctttatacatttcagaacgagccatttcagctccattcaaacgtcctgaaatctgaattttgataccttcagcccccatacgcattgtgtttgcgatagccattttaatggcacggcgataggcaattttaccttctacctggcgagcgatgttattagcaacaatcacagcgtccagttccggtcttttcacttcaaagatattaatttgaatatctttgtcggtaaccttcttcaactcctctttcaacttatcaacttcttggccacctttaccgataataatacccgggcgagcagtacaaacagtaatagtaacgagcttcagcgtacgttcaattacgattcttgatacacttgcctttgcaagtcttgcattaagatatttacggattttgctatcttccagcaaagaatcaccgtaatcatttccaccataccagttagaatcccatcctctgataattcctaaacggttgcttattggattaactttttgtcccatctaccttaattttgatcttcgttattacttttagcaccaacgaacaatgttacgtgatttgaacgtttgcgaattctatatcctctaccctgcggtgccggtctcattcttttgagtgtagcgccaccatcaacaaaaattttagttacgaacaattcgccgctttctgccttacgttcgtttttctgttcccagttagcaattgcagagcgaagcaatttttctactcttgcagcagcttcttttgaagaaaacttcaaaacaccaagtgctctgttcacttccataccgcgaatcatatctgcaaccagacgcatcttacgcggagaagtaggaacattttgcaatttagcaaaatacatggtcttaagggcttcttttcttttttcagccgatattttttttcttgctcccattatatttattactttattatttcaaataattcctattatcttttcttgttaccagcgtgtcctctgaatgtacgagttggagcaaattcgcccaacttgtgtcctaccatattctcggtaacataaacaggaataaatttatttccattgtgaactgcaacagtatggcctacaaaatcaggcgaaatcattgaagctctggcccaagtctttactacgactttcttgcctgattcattcattgcaagaattctcttttcaagctttacgttaatatatggacctttttttaatgaacgactcatagtttactcaattaatcagattacttttttcttctctcaataatgtacttagacgattgtttcttaggagctctagtcttaagtcctttagcatacaatcccttacgagatcttgggtgacctccagaagcacgtccttcaccaccacccatcgggtgatcaaccgggttcattacaacaccacggttacgaggacgacgtccttgccaacgagaacgtccagctttacctgaactttccaacccatgatctgagttaccaacactaccgatagtagctttacaagtactaagaatctgtcttacttcacctgaaggcaatttaatcacacaatacttaccctcacgagaagtcaactgagcgaagttaccagccgatctaaccaatgccgcaccctgccccggacgtaattcgatattatgaattacagtaccaaccgggatgttctgaagaggaagagcattaccaatctctggcgctgctgtttcacccgacatcagagtcgcaccaacttgcaatccattgggagcaataatatatcttttttccccgtcagcataaaacaacaaagcgatacgagccgaacgatttggatcgtattcaattgttttaactactgccggaacaccgtctttatttctcttgaaatcgacaattctaatcacttttctatgaccgccaccaatgtaacgcatagtcatcttaccttcgctattacgaccgccagatgatttcttaccatatacaagagacttttctggtactgatgcagtaatttcttcgaaagtaccaataattttatgtctttgccccggtgttgtgggcttaaatttacgtactgccatttttattaaatattgctataaaaatcaatagtatctccttctttcaatgtcacgattgcctttttaaaagcattcgtacgtccattgatgatacctgcttttgtataacggctcttatttttgccagcatacttcacagtattcacatcaactactgtaacattataaagagcttcaacttccttcttaatttccagtttgttagcatcaggacgcacaacgaagccgaaacgattcagcttatcagtgattgtagtcattttctctgttaccaacggtttaataataattcccattatttaagcctcctttttaaattaagatattgtcaatagccttcagagagttttctgtaagcacaacaaccccagcattcaatactctgtaagtatttaatcctgagatagtctgcacattagcaccctcgatgttacgagctgacaaatatacgtttttatttgcttccggtaaaactacaagtagctttttgtcggaaactttaagattttttgtcattgcaacgaaatcttttgtcttaggagcttcaaaagtgaaatcctccacaacaatgatcgcattgttttgcgctttataagacaaagctgacttacgagccaatgtcttaacttttttattcaacttgaagaagtaatctcttggtttcggaccgaaaacacgagcaccaccaacaagaaccggcgagttcatatcaccacgacgagctccgccaccacctttctgacgaccgatcttgcgagtagaaccgctgatttcacttctttcttttgatttatgagtaccctgacgctgatttgccataaattgttttacgtccaaatagatagcgtggtcgttgggctcaattccgaagatagattcgtttaacgtaacctttctcccagtgtcttcacctttaatgttatatacgttaacttccattatttctcaattaatacgattgaacctttgcaacccgggatagaacctttaatcaaaagcaggttatgatccgcgattacttttaatacctgtaagttttgtacagtgactctgtcaccaccaagttgtccacccatacgcattcctttaaatactttagcagggtaagaacaagcaccgatagaacccggtttacgagcgcgattgtgctggccgtgagtagtctgacctacaccaccaaaaccatgtctttttactacaccttgaaaacctttaccttttgaagtaccaacaacgtcaacaaagttagcgtcattaaacaactcaacagtaactgtatcacccagattcaattctgtttcaaattctttgaactcagccaagtgtctcttcggtgttaccccagctcttttgaagtgacccatcaacggtttagttgtatgtttttcctttttgtcctggaaacccaactgaacagctgcatagccatctttctctacagttttaacctgagtaacaacacaaggacctgcttcgataacagtgcatggaacattcttaccatcggcactgaaaacggatgtcattccgattttttttcctaataatcctggcatttcactaatttttaattatcaaactttaatttctacttccacaccactcggtaattccaacttcatcagagcatctactgtcttagccgttgagctataaatgtcgatcaatctcttataagaagataactcaaactgctcacgagactttttgtttacgaaagtcgaacggttcacggtaaagatacgcttatgcgtaggcagaggaattggaccgctaacaatagcgcctgtagcctttacagttcttacaatcttctcagctgacttgtcaaccaaattgtggtcgtaagattttaatttaattctaattttctgactcattacaattttaaattaagatatttataataagataaagcggcagactaagagtcattcgctagtctgctgctttaaatattttagagtaaatcagcacgtcccttcacttcttccaatacagccttagcaatagaagtagaaacctgagcgtgatgagagtaaaccattgatgaagttgcacgacctgaagtgatagtacgcaacgctgttacataaccaaacatttcagccaacggaaccattgccttcacgatacgagcacccgaacgactagactccataccttctacctgaccacgccgcttattcaagtcaccaataacgtcacccatgttttcttccggggtcacaacttccagcttcatgataggttccattagtacaggacctgccttggaacaagcattcttatatgcttggatagcacagatttcgaaagacaactggtcagagtcaactgggtggaatgaaccatcaaccaaagttaccttcagtgaatccaacggataaccggccaatacaccatttttcattgcagttgtgaaacctttctgaactgacgggataaattccttaggaatattaccacccttcacttcatcgataaactgcaatccaccttctttgaagtcttcatcaaccggaccgatcttaacaatgatatcagcaaacttaccacgtccacctgattgtttcttataaacttcacgaagatcaactgttttagtaatagcttctttatagttaacctgaggtttaccttggttgcattctactttgaactcacgtttcaaacggtcaataataatatccaagtgaagctcacccataccagaaataacagtttgacctgtttgttcgtcagttttcactgtaaacgtcgggtcttcttcagccagtttagccaaaccgttagacaatttatccatgtctttctgagtcttaggttctacagcaataccaattaccggttccgggaagtccatagattcaagcacaatcggagcagtttcatcacacaaagtatcaccagtgtgaatgtctttaaaacctacaccagcaccaatatccccagcaccaattacctcaaccggattctgcttgtttgagtgcatctggaacagacgagaaacacgttcttttttgcctgaacgagagttatagatataagaaccagcctcaatcttacctgagtatacacggaagaaagtcaaacgccctacatacgggtcggtggcgatcttaaatgccaaagctgaagtcttttcgtcatcactaggcttacgatcttcttcagcacccgtatcaggatttgtaccaattacgttttccgtatccaatggagaaggcaagaaagcacagacataatcaagcaacgtctgaacccccttgttcttaaatgaagagccgcaaagcatcggaacaacagccatctgaacagttgcattacgaagagctctcaatacttcttcttcagtaatagtagaaggatcatcgaaatatttctccatcaaagtatcgtcaaattcagctactttttcaagcattttatctctccattcgttagcttcatcaacaaggtcagccggaatttcttctacgctataatcagcccccattgtttcgtcatgccaatagatagctttcattttaatcaagtcaacaagacctttgaaagattcctcagcaccgataggtacaacgatgggacaaggattagcacccaaaacgtccttcatctgacgcacaacttcaaagaagtcagcaccggaacggtccattttgtttacgtatgcgatacgtggtacattatatttatcagcctggcgccatacagtttctgattgcggttctacaccacctactgcacaataagcagcaacagcaccatccaaaatacgcaatgaacgttctacctctgcggtaaagtcaacgtgccccggagtatcaatcaagttgattttataagtatcaccagcatacttccatcgtgtagttgttgcggcagatgtaatagtaataccacgttcttgttcctgttccatccagtccatagtagcagcaccgtcatgcacctcaccaattttgtgagtcaatccggtgtagaacaggatacgttcagaagttgttgtctttccggcatcgatgtgagccatgataccgatattacgagtcaaatgtaaatcttgcttagccattttatatcctttactttaagtttttaattgattgtatcttaatagtattagaatctaaaatgagcaaatgcacggttagcttcagccattctatgcatatcttctttacgcttgtatgcaccaccttgttcattgaaggcatccatgatttcagcagctaacttatcagccattgatttaccacctcttttacgagcaaacagaatcaagttcttcattgagattgattccttacggtccggacggatttctgtaggaacttggaaagtagcaccacctacacggcgagacttaacttccacttgtggagtcacattatccaaagcctttttccagatttcgagagcagatttttcttcattaggaagttttactttcactgtttccagagcggcataaaagatttcataagatgtattctttttaccatcatacatcaagtggtttacaaacttagaaaccttttgatcattaaaaacgggatccggaaggataacgcgttttttaggttttgcttttctcatttgtttgaaaaataatgtttttgttcttggttgttacttcttgacttcttcaactctccctccggagaatttactcaacccttagcatctccaacaaactaaaacgtaagttattactttaattttaattaaattttaatccttatttcttcttagctggtgcagcttgtcccggtttcggacgtttagctccgtatttagaacgtctttgagtacggccagcaacacctgctgtatcaagtgtaccacgaacgatgtgataacgtacacccggaaggtc

SEQ ID NO: 3004 - DNA, 60176 bp, Unknown
  gut microbiota DNA sequence
cctccgggaaggaggagtacccgtagggggaggtggtaggtgaatatataggtatatgaaatatactgccttacgattaaaagcaaatggccgcacctaccaccccgccctttgttttcccctccttcccagaggggaaaacatgcggatgatagctgttatatcgaactcacattaaaacaggctaaaataaactttgcgcaaatccgagaagtatgcaaaatcgattctgaaaaccagcagacattttgcaaatgagaaataaagaataaaagatgaaaaaagtaattgaacttcaaaatatcaaacgtgactttcaggtaggagaagaaaccgtccatgcgttacgaggcgtttctttcactatcaacgaaggagagtttgttactatcatgggaacttccggttcgggaaaatccacgctgctcaacacattgggctgtctggataccccaaccagcggagagtatctgctcgacggaatctccgtccgcacaatgagcaaacctcaacgggcggtactcagaaaccggaaaatcggttttgtgttccagagctacaacctcctccccaaaacaacggcagtagaaaacgtggagttgccgctgatgtacaactccgccgtcagtgcctccgaacgtcgccgccgtgctatcgagtctctacaagcggtgggactgggcgaccgtctcgaacataagtcgaaccaaatgtccggcggacagatgcaacgtgttgccatcgcccgcgcactggtgaacaatcctgccgttatccttgccgacgaagccaccggaaatctcgacacccgtacctcttttgagatacttgtcctgtttcagaaacttcacgcggaaggacgtacaattatattcgtaacgcataatcccgaaatcgcacaatacagtagccggaatatacggttgcgcgacggtcatataacggaagatacggtcaatacgaagattctgtctgccgccgaagcgctggctgcattgccgaaaaatgaggaagactaattaaagttataagcttttaaacatgaatggaaccaatttatttaaaatagctctccgggcgttggcgaacaacaagctacgcgctttccttaccatgctcggcatcattatcggtgtcgcatccgtcatcacgatgcttgccattggacaaggctcgaagaaaagtatccagcagcagatatccgaaatgggctcgaacatgataatgattcacccgggagccgatatgcgtggaggtgtccggcaagatccctctgcgatgcagaccttgaaactagcagactacgaagccttacgcgatgagacaaatttcctgtctgccattagtcccaacgtatcttcgtccggacagctcatcgccggaaacaataactaccctgcctccgtcaacggagtaggaacagaatatctcgacatccgtcagctcactgtcgaaaatggagagatgtttaccgaagccgatatacaaagctccgccaaagtatgcgttatcggaaagacaatcgtagataaccttttcccggacggtagtgatcccgtgggaaagattatccgtttcagcaaaataccgcttcgcgtggtaggtgtgctcaaatcgaaaggttacaactctatgggacaggatcaggacgccgtcgtgcttgcgccttacaccacagtgatgaaacgcctgctcgccgtcacttacctgcaaggcgtctttgcttctgccctcactgaagatatgacggactatgccacggaggaaatcaccgaaattcttcgccgcaatcataagctaaaagcctcggacgacgatgacttcacgatccgtactcaacaggaattgagtacaatgctgaactctaccaccgacttgatgacaaccctgcttgcctgtatcgccggcatttcattggtagtgggcggtatcggaatcatgaatatcatgtatgtatccgtcacggaacgtacccgtgaaatcggtctgcgtatgtccgtcggagcacgaggcgtcgatattctgagccaatttcttatcgaagcgatcatgatcagtatcaccggaggtatcatcggagtcattatcggctgcggagccagttggatagtgaaaagcgtggcccactggcctatctatattcagccgtggagcgttttcctttctttcgctgtctgtaccgtcaccggagtcttcttcggttggtatcctgcaaaaaaagctgcagatttagatccgattgaggcaatcagatacgaataaaaaactatctttgtctttatgaaacaaacctttacatccgcacgtcgtcccctggagatactgatacacattatcggctgggggattatgttcggtttcccgttctttttcgtcgaacgtgggaacgggaacatcaattggtgggcttacgtacgccatgccgccgtaccactttcttttatgatcgtgttctacgccaattatttcctgctggttccccgctacctttttcagaatcaggctaagagatatgttgtttacaacatcatcctattatgtgccattggagttttacttcatctctggcagagcctgacattcgacccgtcatttgctccgaaacccaaacgggcgggtatgcctccgggctggctgtttttccttagagatatgctgagccttgtctttactatcgggctaagtgccgctatccgcatgagtgcccgttggacacagaacgaagctgcccgtaaggaagcagaaaaaagccgtgcggaagccgaactgaaaaatctgcgcaatcagctgaatccgcacttcctgctgaacaccctgaacaatatttatgcactgattgcgttcgactcggacaaggcacaacaggcggtacaggaattgagtaaattactccgttatgttctgtacgacaatcagcagacgtatgtccctctctgcaaggaagtggacttcatccgcaattacattgaactgatgcgtatccgattatcgtcgaacgtaaaaatgactactcaattcgatatccagccggacagccagacacttattgccccacttatcttcatttccttgattgagaacgctttcaaacatggcatctcccccaccgaaacgagtttcatcagcattcgtatctcggaaagcaacaaagaggtaatttgtgagatccgtaacagtaatcatcctaagacaatggaggacaagagtggttcaggcgtgggattggaacaagtcagccgacggctggagatactttatccaggggattacacctggtcgaaaggcatttcgaaggagggagaagtgtacgaatctcgactgagtatcaggatttgagaataaaacgttaagtattaaacaatagatatagagaattatgatgttacgttgtgcaatcgttgatgatgagcctctggctctcggtctgttggagagttacgtgaacaagactccgtttctgcaactagccgggaaatattccagtgcggttcaggccatgaaagagttgccggatgaggaagtcgatcttcttttcctggatattcaaatgccggagcttaacggactggagttttctaaaatggtggattctcgtacccgtattgtgtttaccaccgccttcggtcagtatgccattgacggctaccgtgtcaatgcgctcgattatctgctgaaacctatttcgtatgtcgatttcctgcaagctgccaataaggcacttcaatggttcgaactggttcagaaaccggaagaaatagacagcatttttgtaaaaagtgactacaaactggtacaagtagacttgaagaaaattatgtatatcgaaggactgaaagattatattaaaatttatacagaagacgctcccaaacctattctttcattgatgagtatgaaagctatggaagaacttctgccgtccagccgctttatacgtgtacaccgttcgttcattgtacaaaaagacaaaatacgtgtgattgaccgtggccgtattgtattcgacaagacctatatccctatcagcgacagctacaagcaggtcttccaaactttcctcgacgagaggagctaatgtttagctgttttatcggtaaaaaagagaattttgtcgattatagtttgtcagaatatgatttatgcgtacatttgcaccgaacagaaaagggattgtgaaattccaagaatagaatagtttagttaagtctagtttagtttttgtgttgaaatggcttcctcgtcggcggacgaacaaggaagccattttatgtatatatactaactatttatatatcgtttcgaacttcttttaaatagtaatccaccccttttattccactttttctttgttatcagtacttgattgattaatactattatctatatattttttcaacttaaacaaaaagactagagatgttattgaaatcattatggctgctccacaaacgatattcccaataggatcacccagcttttcaataacatatttaattatatagctcataacagcagatcctataattatacagctgaaagatttcttagatattaaaggtctcatatgatttgaatttaattattaaaatatctccatactagttctaaaccctttacgacggatttacaattatacacatttaatcccttaattcaaaaaaatatttccactacattaaatattaatcaatattatactaaatgttcagtatttgaatatacttggtttttatttattgtccttaatttagcggaatacaaatatatttgcagaaaatattcattattttccctaactttgcagtgacaaatctcaccaaaatggaattcgacgtagaagaactaaagaaagcactaatagagaagtgcgagagtgaaggtatactgtatgcaatggttgcgatagaccgacgtacgaaagaagttattcttcccgatacactacaaggagctttgaaacatccggaataccttgtgtgtacttgtaaaaaggtggaagacaaatatatagtggaggagatcacgaaaacgtaactctcctccagtcttttatgttttactcagcaaatagtccgctaagcaaatcgttgtcttgcagataaggatttatgttacctgttgttttagtagctctgttttgaattaatgtatctctttactcgcatccccaatatacgatgcagcccctttatctataaacagttctacattctgtgcatgatgagcgatataagccgcaggacccgtatctcccgaattacagatttcctccaccacatccgccttattctttccggtaatcagaaaaataacatgacgggcattcagaataggatatccggtcattgcaatacgcttctgtccgttgcagggatgaatactgactacataactggaagtggaagtcaagagattctcctgtcctggaaaaatagaggaagtatgcccgtcgtctcccgctccaagcagtacaatgtcaaactcaggccagcccaatctgtatggcagttgctgtttcaccaattcggagtaacgaaccgcctctttcaccggcttagcttcgccacggatgcggaatacgttttcataaggaatgggggctatcccaagaaggagattacgcatcattccataattactgtcagagtcttcgggaggcacacaacgttcgtccacccaatagattttcatacggttccaaggagtgatatccagatattcattcgcccataaatcgaacatcaaagcgggggtattacctccactgactgcgatgttgaatattctgtccggctcctcattcatgagttccaccagacgaagtatcaacgcgcgtgaggtttcaatcgacgagggaaaaactgctaatttcataattcacaatattgatctgtgttcgtcaaattcttacaaggattcgtccagtcggccccatgctcgtgcatcattgcttcactttctagaggtccccacgtgcctgccggatagccgtacaaaggtgcgtcagggttttctttccaatagcggagaaccgggtcaaagaatttccatgaggcttctactgcatcgctgcgagtaaataaggtcgggtcgccctgaatacagtcgtctatcaggcgtgcgtaagcgtcgccgctcggcactccgcctaactgtgcataactgaaatccattgtcacctgacggacttcgaaacctgcaccgggcactttcattccaatcttaagcactattccttcgttgggttgcaaacgaagaatcaatttattagctcgcggacagttaccgccggagcagcgaaacatttgatgaggtgtttcacggaaatgaacgacgatttccgtcaccttcgtcggcatttgcttgccggtacgaatgtagaacgggacaccgctccaacgccagttactgatacccagcttcatggcaatgtaagtttccgtacgtgattcggaatctactcccttttcttcacgataacctttcttgttaccggaagccgtatattgtccacgaacgatgtgctcgttcaaatcttcttcagtaagcggcgtgagagactcgtagactttcaccacttcattccggaaattgtccgcattaaagacagcaggtggttccatagctgtaagagctacaagctggataagatgattctgtaccatgtcgcgcaaggcacccgccgtttcgtagaacccgccgcgttgctcgataccgaggttctcgacagctgtaatttctacgtagtcgatatagttacgattccagagaggttcgaagataccgttggcaaaacggaacgcaagcacgttttgtgcagtttccttgccaagaaaatggtcgatacggtaaatctggtgctcgttgaagacagaagcatagatacggttcaactcacgtgccgattcgagatcgtaaccgaaaggtttctcgacgatgatacgcgaatgaggagtatttagtccggcagccttcagatgcagaggaactacaccgtaaagcgaaggcggagtggcaaggtaaaacaacaaattatccggatctacctcgttagttaattccaccagacgttggcggagtaaggggtaaccttcttcctttgcagggtccagcggcaagtaatacaggtgagagacaaaagaagacataagaacagtatcctgttcgtctgccttgacgaattgttgcagttcttccaatatataagaacgatagttctcgtcggagtatatcgtacgcccgatgccgagtatagagaaatctcctgtaagccgcttgtcgcggtataaggagtagagtgcaggcatcagtttacgcttggtcaggtcacccgacgcaccgaaaataatcattgcaaatttatccattgtcgcttttttatttctacttatcaaacaatcttgttacttgaaaatacctatttattatacattatatgttccagatttcgtatcgcctccgtgtcctgtccagttttcatggaagaactgtccgcgcaactcatcttttcgttcgaatgtatgcgcgccgaagtagtcgcgctgcgcttgcacaaggttagcgggcaaatcggcagaagtgagtgaatagaaataattcaaagcagaagaaaaagccggaacgggcagttcttctttcatcgcttctgcaacgagactcttccaaccggaaagcaacgtcttgatttcttcccggaaataaggagccagcaacaagtgcttaggtttatcgggtgcttcgaaagcggcagcaatatcgttgaggaatacactacgaatgatacatccgccacgccacatacgagcaatggaggccagatcaagatgccagtcgaaagcatcggaagcacgttgcaacacggcgaatccctgtgcataagagactagtttagaagcataaagggcggaaaagatattctttacaagttccgccttattatatataggttgtgtatgttgacactggaattgtttggaagccagacgacgcaggtctttttgtgcggaaaggctgcgttcgaatactgccgtggcaatcagccccaacggcatacctagttccatagcattaataaccgaccatttaccggttcctttctgtcctgctgcatccagaatcttatcaataagatatcccccggttttgtctttatgacggagaatgttggcagtgatttcaatcagatagctgcgcagctttccttcattccaacgggcgaacacatccgccatttcttcattattcaaatcaatcagattcttcatcacccaataagcttcggcaatcaactgcatatcaccgtactcaataccattgtgaatcatcttcacaaaatgtcccgaaccggcagggcctacccattggcaacacggtgtaccatccggtgcttttgctgcaatactctgaagaatcggcttcacttccgaccatgctttttccgaaccaccgggcatgatagacgcaccgttcaatgctccttcttcccctccggacacaccactaccgacgaaaagaaaacctttcgattcggccagtttgacacgccggttggtatcttcataattggagttaccaccgtcgataagaatatctccgggcgaaagcaacggaaaaagttgttccatcaattcgtctaccggacttccggcacgaaccatcatcattattttacgaggggtagctatcgaatcaacgaatgcttttatatctgtgaatccttcaatatttttaccttttgcacggctattcataaagcggtctacgactccttcttccactccgggaacagtacggttgtaaactgatacataccagcctttactctccatatttaatgctaaattctcgcccattacagccaagccgattagcccgatatctgttttattctgatttgtcataacttgtatattttgatataatgtttatcatagtaacacttgaaaagaacatttgttcgcaatatttagattaaaacattatttttgtggtctacaaataaaaacaaggatgaagaagattaaaatcggcttattgccgcgtatcattatcgctatcatactaggtattgctatcggtacagttttcccggcaccactggtacggatatttgttacattcaacggtattttcagtgagtttctcaacttttccattccactgattatcgtcggactggtcactgtggctattgccgacattggtaaaggtgcgggaaagatgttgcttgtcaccgcactcattgcatacggtgctacgttgttttcaggttttctctcctatttcacaggagtcacagtattcccatcactcatcgaaccgggcgtgccgctcgaagaagtaagcgaagcacaaggaattcttccctacttctccgtctccattcctccgctgatgaatgtaatgaccgcgttaattttcgcttttacgctggggttggggctcgcctccctgaacagcgatgcgctaaaaaacgtggcaagggacttccaggagatcatcgtccgcatgattagtgctgtcattctgccgttgcttccgctttatatcttcggtatttttctaaacatgacgcactccggacaagtatacgctatcttaatggtatttatcaaaattatcggagtaattttcattcttcatatcttcctgctggttttccaatattccattgcagcattattcgtgcgcaaaaatccgtttaaactgctcggaaagatgatgccggcatatttcacggctttaggcacacaatcttcagcagccactatccccgtcacactggagcagacgaagaagaacggagtatcctcagacattgccggcttcgttattccactatgcgccacgattcacctgtcgggcagtactctgaaaatcgtagcctgtgcactggcattgatgatgatgcagggaataccgttcgactttcccctatttgccgggtttatctttatgctggggattacaatggtagctgcaccgggtgttcctggaggagcaatcatggcggcactaggtatcttgcagtccatgctcggcttcgatgaatcagcacaagcattgatgattgctctttacattgccatggacagtttcggaacagcttgcaacgtaaccggagatggagctattgctttgattatcgacaaaataatgggcaaaaaccgtgctgaacgactgtgctgaaaaataaattgaaagaggtttgcatatactgcaaaaaatgtcgacatttgcgcccgtattattccaaataaacaattataacgtatgaaaaaagccctaatatcaggcattaccggacaagacggttcgtatcttgccgaattacttttgcaaaaaggttacgaagttcacggtatccttcgtcgttcttcgtcgttcaatacgggacgtatcgaacatttatattttgatgaatgggtgcgcgacatgaaacagaaacgtacgatcaatctgcattatggggatatgacagattccagttcgttaatccgtatcattcaacaagtgcaacctgatgaaatttacaacctggctgcccaaagccacgtaaaggtatcatttgatgttccggaatatactgccgaagcggacgctatcggtacgctccgtatgctcgaagcggtacggattctgggactggaaaagaaaacccgtatctatcaggcttccacttccgagttgttcggtaaagtgcaggaagttccacagaaagagacaactccgttctatccccgttctccgtacggggtagccaaacaatatggtttctggattaccaaaaactatcgcgaaagctacggtatgtttgccgtaaacggtatcttgttcaaccacgaaagcgaacgccgtggcgagacttttgttacccgcaaaatatctctggctgccgcccgcatcgcacagggcgaacaggacaagctgtatctaggtaatctggatgcacgccgagattggggatacgccaaagattacgtagaatgtatgtggctgattctgcagcatgacgttccagaagatttcgtaatcgctactggagaaatgcatacggtacgcgaatttgctacgctagctttcaaggaagcaggcatcgaactccgctgggaaggcgagggcataaatgaaaagggaattgacgtagacaccggcaagccattggtagaagttgaccccaaatatttccgtccatcggaagttgaacagttgttaggcgacccgaccaaagcaagaacattgctgggttggaatccgtgcaagacttcatttgaagaactggtccgtatcatggtacgccacgacatggaaaaggtgaaacgcatgatcgcgaacaaacattaaacggaagaatggaaaagaatgcaaaaatatatgtagcaggacaccacggtctcgtgggttctgctatctggaaaaatttgcagaataaaggatacacgaatctggtaggccgcactcacaaggagcttgacctgctcgacagtgtatctgtccgccagtttttcgatgaagaacagccggaatatgtattccttgctgctgccttcgttggcggcatcatggcaaacagtatctaccgcgccgactttatctacaaaaatctgcaaatccaacagaatgtcatcggggaaagtttccgccacaacataaaaaagctactctttctcggcagtacctgtatttatccacgtgacgccaagcaaccgatgaaagaggatgtattacttacttctccgttggaatataccaacgagccgtatgccatcgccaagattgccggtctgaagatgtgtgaaagtttcaacctgcaatatggaacaaactacatcgctgtgatgccgaccaacttatatggtccgaatgataacttcgatttggaacgcagccatgtactgcctgctatgatccgcaagattcatctggcccactgcctgaaagaaggcaactgggaggctgtccgaaaggatatgaacctgcgcccggtagaaggtatcaacggagacagtccgaaagaagaaattctggctatcctaagcaaatatggtatcagtgaaacggaagtgacattgtggggtacgggaactcctctccgcgagttcctttggagtgaagaaatggcagacgccagtgtattcgtcatggaacacgttgacttcaaagatacatataaagaaggtagcaaggatatccgtaactgtcatatcaacatcggaacaggtaaggaaatcactattcgacaacttgccgagcggatcgtagagacagtaggctatcaaggcaaactgactttcgacagcagtaaaccggacggcacgatgcgtaagctaaccgatccttcgaaactgcacgcactgggttggcatcacaaaatcgaaatcgaggaaggtgtgcgaaagatgtatgaatggtacttgaaataaaaaatcaaacaatctgttgatatgctatcagtataattattttagcttatagcatatcacagactcactcttctctccaccctctccaaaaattcttcatagttaattttccattcttaatttaattgctatatttgcacaatttaataccaaatgtgcaaaaacaatggaacaaagttttatagcttacattgagaatagtatcaagaacaattgggatttggatgccctgacagattacaagggagccacccttcagtataaagatgtagcccgcaaaatcgaaaaactccatataatttttgaggaaagtggaatccgcaaaggagataagattgccgtatgcggaagaaacagctcccattggggagtaactttccttgctacactgacgtacggagcagtaatcgttcctattctccacgagtttaaagcagacaatgtacacaatatcgtcaaccattccgaagccaaactgctgtttgtaggagatatggtatgggaaaacctgaacgaatcggcaatgccactactcgaaggtatcctgatgatgaatgacttcaccctgctggtatcccgtagtgaacggttaactcacgcacgcgaacatttgaatgaaatgttcggcaaaaaatatccgaaaaatttccgtagagaacatatcgaataccacaaagacgaacccgaagaattagccgttatcaattatacttccggaacgaccagttattcaaaaggagtaatgctcccctatcgtagtttgtggtcgaatactaaatttgcatttgaagtattggagttggaagccggagacaagattgtatccatgcttcctatggcgcacatgtacggactggctttcgaatttctttatgagttctccgtaggatgtcacatctacttcctgacccgtatgccaagtccgaaaatcattttccaggcatttgaagaagtaaaacccagtttgatcgttgccgtcccactgattatcgaaaagattatcaagaagagtgtacttccgaagttggagactccggccatgaaaatattactgaaagtacctattatcaacgataagattaaagcaacggtacgcgaagaaatgattaaggcgttcggcggaaacttcaaagcagttatcgtagggggtgcagctttcaatcaggaagttgagcaattcctgaaaatgattgattttccttatacagtaggttatggaatgacagaatgtggtccgattatctgctatgaagattggagaaggttcaaacccggctcttgcggaaaagctgtaccacgtatggatgtacaggttctatcttccgacccggaaaatatcgtaggagaaatagtttgtaaaggaccgaatgttatgctgggatattacaaaaatgaagaagctacaaaagaagttatagataaaaacggctggctgcacacaggagacctggcgttgaaagatgcggaaggaaatattacaatcaagggacgcagcaaaaacttattgctcagtgccagcggacagaatatttatccggaagaaatagaagacaagttgaacaacctgccctatgtggccgaaagtattattgtccagcagaacgaaaagctcgtcggacttgtttatccggactttgatgatgcttttgcccacggtttgaagaacgaggacattgaacgggttatggaagaaaaccgagtggcgttgaatgctatgttgccggcatatagtcagatctcaaaaatgaagatttatccggaagaatttgaaaagacgccgaaaaagagtattaagcgttatctgtatcaggaagcgaaaggataattatcctcccatgcatttccacctgaaccgagaaaaaagaaatcaagagaaagagaaatatattaaaaatgaagataagaaaaacaatcctcacggcagctattctcatggctgccgtttgtttgccggcacagaataagagtgcgggtatcaatatttccatttggaaagatatatgtacgcagccgcatgacagtacgcagacgacctatgtcaatatcggtctgctttctacgttgaaccgcctgaatggtgtcggtatcaatgcattgggaagcgtagtgcatggcgacatgaatggagtgcaaatcacaggtttggctaacttggcaggtggaacaatgcgcggtgttcagatagcgggtgtcagcaatatcagcggtgacaataccataggactttctactgccggattagtaaatattaccggagacggtacaaaaggggtaattattgccggtcttaccagcatcggaggagataatacttcgggagtgatgatgagcggttttatgaatgtgacaggaaacatggcttcgggctttcagttctccggcgcagccaatatcaccggacagagctataacggtatggtaacttccggactactgaatgtggtgggcgaagatatgaatggtttgcagattgcaggtattgccaatattactgcccgaaaactgaatggcttacagatcgctttatgcaactatgcaacaaaagcccgtggtttacaaattggtctggtcaattattatagggaagatatgaaaggcttgcaactgggtctggtcaatgccaatcctgatacgaaagtgcaaatgatgctgtatggtggcaattctacagctgccaacatcggtgtgcgtttcaagaaccagctgttctatacaattctgggagtcggttccatgtatcaggacttaaatgacaagttctcagccagcgcctcctatcgtgctggtatttccttccctgtttataaaggactatctatcagcggagatcttggttatcaacacattgaagcattcgacaataaggatgaagtaattccaaaacgcctatatgcactgcaagcccgtgccaatctggaatatcagtttactccaaaattcggtatttttgcaacgggtggttacggacttacccggttctataataaatcaagcaattacgataaaggtgttatcattgaagcaggcattgttcttttctaaaaaagaatgtatgtatagcaaacagtatacaaaatagtgaacggtgaacaagttgctttattacgttgcaacttattcaccgttcattgttaatcactacttactattcttttatatcttctcttttatcaatccggtacgataagcaacaagtagcttttttaaatcctgaatctgcgttaccagctcttttcctttatcagtatctttcaccatcattcgttgtgaattgaattccagtacaaaattggtagacttaatatccagcccttcctcaattgctttctgccgcgactggaatggttcatgctgtacaagctgcataccgtgagaatggtaaacaagcgtatatcctgcaatccctgtttccggctgataagcctttgaaaatccaccgtcaatcacaaaaagtttgccgttagctttcatcggctgttcgccctgaatagtctttaccggcacatgaccattgatgatatgcgaatgaggacccgaagcaccaaattcttccagaatccggtcacaaatatcctcacgattacgcaatgtataataatgccctttcttctctttgtgcagttctttatcttctacaaagtagcgctcaaaagtagccattttatctttatcaaacagaggagcttcaggaccgcaccacatataccagatatagtccatagcaaattccttatcctcctctccttcttcatcaaagtaagcggtacgaatcaactggtcggccttatccagtagcctacgtccccagtattcctttccccggattttgacacgcttgaaactgccatcttcatttaaaggtacggaagcatgataaagaagattcgagttggaaaccaaatacatcccgccatacgtaaacagacagcgcatatgtttcttcaacttctcactattcataaatgaataatgaatcttttctaccagttcacgttcctcttctgtcagccgataaggattggctgggtctactgtcggaaagttggtatcacgcaggacatattcttttccctcgtacacaaagacaccacggtcgaagtctatcttctctaaaagtttccgattctccatgccgaattcaggacgacggtcgatgatttcagcctccaacttaaactggatgatagtaatcgctttatgcatctgggtaatcaaacgcagggttttctcattatagtgagcgtcggcaaaattcatcttcggcatgaagatagtacagggatcatcagcataagtatccatagcaaaggtagccaatggcagcagattaataccataaccatcttccaatgtgcccaaattaccgtaacgcatagacatacggatcacattagcgatgcaactgtcattgcccgaagcagcacccatccaaagaatatcatggtttccccattgaatatcaaaattatgataattacataaagtatccatgatgatatgcgcaccaggaccacggtcgtagatgtcaccgacaatatgtagggagtcaatagtcagccgttgaatcaggttacacatagcaatgatgaagtcatctgcccgctttgttgtaataatcgtactgataattacattgatataagcatgtttattcggttcgatagacgattcatgcaataattcctgaataatataggagaactcggcaggtaacgatttacgcactttagaacgcgtatacttggaagacacattctgacagaccttcaccagttggttcagagtaatcagataccaatcgtccaagtccttctcacgagctttcaccagttgaagtttttcttcgggatagtaaatcagcgtacagagttctttcttttccgcttcacggagagtattgccgaatatttcattcactttacgctttaccgcacctgaagcatttttcagtacatgttggaatgcttcatattcaccgtgtatatctgtcaggaaatgttctgtccccttaggcagattcaagatagcctccagattgataatttccgtactagcatcggcaatagtaggaaaactacgggaaagcaattgaaggtagcggagatcgcccacaatactttcaggagttatattactttgagcagtcattctattttattacaatttactaattaacaattactttgcttcctatgttcgttgttcggaatcattccattcagttatccgtgataaatatattttttatttactcgtttacaattttcatataaaatttattttcaacctaataagaacatcaacagtacttgtgcaataatcacccgtagaaacatacacaatggatatactgtcgcataggctacagacgggttatcaccgggaattgtatcatttgcataatttaatgccataggattcgccatacttccgcatagcataccggacactgtgccaaaatcgatcttcatcatcttgaaggctacaaagcccactaaaacagttgggatgattgtcagtccggctcctaaaccgatccacagtagcccttccgaacggaataccgtatcgaagaaatgtgccccagcatctagtcccagacaggctagatacattgagagtcccaaggcacgtaacatcaaattggcactacgagtagtgtaggtaatcatgtgtatccgtggtccaaacgtacctaaaaggataccgacaataataggaccacctgccaagcctagttttacaggagtactgatacccggaatagaaaaaggaatagcacctaacgccaatcccaacacgataccaataaatataacaactaaattaggttctttcaaactcttgacagcattacctagcactttttccacgttttgaatggctgccttttcccctactaccgtcagtcggtcacccaactgaagtatcaatcccggagtggcgagcagttgtacacccgaacgatagacacggctgatattgattccataatgatttctcaaccggagcgctcccaatttcttcccgttcagttcagggcgagtgacaacaatgcgctgggagaccagttcactgtcaatcgcattccagtcaatgtcctctttgttccaatccgtattttcctgttcgccgaaaagcacagtcagagccagcgcatctttttcagccgtaatcaccagcaagcgatcaccttccttcaacactttatcagaagtcggaatactgacatgtccgtcacgccacaaacgggaaataacaaacttaggataactcaaatgagctatatcctttatgcttttattgaaaatagcaggattatgtacttgaaacgctgcaatataggttttgttcgcatcatccttctcctttatttccaagtcttccttgcgaaccaatactttacgaattaacaaaacggcaagaatcacaccgactactcccattggataggccacggcacatcccagagcaggcgtactactatccatgcccatttgtttcaatgtctgctgcgccgctcccaacgccggagtgtttgtcgttgctccgcaaagaataccaaccatatcgggaagtgatatacctgtagcataactggctaccaccgttaataaagtacccagaagaacaactcccaacgccaacatattcaacgtcactcctcctttccggaaagaactgaaaaaaccgggccccacttgtagaccgagagaataaacaaagataaccagaccgaaactttctgcgtaattcaacatctgcgggtcaaccgaaagcccgaaatgcccggcaagtataccggcaaaaaaaacaaaagtgactcccagggatataccccagaaatgcactcttcccaagcccagacctatcgcagaaatcagtgaaagtaccacaacagcctgtaaggcagaatgttcgagaaatagactagataaccactccatgtatatataaaactaatagggcgcaaagataaaaactatttagtcccgttcaaaacttttatgctttcatttcgcgccctatttatactctaacccttattcctgaaatcctattggcaaccttttacctctcctacctatcattctgtcattaacccctgacacatttttatcttatccttctttgtcctcgtctttctacctgcatcttgttatctccgatacctattgttttttttacctgcttccctgatattccacaaagttatcccttccgtccagataaccgcttaatctgtttccaccaaggtacacatcatccagataggaaacatcacccggaccgtaggacatcctgatagatgtttgtgcatagttttcccagttccaccggaaattatattcaaaaacttccacatctccgttacggtattccactcgtatgtaatcaacccctgtacggtctaaataaaaatccagttcttgacaacaacggttcccgtctgcgtcacggtaataactgatccatgtgcgactgcacaattccgacgaacgggaataatacccgccaccgatattatcatcatcataaaagctatcaatttctacttcgcaagaagtaaggctaatcatcatcaatgccattaaagctatacctaagtatttgaatgcgttcgttttcataatcctttatttttatggtccttatttatatcatttatctttcgatatgacaaaagtatagaatgaattttccttatgaaactgaaaagtcctacttgtacggaggaaattgcctaattatggaggtaaatccctctgtacccaataaacctatctcaaagaaatctcgtatctttgcctccgattaccaatatatggaaacagatatcatcaccgtatccgactttgagatgcgtcccgttgattatatgttagcccgaagcatagaacatgcaaaagcaaaacaaacaaaaatgtatgctatctccttgagaggtaagagtgccgagacaagttacctgcaactatgtgataaatattgggaatatagcattcaaagcagtaaaaatcttaataaagattgaatagtagaatgaattatttaatcaatgttataaaacatctgttttttcttgctttacttgctaattttccagaagtccgtatctttgtaatgtgtttttcatagtattagatttaaggttaacaaaagattggctgtctgggatagatagcctttttttatgctctgaaatatagcgtcactgtccggtcgacatagttaccctatctcactaagataccgtcaatatcgcaagcagataccgtcaatatgtttcaagttctttccttcgtaacaaaaaataaaagatatcgaaaaaaaatcattcgtttaacatttgaaacatagcaagttatctgatttttcaaaaaacagactaaaaaaatcttgctaaaagatttgcgtagtccaaaagttccccctatatttgcaccgcatttgagagagaatgcgggttcaaggaagtttgggtgagtggctgaaaccaccagtttgctaaactgacgtactcgcaagggtaccgggggttcgaatcccccagcttccgcaaacaaatctcaagagaaaaagagctaagtttataagacttggctctttttaaatccataaaatgccggtgggttcgtctaacggttaggacacatgcctctcacgcatgtaatacgagttcgattctcgtacccactactaaataaaagaggaaatgtagttaaactacatttcctcttttattttatatatcttaaagtaggaatctttatctatcctcagccggattctgtcttcccgcttttgcccagccagattaacaaataagttaaagtataattgactaaaagaaagctcggaatgatcataagttatatcaaatgtccaggtcctgcgaaatgaatcaaaagtagcaaaagactgttcccctcctttacacataaagacttccgggaaagacgctggcggataaggctggaataaaccggccagttgagcataaacataatcaatcatccattcatcgtcggttaaagttaactctccctttaaacgaagtttaatggcataactagcagtagcatctgcggaagtataaacaggaatctggctttctaccggataattaccgtctttgtaaccgaggctcatagtcaatacggatttacctacaccattgaactctgcaacctcccgggttcccgactgatttttcagattaatcataaacgtcagcttgccaagagtcggatcacccggatactgcgcaagcgtatccaatacataatcctcttcattatagctctcagccaccaaaatactattagatcctacttccagagccggaccgcctttttcaatatccacattacccacaggataatatatcgcatcattatccttcacacaactgcaaaaacaaagcagcaatacagccgctcctataattttattcatcatcgcctacatcttgattttaagtacaaagatacatcttttttgtgccacacttgatttatgtcaaccgtttttagtatttttgcacacatcaagacaaaaaagaaatggacacactattaagagagacagtaaacgccgttgtaaactcccgctttccggagatgagtatagagggaagaaggcagatcgaaaacattctcattcgtgaagaatatccgaaaggagccatagcactgaatgaaggagaagtagcccatgaaattgtttttgtcggcaaaggaatgcttaggcagtattactataaaaacggaaaagatgttaccgaacatttctcttacgaaggatgtatcgtgatgtgtattgaaagtttcctgaaacaagtaccgacaaaactaattgtagaaacattagagcctgttgttctttacatgtttccgcgggatatgctatttaagttagccaaagaaaattgggaaatcaatatgttttatcaaaaaatactggaatactctttaatcgtatcccaaatcaaagcggactcatggcgcttcgaatcggcacgtgaacgttataacctcctgctcgaaacgcatccggaaatcatcaaacgagctccattggcacatatcgcctcttacctgctgatgacgccggaaacactaagccgggtacgttccggcgtcttatagtaaaaaacaacgcacaatgaagacaaaacatatatgataacagaatattccgttatcggcttttgcggtattctttaggagacataccggtataatgcttaaaatatttcccgaagaaagactggtttgcaaaattgagccggtcggcaatctcttgtatattcatactcgaagaattcagaagcgcttttgcctccagaatcaccagctcatcaatccactcccccaccgttttaccactgacttctttcaccacacctgagagatgtttcggtgtcagacacaactggtcggcataaaatttcacactacgttccgattgataagattctatcagagattcatagaaacgctcgaatatatactctttccgacttttattcttcaccgtagcggcggcagtcggagcatggctattaaagatattgcaaagttcgaagaaaaaaccttgcatcagtcccattacgacttctctacgatacaagtcctccttattcttcaatcttttcctgataaagctataatattcccggataatatcctgttcatgcggcgtaaggtcaaaacaaggataatctttcaaataaaagaacagagaaagtacattccccactttaggcaatgcttccagcaaattctttgataccgcaaagaaaatagccttgaaatcaggactaaaccacctatgctcgataatctgattcggcaagacaatcaccattcgtcccggaactatttcatactcgcgtaaactaatattaaatttactaccacctcccaaacagaggcccactgtaactacctccagcttactaggtccgctatacaaggaaacaacgctctccgtatcgaagagcgctatatcattgtcaaccacatcaatgcagtcaggatctatatgcttggaatgaactaccgaagaaatacctattttcggaacaccttgaatctccatactctctctcttttttagtgacaaatataccagctattaatcagatatacaaccaaacaaaaagattatctgacaaaatgaacaaaattagttacttattgaccaccccgaataaatactcataatcatgtttggcggcagggactgtccactcttcaggaataaatttccactggttcaacgccttcgggtccattatccctttcttctcgatataattcatcagatagaagcgaaggtccttgtccgtagagaaaataatacggtctttcaatttctcctgtggaatcccggagcctttagtcagtaactcgccaccaccgttaccgcgataagagttcagagccaccttatataccttgttcataaggaaaggagagccatcggccatactggcaatcgtcaccttctctccttgtggtttggtgacatccaccgtataaataatgcctgatgccgaatcaaagttaaaactgtaattctggaaagaggccctgtcctccgcaccttcgcgacgcttctccttgaaccagagcaaatgatcgtccggcgatttcatccgatttgtccacatataataagacatttccaaaaaatctttaatttcttttcccgacaatgtcatcacgtaaagcatattctcgtacttatacaggttgaacatatcactgacagacacatccccttcctttatttccgcatcaaatgaaagcggagcagcgaaagaaacatccgcccccgtaatatcaagctgcaacgtatgtatcaaatcaatgaaagcagaaggaccgaagaaagaaggatgagtagagatactttcagtaaatgtacctatctttttggatacaaacctcttcacggtctcatactgagaagcgaaatgtttcataaagtcctcgctgactccataatctttcgtttcagtaagtctccccctgatatctttatccaccaatttcccgtctttcaatttcagagtgacatccacattagagagcaccaccccgttgctggccgggtcaataatcaagaccgaatctccgacaatattcaccaccttcttacattcacgggcatgatcatgccccattaataccatatcaaatcccggtacattcttcgccacattcagagatgcgttctcattatatttgccggacattttgaacgcttcctgccccgcatggaacaagccaatcactaagtccggattctctttttcacgaataatcttcatccatttacgagccgtctcctccatatcgtcaaaatgcaatcccttccacaaattttcggaaagccatgcaggaatagccggggtaatcattcccaagataactattttcacaccgtcacgcctcagtaccttgtacggtggcagatacgtttctccggtagacgtatctatgatgttcgctcccaatatagggaaatcacaagtcccgatccaacggtcgaacacactgcgtccggtttccacatcatgattacccatattgccggcatcatatttcatatagttcatcatctccgcacaaagatgaggagataccgtatctatataattatagtaataagctgtaggttgtccctgcaagatatcaccattatcgagtaaaataagattctctttatactcccggcgctctttctgtacaaaagaatagattcgcgccaagctgcctttccattcctgacgggttataaagttataaggataatagttgccgtgcacatcacttgtttgtacaatcttcagcttcaccactttttcctgcgccgcaacggacagcacgaggaaaagaagccaaacataaatcaatgtaaatcgtttcattctttttctatatttagcgggtgagagaaaacaaaccgtgcccctcctgtgtaatcaggatcaatccatatctctcctttccatttatacacaatcaatttacagatagacagtcccaaacctgtcccctgcgcatattcattcagtttttcaaaacgctcgaacaccaacgcctgtttctccttcggaataccgcatcccgtgtccgtcaccgaaaagacagccatttgcgtctcctcattcaccgaaaaatccaacgttatctttccctgttttgtaaacttatcggcattggacatcaaattgataatcacctgctgcatacgctgcacgtccgtctccattcggaaactctcgaaagatgtattgaatagaaactgattatccgaccgtcgcgagaaactgacagaagccaccacctggttgcataactgcaccacatcacactcctcccaagtcagcgtcacccggttcgcctccagacgtgaaagatcaagaatatcgttaatcaggcgaagtaacaaatctgagttcgtcttaataatctgataataggactgttgttcctcctctgtgctgccgcctaccgccagtacatccgaaaagccgacaatagaattcaacggcgttcgtatctcatggctcatattagctagaaaagcacttttcagacgattcgattcttccgccctatccttcgctacacgcagatccttctccgatttcaacaattcatccctcaaacgtttcgtgcggaaataataaaacagcgaaatacataatccgagcaccaatatcacaaacagcgcacaagcggaccaaatctgatacgtatactgctgatagaaagaaaccggctgattaataagctgcacatcaaaaggcaagactttcggattcaatccccattccttcacctttcggctatccaatacagccttacaaccaatcacggaaagatgtttcgccgtatctcccggctgactatccattcgtacagattcctgtgccatttcctttcccactttccgatagtcaggaagcacgccgccaattgcccaagaccccaagctcaccgaagaaggtgtaaaagccggaatagcgggagtcgcctccatcatggcataagtggcattccgcatgaaatacccctcattcatatccacacgccaagtccccaccataataaccgtattttccggcaaatgtctcaactcctccacaatcgtgtagatagtatgcttacgcccgtccataagaatcaaatccaaatcggggaacttttccatttccttccgtaccaatgcctgcatagtcacaccgccatacgtattatccgatataaaagcgatatgctccgtttttggataaaacgtccggagcatacgtatattcccctctatgtcatactgattaataaagcccgattcgagttccggaatatccatgtggtcagcaaaaatatctacggattcgggcatccagctatcaagattcttcacggtatccttcggtaatattacgatattactactcgcgaggctacacatgaccggcacttttatctgcatcgaatccctttgtgacaaataagccgcccatgcttcctgacccaataaaataatttgtcccggatgcttctctccctggtatttagaaagaatctgcgtcatcatatcactccagagcggagcttccgagaaacttttacagttcatgttttcaatgataatgtcacgctgccctcccagtttgccatattcttccatataatcggaaatggtgaccgaagtctggtgcgctgccggattataggagcagataatcagaatgggattcttatctttagagacagcccatgcccccataggcacgaacagccaaagaatacagacgaacaggtatcctacatatctcgacataattgtgttgttttaatctgcgaccttttttattttgcatgcaaatataacaaaacttgtcgggtataacagatttatatgtatttttgtcgctcattcattttcaaaaaactgtttatggaattatttcacaagatgatttccggatcattaggcataccggaaagacaaatcgccagcacccttcatcttttgggtgaaggtgccactataccattcatcagccgttaccgtaaagaagctacgggtggactggatgaagttcaaatagagcagatcaaggagcgacacgataagctgtgcgatatagccaaacgcaaggaaacgattctcggtactatcaccgaacaaggtaaactgaccgccgagctcgagaagcgcatcaacgacacctggaaccctacggaactggaagatatctatctcccctacaaacccaaacggaaaacccgtgcggaagccgcccgccaaaaaggactcgaaccgcttgccacaatcctcttgctacaacgggagaataatcttgccgtccgcgcctcctccttcgtcaaaggtgacgtgaaagacatagacgatgccctaaaaggtgcccgtgacatcatcgccgaacaagtgaacgaagacgaacatgcccgcaacgcagtgcgtaaccagttcggacgacaggcggagatcatcgccaaagtagtgaaaggcaaagaggatgaagctgccaaataccgggattacttcgacttctccgagtctctgaaacgctgcacctcccaccgtttgctggctatccgccgtgcagaatcggaaggactgctgaaagtctctatcactccggatgatgagacgtgtatcgaacgtttggaacgccaattcgtacgaggcaataacgaatgcagccatcaggtaagcgaagccactgccgatgcctacaaacgtctgctcaaaccctccattgaaacggaatttgccgcccaatccaaagaaaaagcggacgaagaagccatacgcgtgttcacggaaaacctccgccagctactgcttgccgctccattgggacagaaacgggtgctcgcaattgatcccggattccgtaccggatgcaaagtagtttgcctagacgcacaaggtaacctgatacataatgaaaatatctatccacatcccccggtcaacaaacccggcgaagccgcttccaaactccgcaagatgatagaagcctatcagatagaagcaatctctatcggcaacggaacggccagccgcgagacggaagactttatcaaccgtcagacgtttgaccgccaaattcccgtattcatggtcagtgaacaaggagcttctatctattcagcttccaagatcgctcgcgatgagtttcccgactatgacgttacagtacggggagcagtctctatcggccgccgtctcatggacccattggcggaactggttaaaatcgatcccaaatctatcggcgtaggtcaataccaacacgatgtggaccagacaaagctaaagaaagcactcgaccagacagtagaaaactgtgtcaacctcgttggtgtcaacctgaacacagccagtagccatttgttgacgtatatctccggcctgggacctcaactggcacagaacatcgtaaactatcgtgtagaaaacggagccttcaactcacggaaagaactgatgaaagtcccacgcatgggtgccaaagcctttgagcaatgtgccggctttctccgtatccccggagccaaaaatccgttggacaacactgccgtacatccggaaagctaccacatcgtagagcaaatggccaaagacctgaaatgtaccgtcgacgaactgatagctaacaaggaactccggcagaaaatcaatatctccgactatctcactcccaccgtcggactgcctaccttacaggacatcctacaagaactcgacaaaccgggacgtgaccctcgtaaaaccattaaggtattcgaatttgataagaacgtacgtacgatcaacgacttgcgcgaaggaatgatacttccgggcattgtaggcaacatcactaatttcggtgccttcgtcgatataggtatcaaggagaatggccttgtacacctctcccaactggccgaacgatatatttccgaccctacggaaatcgtatccattcaccagcaagttatggtcaagattataaatgtggataccgaccgcaaacgaatccaacttagcatgattggggtaccgcaagactgatcgcctctctcttttccccccaccaaacaatcagaatcgtcaatacaatcataagtactgtgcaaatgagcgagccttcaaacccgaaggctccgccattcagtacattgtcctcgggcagatgcaaagtcagcatagaagatatgaaattgttaccactcacttcgtagcccaacaccggtccctgaatccagttccaaaaaagatgaagggagatagggaaacaaagattctttgtatacaagtaagaagctcccagcagcatgccagcaagtagcagattgagcataggcaagaaatctatttccggattgaagatatgtaacaaggcaaacaatgctgatgatataaatagcgacaggaatttattcatacgtgtatgaagcagtcgtccgagaatatagccgcgcatcagaatctcttcaaacaacgccaccaacagaaaaaagacccacgaaccgagcaaattcaccgattcaaacttaaaaccggtcacttctatttctcccaaaagcagagacagtccgaagccaaccagataaaacagaacagctatcagcaatccgtaccacaatcctcgcgcatgtcctttgacagacaagcccaagtctgagaacggacgccgttcaaaacgaagcatgataacagcagaagtcaaagcggccaaaaacatacccgtctcttgcagaatataccccactattccggggtgacgggcctccactccaagaaccaatgaaaggaatccttgtatcaatgcactatacaacaacataaacacaaaaaacaccactataaacagcaaaatacacgcccatataggaagtcccttcagttcttttttatccacaatgttttctgcctccatttttacaatttgttaatccggctacaaaattagatataaaacataaaaaaacactatctcttacctatttttcctatatttgcctgaacaaatctgcaaaattatgaaaattaaactactattgattagtttcatattggctgccaatgcattaggagcagtcgcccaagtgagcaagacttattttgtaagtaaacccggaacgctgatttccatgatgacggaggatgaggccaacagtatcacccacctcactttgaccggtaaaataaatgccgaggacttcagacatctgcgtgatgaatttcccaacctgaaagtattggacatttcgaatgcagacatcaagatgtacaccgggaaagccggtacctatcccaacggaaaactttgcgtttatatgccgaacttcatccctacttacgctttctcgaacatcgtagacggagtgactaaaggtaaagccaccctggagaaaataattctctccgagaaaatcaagaacatcgaagacgccgccttcaaagggtgcgagaacctgaaaatctgccagatccggaaaaagacagctcctaacctgttgccggaggcattggcggacagcattaccgctattttcgttccgctgggcagcagcgatgaataccgttataagaataggtgggaaaagtttgctttcatagagggagaaccggtagaaaccactttgcaagtgggagcaatgggcaaactggaagaagaaatcctgaaatccggtctgcaacccagagacatcaacttcctcaccatagaaggcaaactggacaacgccgacttcaaacttatccgcgactatatgccgaaccttgtttcagtggatatttccagaacaaatgcaacagctatccctgactttactttctcacaaaaaaaatatttattgagaatgaagttacctcataatctcaaatcgatcggacagcgtgtattcagtaactgcggacgtctttgcggtacactcgaacttccggccagcgtgactgctatcgagttcggcgcatttatgggatgtgacaatctccgctatgtattggctacgggaaataagatcacaacattgggcgataacctgtttggagacggggtgccgagtaagttgatttataagaaataagtaaaggaataaccttgatatatagagtatagccctatatcagagtaagacaacggttataaactaagtccgagttaacacatttctacccctcgtatttaataaatcaatctttgttgtcgcataattctattcgtctgacaactgtcagacgaatagaattatgtatagcgaatgctaattcatagtagctccaaagttacttgaatgacaaattatccctaaaaaagagagcgtatcaaaaaccaatgtcttgatacgctctcttttttattatcagtaatgtccggagtcttacttatctccgtacatcttcgctctcaattctttaatgtggtctgacgtgatatattcgtcgtattccatcatcttgtcaatgataccgttcggcgtcagttcgatgatacggttggcaacggtctgaataaattcgtggtcatgagacgaaaacaggatgtttcctctatacgttttcaggttgttgttgaatgcctggatagattccaaatccaagtggttggtaggagtatccagaatgaggcagtttgcccccctgagctgcatacgggcaatcatacaacgcattttttcacctccggaaagtacgctcactttcttcagtacttcctcaccggagaacagcatacgcccgagaaaactcttcatatacacttcgtttccttcgccaaactggctcaaccagtccaccaagttcaggtccgtattgaagaagtcggtattgtccaaaggcaagtaagcggtggtgatagtcaccccccagttgaaggttcccgaatccggttttatatttccgttgatgatttcaaaaagtgcagtcatggcacgcgggttacgtgacaggaatacaattttgtctcccttttctacattgaagttgacatcgttgaaaagcactacgccttcttccgtcttcttgctcaatccggcaacttcgagaatctgattgcccggctcgcgttcgggagtgaagataatacccggatacttgcgtgaagaaggtttaatttcttctacattcagtttttccagcattttcttgcggctggtggtctgcttactcttcgctacgttggcactaaaacggcggataaattcttcgagctctttcttcttctcctcagccttcgccttctggttctgctgctgacggagggccaactggctggattcgtaccagaaactgtagttaccggcaaacatattgatctttccatagtcaatatcgactgtatgcgtacagacggagtcgaggaagtgacggtcatggctcacaacaagcaccgtatgttcgaagttggaaagatattcttccagccatgtcactgtctccatatccaaatcattggtaggttcgtcgagaaggaggttatcaggatttccgtacaatgcctgcgctagcatgacacgtactttctctttaccactcaattcgcccatcagtgtgtagtgcttatcttctttgattcccaaaccgctcaacaacatggctgcgtcactctcggcattccagccgtccagttcagcgaaccgttcttccagttcggacactttcagtccatcttcgtctgtaaagtcttctttagcatagagttcttcgcgctgtttcatgatatcccacaacacggtatgccccatcattacggtatccataacggtaaaagcatcccatttgaagtggtcttgactcaacacggagaggcgctcgcccggtcccagagcaatcgaaccggtagtcggatccaaatctccgtaaatcgtacggaggaatgtagattttcccgcaccgtttgcgccgataataccatagcagttaccactcgtaaatttcaggtttacgtcattaaacaacactcttttaccaaactgtaccgaaacgtttgaaactgtaatcatcttacctatttactatttaactatttacacttttcaatttgagtgtgcaaaggtagacatttaaaatgaataatgaactatcccgtatgtgccaatctgacataaaagtattacctttgcagagttttttggcaaaaacaccaacttggcaaagtttttgcatgtgattttgatattatgaataaaaaacagaaatagatatggaccctaaagaaaaaaaagtgaaggaagaagaactcaacgttgaggaaactctgaataacgcggaagaacaaccgcaggacgaacaagcggaaaatgccgtcccgatgactcacgaggaggaattggaaaaggaactggagacggctcaggagaccattgaggagcagaaggataaatatttgcgtctctccgccgagttcgacaattaccggaaacgcactatgaaggagaaagcggaactgatcctgaacggtggcgaaaagagccttagcagtattcttccggtggtggatgatttcgaacgtgccatcaaaacgatggaaacggctacggatgtccaagctgtgaaagaaggtgtcgaactgatttataataaattcatggctaccctggcacaaaacggtgtgaaggtgatcgaaacgaaagaccaaccgctgaatactgattaccacgaggctatcgccgtaattcccgcaccgtcagaagcacagaaaggtaaaattctggattgcgtacagacgggatatacattgaacgataaagtactccgtcacgccaaagtggtagttggagaataagaagaacttgaatcaataaaagcatggcagagaaaagagactattatgaagtactggaggtaacgaagacagccacagtagaagaaattaaaaaagcctaccgcaagaaagcgattcaatatcaccccgacaagaatccgggtgacaaggaggcagaagaaaagttcaaggaagcggccgaggcgtatgatgtattaagtaacccggataagcgctcgcgttacgaccaattcggccacgcaggagtgagcggtgcggcaggtaacggtggtccgttcggcggtttcggtggcgaaggtatgtctatggatgatattttctccatgttcggtgacatcttcggaggtcgcggaggaggattcggtggtttcagcggattcggcggcggcggaggttcgcagcagcgacggtatcgcggaagtgacctgcgcgtgaaggtgaaactgacgttgaaagaaatctctaccggagtggagaaaaagttcaagctcaagaaatatgtgccgtgtgaccagtgccacggtagtggtgccgaaggggacggcggttcggaaacgtgtccaacttgtaaaggtagtggtacggtgatccgtaaccagcagactattttagggacgatgcaaacgcgtgccacctgctctacttgtaacggtgagggtaaaatcatcaagaacaagtgtaagaagtgtagtggcgatggaatcgtttacggtgaggaagtagtgacagtgcagatacctgccggagtggcagaaggcatgcaactttctatgagtggcaaaggaaatgccggcaagcataacggcgtgccgggagatttactgattctcgtagaagaagaaccgcatccagacttgattcgtgacgagaatgatctgatttataacttgttgttgagttttcccactgccgctttgggcggggctgtggagatcccgaccatcgacggaaaggtgaaggtaaagattgactcaggtactcaaccgggaaaggtacttcgtctacgcggtaaaggattgccgaacgtgaatggatacggaacaggggatttgctcgtgaatgtcagtatctatgtgccggaagctctcaacaaggaggaaaagagtgcgcttgaaaaaatggaagattcggataatttcaagccgagtacgtcagtgaaggaaaagatcttcaagaagttcaaaagtttcttcgattaagacttacataaaaatttcttcctattaataattaaacgctccatgaatgcctggtgacacatggagcgtttgttatttaaaacccactcaataccccggattctgtactagctttgtattcatcacccgtattttctcgggaatagggaatacggtagtataaccggtttcctcgtttggtaattgaggacggctgttgtatgcacgagtaaacattccgaagcggataaggtcctgacgcctccaaccctcccaagccaattcaagctggcgttcggaaagtatattctccaaagtagcgggacggcgagcggcctttacccggctccggacttgatttagctcgacgtctccgttttcaccgttgcgtactttagcttcgctcttcatcagtaaagcgtccgcgtagcggaacaggacaatgtcattctccattaattttccgtcttttgtggcggtggggtctacttcatactttttcatacgggcacctgccgtttgctcatacggggtgtcggtgatatccaatgctacttcccaagggaaatataccaagacagtaccgtcgtccagcttgataatgtctcctttcaagtcatacatttctcctgcaaaataacagatgtcgaagcgaggatcttgggcagctgtcccataaccgaaagtttcgagtgcttcaatcgttgcactgggaccattctcaccgcttagcccgtaagctttggcatggttgtaatgacgggaacgaaaaaggtattgcatctgattggtatacaatgttttattcatcgggatcgtgaatatattctctacggacggttcattgaagatagagaagttagtctcgtattccggttccagtttataattcataactttcagttggtcgcagtagtatatgaccgtctcccaggcattgagttcattaccgtctaccatgaacttgatattttttccgtcgggacgttcgttgtccgtccagtcgttatcggtataaacttcggcattcagtgccagttttgccaacaagaaagtaaccaccggacgagtgatacgcccataataaggcccggactgattgctgtgtacctccgaaagtaatggagccacttcctgtaattccttgaatataaattcgaatactgtcttccgctcgctttgaacgacgtctttcatcgcaggagaagaagactgcaccaaaggcacacggccaaacaaatccagcagataatagtagtacatcgcacgcatagcacgcacttccgctcgataagccgggagttccgcatcagaatgggtttctgcgaatttgtcgattcgttcgagcgacttattactaagcattacgactttataaagatactcccatgtagcttgaatggcatcattctcaataccccaatcatggagaaataatccctgccaaaagccaccgtcgtaccagtcgccaccgcgcgtagggataatagcttcatcagtagtgaaagtattgaggtcatagacacctctgcccgttccctgcaatccctggctatcgctgtaaccgcccacataagtatagagcgaagcaacagcattgagatagacttccgaaatggaattatacacatcatcttcgggcaacttatctttcggattttcttccagaaatttatcgcaggaaaacaagaacgtacacgtagcaagcaccaaactaatctttttcaaatattctttcatcttctcatcctccgttaaaagttaatactcaatcccaatgtatagatacgtgccaacgggtagttacgtttatcatccacccccaaagtagagtttaccgtagaactgttaatcatcggtgatagccctgaatagccggaaatcgtcgccaggttgttgaccgtgaaggcaagacgcaaagaacggacgtacttcttgagtttctgcaccttctcgattggtacattccaaccaaacgtcacgtagtcaaagtttacgtaattgcctttttccagccaatagtcagtggcagtctggtccttaatgttctgcttcggcgcggatttcatcacattgtagtcagggaagatattcatgttcatatacgtcagtgatgttccgttatagattttatggccgaaagctccgttgatctgcaccgaaagatcgaagtgtttgtaacggaagctgatgttcgaacccagaattgttttgggcacggcttgccctgccacatagcggtcttcgccgtcttcaagattgacaccaccaccgttcaagtccgcaataccataggtgtatccaccgttcccgtcggacaccagtccggtgctatgaggcaaataaaaaacacctaacggttgaccgaccatttgatagacgatgtggttgtagccaccgtggaagccggctccgtcgagactggcaaggctcttgtattcaggcgcggaaatcatttcgccgttgtacattccgcttaatgagagaagtttgttacgttggaaggtgacattggcattaatgttcaattccatatcttttgttttcagaggagtgataccaatagctatttccgtaccccagttacgcatggagccgatattagccagtaaagtgttgtaagtgaaaggcggtacactcacattatacagataaagcatatccgttgttcgggaattgtagtagttagcggaaagtaacagacggttaccaaacaaagttacgtcaaaacctgtattgaaagtgtgtttcacttcccacttcaagtcggggttcgtattcctcaaatcacccaatgagacaacggcagagttgcctaccggaacaactccgttcggctttaccagattcagtgtagtatacgagtcaattccactctggttacccgccagaccgtaaccgatacgaaatttcaaattatcaaccactggcaaacgtttcataaacttttcctcactgactacccatgcggcagatatggagggaaagaagccccacttatgatttgctccaaacttggaggaagcgtccgtacgggcattcagcgtcaggacataacgatcggcatacgtatagttgaaacgtcccataaaagatgcgagacggggttgttcgtagtacgaatttgtcccctcccacagacggactgcaccggcttgcaaattgttgtagccgaacttatccgtgctgaaattgctgactgtggtataatatcccatgtacgtctctttctggagttcggctaatgccaggacgtcgaagaagtgctttttccagccttttttataagtcagcatcatatttccgaggagggactccattttctttgttcctttataagcctgcccgttcgcccaaacagaggtggggagatattgcgaattttcaactatattataggtataggcaccgaacagtaccaatttcaattctttcatcaaattgaaggtgaaacgggcgtgtgtactgatatgcgaagtagcgtcgtcatcgtccacctgcatccatgccaacgggtttgttatctgactggcggtagtgatgccgtcccacgagttagtaacgggatctttatggttaggatacgtcgggttaaaggttgccgccgaatagaaggttttctgatagtcaaccagattatgatttttcaggatagaaccgaacatccccagttcgcagtcgaagaagccatcgaacatcttttggttcatgttcatattggaagtgaaattcttcatatcttcattcaaaatcaccccctgacgatccataaaaccaagtgatacacggtagctcgacgtgctggagcctccatagaaagcgacgtgatgattctgttgcagacctgtctgttgtatttctttctggaagttagtattattacctttatctaaaatagagataccgcgttcggaagctacgctacggaactcgtctcccgacaacattttaagattcttgtagacagtagaaatgccgaaactaccgttgtaggctacctgcgtcctaccctgcattccttttttagtggtgacttcaatcacaccggaagcaccacgtgaaccgtattgtgccgtttcggaagcatctttcagaatcgtgaaactttcgatatctgtgggataaatggaggtcagcatactaaggtcgccaaacactccatcgacaataatcagaggatcgttaccactagtcagtgaagtggttccacgcaggcgcactgcatccagagctgcgaggccattcgtaccccgttgaatagtcaaacccggtaccctaccccgaatcgcttccaaaggattggttacctggtctttgttcatttgtttctccgtaattttctccacagaaccggagagggttttcagacttccggtagcatagcctaccgttatcaaggaatccaagtccagaggaatgacaggaatcttctgtgcaaatgtatttccgcacaaaactaccagaagaaagctaagaaaagttagtttaccgtgttgtcgtatcataactatcagtttttaaggtaataatacaaatataacaataaaagaaggaatctggttgagtagattccttcttttattgatattaatagccgcaatatgactcttttttcgagttttaccgagggatttgcttacttcactatgatttcatcagtaaatatccagccacccagttctttgccggcacgcgcctgataacgtacatagcgtcccttgacggttccttcccacgaaacatcggaaaacttgattgcttcttccttgttaacaacaaagtcctgatgcttcagttccgtaaaattgactccgtcatcggaaactgaaataaccacagacgcaggcaagaatacttcagctcccactacctgcatgaaagctgctgtgactgaatgaatagtggtctcgttttccatatcaacggttacatcgaggcggttcttcgagataaatccctgccatgcaccgtcaccgtaagtccagtcgccacggataccgtcggtcaaagtcacatcaccttgtgctgcataagaggagttgtaaggagcgttataaatcactttctttcccaatgccagatgcgtaaggggttgtaaagattccggccgacttccgatctcactcttcaaatcgaaagtgtgatagcctttcgcctgcaaatccgttaccgctttcagggcacgtgcatggaagtccggccatgacttacgttccggagccgaccaggcaacttccgccaatgccagcgtacgtggatatagcatatattccacgtgttcgggagtcgggacatattcagtaaagagattaacttgcgcaccatacacaagtttcgcttgttccgccgacaatgaagtagaaaccggattgtaagaatagacttttttcaatggcaagtatccaccaatcgcttccggctgagagtacggagcgtcctgataactatccagataacagtagccacccggcgtcatgatagcccggtgtccggaagttacagctgtaataccgccttcttctccccgccatgacattacagtcgcgttaggagccagtcctcctttcaatatctcgtcccagccgagcagacgtcgaccatgattgttcaggaacttctcaatacgatgaatcagataactttgcagttcgtccacgtgagagagatgttcgtctttcattctcttttggcatttcgggcaagttttccacgctgccataccggcttcgtcacctcctatgtgaatgtattcggaagggaaaagcgccatgacctcggtcagcacattttccaaaaaggtgaacgtttcttcgtttccgatacagaagtccgcgttcttgtaaggctcacccgcgcaagagagttgcggataagctgccagcacttcttccgagtgggcaggcatttcaatctccggaataatcgtgatgaaatgctgacgagcatattctacgatttcgcgaatatcatcctgtgtatagtaacctccggaagctccaggctcgtcgaaacggaggtacttacgtccgccgttccaccacgtcttccaattggcgtcagtacgccaggctgcaaattctgtaagcaaaggatatttcttgatttcaattcgccagcctgccgcatctgtaaggtgcagatgcaggcggttgatcttatagaatgccaatgcgtctatctgtttcttcacaaattctttagaaaagaaatgacgggatacatccagcattaagccgcgataagcgaaacgaggactatcctgcacttcaacagaagcaatggaatagcctgttcccgaaggctgagataattgcaacagtgtctggattccgtagaacaatcccgctcccgatgttgcacggataaggattcgttccggagtgacggacagggtataactttcgggagaaggcaactgttcgctcttttcggttatcaacagagaaagtacgttctgcgtatcttttttctttcctttctttagatgaaccggtaatgcttgcagatagctttccagaagtcgagcttctccaccttgaatgtttgtataaaattttgttttctctgagagtaaaaaagagcccgtaccctgctctattttcagagggacagggattacggactgtgcatgaagaggatgtgccgcaaagcacatccccaatacccataagaaaagacaaactttagtgcatctatttcttatattcattaatctactgtgatttcatctacaaacaagaaagcaggatttcctttgcctccatgccattccggtattttactttcagacaaggcaaccacctttacatactgagttttcaccggagtgaatgacaatttatgttcgtagataccattcttatcactttgttccatagcagggtattcttcggaagctactttggtaaagttcttaccgtcgtctgatacttctacggaaaatcctcttgcatcaaacacccagtctcccttctctacgcaagtagaaatagcaacgctcgaaatctcggtaggttgctgaaggtcgatagtcatatccatatcgtttttatagaatgcaatccaacgaccggtcttatagttgccatttcctttcagtccgtctactagtgtagattcacctttaaacatatattgtttgttgaccggttgattagctacaatcggcttcatgctggacttactgaaattgatcttctctgaaatcacacgactgtttccggtaggacgaacagcgatagcggagaagtctgcattttccttgattttcaggacaccttcataaagcggagaagcggcagtaggttccgtaccgtccaatgtatagtgaataggggcattgtcaatggtagacaacgtgatgtccagtgtaccgtctgccgggttcggcgtatattcggctgttacgttaaacacatgttttgcataattgtatccttctgcatcataccacttaatcagttgcggcaaacgagacaggaagtcttcatagttcttcttgtcgggagtagaccactggatttcacacaatgcagcccaacgaggcaataccatatattgcgcatgagagaaagtaggaatatattcagtccagagattagcttgcacacccttaatatatttttgttcttccggagtaagggaagtcggcataggttcgtagctatatactctttcaagcggcagataaccaccaattccgagaggttcgttttccgtatctttcgtctgataatagtcgaaatacaaataggtattcggtgtcataatcacatcgtgtttctgtttggcagcttcgataccacctctttctccacgccatgacattacagtcgcgttaggagccagtccgccttcgagaatttcatcccaaccaataatctgacgtccgtggtcgttcaggaatttctcaatgtgattgattacgaaactctgcaaacgttcttccttactatgtttatcatccgattttaaccccaatgccttgatacgtgcctgacatttcgggcatttctcccagcgtactttcgggcattcgtcaccacccacatggatatattctgacgggaagatctcaatcaattcagcatatacgtcttcgaggaatttcaatacctgatcgtttccggcacaaagcacatcttcagatacaccccattgtctccaaacttcatacggaccgccagtacaacctaattcgggataagcggcaagagcagcctgcatatgtcccggaaggtcaatctcggggataaccgtgatataacgttcggcagcatacgctactatttccttagcctcttcctgcgtatagaaaccaccataaggtttgccgtcatattcaccggagttacgtccgataactgtttccgttctcttagaacctatttccgtcagtttcgggtatttcttgatttccagacgccaaccttggtcttcagtaatatgccaatggaaacgattcatattatgcaaagccatcatatcaatataagtcttcacttcatctacagtaaagaaatgacgactcgtatcaaaatgtgcgccacgataagcgaaacggggagcatcctttatctctactgcaggcaaagcaatctccgcacctattgcgacaggcaatgacttacgcaatgattgaattccgtaaaatactccggcctctgtaggagcagtgattgtaattccgtcaccggtaactttcaattggtaagattccggattttcggattctgtcccaagtgccaatacaattgcattctctccttctgttccggcttcgataacaaaatcttttccggtagctgttttcaagtagtctgccagaaatttcgcgttacgttgcatattctcattaccttccggatagagaatcttcacactactcttcagaatgaaggggtttcccgaggctgttacaatttcctgaggcatgggaataatctggtaatcagcttcttgctgagccgattgacaagaggcaaaaagccctgctaccgccagacatcccgttaattttaagagttgtttcataaactaaaaaattaggtgttaagttattaatagaattatttaattataggtctcacgaatatgcttcacagtcagaggcagttcctcccctttctttatttgaggagaagtaatgagaatcgttttacgttctccgggcagaagatcgaaaaagttgtcactaaaacgggcaccctgtaatggtacttcgataaagacgtcttttgccaaaacaggagaaagaagtgtcagttcgcattcgccatctgtctgcttcattttataggaaatagtcgtttcgggcaaaagtaggtctttggtctttgcaaagaaataaaccgtttcatctaccacatgtccggatttgtctttcaaggtaagcagcatgaagcagtggaggagttcttccgaaagcgggcgttttgtcgaagacagtaaggcgtcaagttttgtccgatatacacattgagaggtatttgcaggaaccgacaaagatttcaagagcatcggtttactgatcttttttccctcaaagtctatgactttcatttctaatgtcattttctccaacgtatcaaggcgatcggaaagaaggtagacacataagctgtcattccgctgaatagggttgatatgaataggagcaaaagcacgtttcgcctgataatgcaaagctttccagttaccataatagtcgatactcgaccatgaaacgacgggccagctatcgttcaactgccagtatagagtacccatgcaataaggacggttacgacggtgagcttccaagccatgacgcattccctggccttgcaaaaccagtccgacgtatacaaagtcctcaaatttctcaggtacgatatagtcacgttccatgtaagtacggatcaaagcattgccaatactactcttttggtgggcattcatcacttccgattcgatttgataatctccaggagctgcgaatgtagcaatagttttcatctcagggaaggattggaaaccaaattcgctcatgaaacgtggcaagtcggtatccaatgattcaaaaggtttctgtccgtaccaaacaccccaattatggctatcgcctattccccatgattcgggacgtccccagttggctagataaggggagctatggatataaaagcggtcagcatcgagttctttcaccttggcgggaagtagttcacggaagagtttgtcgtaaccggacatcatttcctgatagatttccggagtgtattttttctgatacccccaatatttcaaggcttccaatatctcattgttgccacaccacatagccagcgaagggtggttgcgaagacggcggatgttgtagcaagcttcctcctctacccgcttcaagaatgtagggtcagacggataaggggtacaagcgaacataaagtcctgccaaaccaagatgccgttttcatccgccaaatcatagaaacgatcgtcttcatacgttcctccaccccatatacggactacattcatgttggcctctttgatatcacggaacaatgtctgatagcgttcggtagtcacagagggcaatagagcgtcctgtggtatatagttggcacctttggcgaacatcggaatgccattcacttcaaaatagaaagattctccgtccgcatctttctcgttcaccaaccggacggtacgtaaaccgatacggtgggattgctcggctaccactttaccgtcaaagacaacttgagcagagaaatcatacaaagccggtttgccccaaccattcggcatccagcgtaccggagacaggacttcggaagggatatggatagagttgagtccgggttgcaaagtgacagaacggctaattacagtttcttctcctttttcaaatgaataattaatccgtatttctgcttgaatcgattgaggaagtatattgtttatttccagttcattagatagttcggcagagtgttctgtcagcgacagttgcttgatatgataatcattaatggaagcggcgtcataaaaacgaatttttaccggacgccaaataccactagttaccatacggattccccaatcccaaccgtaactgtaaggagctttacgggagaacacactcagatgtttctcatggtggtcattatccgccggatagttgaatccgttggaggcatattgaggaagagtttgccggataggtgaatggaaatatatatggagtaagttttcccctagacgaatttgtggctttacaggtaacgaataaccgacaaacatattatcggactttaacagtaaggaaccgttgagataaacatctgcataggtatcaagaccttcaaagatgagctgagcatcatcccgctccaattgttccattgtaacggtaaaagaagtgcggtattcccaatcttcgttttccacccattgaatcttctgttcattcattccataaaaaggagaaggaagtaatttgtggtgaataaggtcctgatgtactgtaccgggcacttctgccgttcgccatagttctgttcctgcttgagaaaattcccagcctgtgtgtagaagtacaacttctgaattgtcattactctgtgcatacgccatgctgcaacaacatagtagtccgcatgctatctgagccttttttcctgtcaaattcaatatcatagtgggggtattagatattaacggagtcaaagatattacttttttgtcaattttcccccattattcgaccgttatttttataatttccggagtacggacaccgggcttcaattctccattaatattataatatgttttatcccaccccactaacgcagctccggcacgcgctaccagcgatgtacgggcaacttcctgccagatgtccagattgatattatagaccaatatacggtcattaaacttataccattctaccggatgaaggaggtaatctttttcaggacaccgtagagccgctagaaatatgtctttgtttactccacctgtacataataccaagctatcatttaatgcaacggcagctcccccccctaaagatacaacctctccgtcacttcctttcggagtagctacaggcatccattgccgagatacggaagaataacagtaaccacttgtggaaagtgttgccggttttccttccgtagaaggagcaaatcctccccataaatagaaacggtagtcgtctcccctacgctggccggcacaaacggcttgtgtacgtgcatctccgggatattccggtaactcatgccagcctacagaaagattagttaaatcgagtcggaggaaggaattggatggctttccgtttctatttcctccggctatgaatagttgttccccaattagcgtcccacacatattatccagagcataaggtaaagccggtaatgtttcgatgacgactttccctttcttcttatttttcccattcttttcgcttttctcatcccagcggattttataaacagaagttagtgcatcctgaccgtcagttcctcctatacagatgattccatccgaacaggatacagaaacgccataagcggcagaaacgggaagttctccaactttattccagacaaacactgtatctggattcatctctgctacataaatcccctgatagtatttcttttttcctccttcatcggcggggattccgggaaaattacaacctcctgccaacagcagtttcccattcagcattcctgcataacaggcagagactcctgatttaagtcctttctccgacttaggaaatccctccattctttgtaaatggagatcggcaacaaaagattcgggcgcttccgcacgaaaagttgacgcgggcaaacctgcctcattcaccaaatttgcacgtgtgaaaggttgccagccataacggatatatcgcggacgtttcacttgttcgctatatacttttatctgaccgtttattatttcggcaactgcgggataataaacgccgtctgtctcggcaacttcaaacgtacgcaaaggaccaccgtccgaactcttcaaccccttgccgtaatcaaaagtaacatatacgacatcttcacaaaaatcggcccgacaaaataagggtccggaaggcaacacatcatgcattccataagttttattcaatgcccagcgagccaagcgttctccaaccggttttttatttctaggatgtacatccaacgaatcaccataatcacttgatactgccataccggtattcggaatttcagccatcattctacgctggctgtcacggaaccacggccacgaaggacgagctatactggaaagctgtacataatagaatggcaaatcctcattcttccagttcttacgccaactaccgactaagagtttaaagagcttctcatgagcttcgcaattatgagcgtttgattccccctgataccagatcacacctctgacgggatattgctccaacggccgaataccggactcgtataaataacaaggttcataagggtggcgctgaaacttctccttcgagagtttaacattcaatgcagctcttccacgtacccagtcctgtataaagtcattacgcgtccaatcttttaatatagccgggaattgatattccaacgtattccggtcaatccatgattcggtgggtgaaccgccgatagcattacagatcaaccccaccggaaccttcaagctatcccgcaacatctgaccgaaataataagcgattgcagagaaatgggcagcattggcaggagtacaaatttcccattcggtctccttataatattgaagatgattcaaggaatcgagaacggaagcgtcccattgcactgcgtccgtgcgccagcgcgctttcatgtcatacaaacgtaactgttcgtcggcagcttgaggaatgtcttttttgccggtaatagtctgccgtaacataaattccatattcgactgaccggagcataaccaaacctctcctatcaagacatttgtatatttcaagattctatgaggggtagaaattgttagcgtataaggtcctcccgctttcaacggtgataatttcacggaccatttaccgtccggtgcagcctttgtaatccactgctggcggtctatgcaaactgttacttgctctcctgcattggctatcccatgaaccttcaaaggagtatcgcgctgaagaatcatattatccgtataaagcggagataatttcaagcctccataatctccggtgatagccgagtaaactgttctcgccattatcgcagccccttcagcagcaggatgaacagcgtccggcaaaagataaggatatggataaagcggttcgtggaaatcgattaactgtaccccggcatagcgtgccaccgtttcaatagccgtttgtatctctccatgccaatcacgggttcccgacaaaaaacgggtatggcggtcggcaatcggagtcattcgtgcaatgataatccgtacagcgggattggcctcacggaatgtatcaatcagcttcaaataatctttcacaaaaaaatcacggtagttaggccaattgcgagggtcggtatcattgatacccaaatgaatgacaacaatatctcctgcaaaatccaatgctttccgatattcttcctgtcgggtataagggcgatgtccctgattaagcagggtagcgccaggtttcccgaagttctcgacttcataacgttctcccagcagcttttgcaacttcacaggataagattgtgttgcacggtcagataatcctgtaccataggtaatactgtttcctacacatgcaacctttatccgttgctgggcagacaacacccaacaaacgaacagacagacgaataatagtaaaatctttttcatttatttcttcccaatgtaaggtttcacaatctctacccatttcaagtaacctttccccagaagatgcaaaccatcatttgtataggtagtgttcatctttccggtttgtttgtctataaaatgggagtacaaatctatataggtcgctccttctttttctgccaagccgactaaccctttattgatttcagggataacctgccaacgggaagtatgtcccttgaacatattgtaatggtcggtgaccggaagaacactttgcagatatagctttgttttaggcgaatctgcctttatcttcctgacaatcatctcaatacgggatacaatagtatcggcgggagttcccctactcacatcattaataccaatcaaaagaaatattttagcgggctttcccttcagaatagcatcaagacggtcatatactcccatacaaatgtcgccgctgattccacggtttttgacatgtttgttcttgaacagttccgcccattcggcaccgtttgtgatactgtttcccagaaaaataatgtcactggaagtaacaggcagttcttcaaacaatgtagcacgctggtagtaaaacgtagaatatttgcgttcttgtgcgcggcataacaaagacagggtcaatatgaccactaaaaaaaagatctttttcatgactattctttttatttactcattagcatatccgtttttcattatagcatatctgagtttcattataacatattcaaatctgctcatagcatatttataaatagttctctctctataatcgatatgtcactctagtgttttatttggtgagtaaatgagtccttctaccgctttctgtccgtcaagagtaacaaagacagtagtaaacatccattttactagccggacttccgggctaacaaacttccctaccggtaatttcaaaagtactttattccagcctttttgcagatgaacttccaaaggcgggcgtgccacacaattttcgttgcccaaagctatttcattgcttttggtgcggtgagtagctgtccagacaggcggtaatatttcctgttcatttatccagatacggctttccttataatcccattttcccggcagaggaggaagatcggcttcggagcgtccgtaattctgaaattcagcccacaaaccaacgttttgttctttcggcgaatagacataggtgtaggcgtaggccgtatggttttctttcggttctttataaaatccgggaataagtgtcccccacacgtggcgtaaatagattccggcaccaatagcaggacgcacattgtatgtttttcctccatagctgtaactatcctgcaaagtttcttccggaggaaaagcctttgccagatttccttcgttcgggaaagcatctgtaatattccatttcacatttgtctggcggacatacgcaaacggataaccgtcaaaagtatgttctttatgccacaacaaacgacgttcaaaatcggcaaaacttctgaatagttccgaatgctcgtcggttggaagtattgttccgttcttatcgaaatattccgtcccaccacctttccaggcacgttccgccatagccagcatattaggatagaaattattttcgataatcatcccccactcggtactgactaacctgtcattccagatagccaggattgtccctgccaaatcttcgcttccttgttccttattataaatacgactgttgtacaatgctatgatatcaccaaaggtgtcaaaatgattcagataatgaaaacgtgagtcaatggcgggaatccctttctgcgcctttccacgataactccaaagttgagtcatgtcaatctctccgggtttgtagtgccaacccggattccatgaaattactttcttacctttggaacgtacataggacaccatttccggcacaaaacggggattggtaaactgcacttcatccgtaccgatatgcaaataaggcacatcaaacgtttcacagacttcatccatcaacaatttcaaaattttcatcccttcaggactttgcatatcatggcggaaagtacgtataaatgcagcgctatgtccgggcatatctatttcgggaatcagcgtcatgtgatgtgctttacagaatgcaaccaactccttggcttcttccaacgtataatatttgccgggcatgcgggtggtattcgcactatcgttcagcatcggaaaaatcttactttccagacgccaggattgattctcggtcaaatgccagtgaaaaacattgattttgaatttggcaagcgcggcgatttcacgcttaagttcatccagtgaaatgtagcttcttccaacatcctgcataaatccgcgaacccggaaagcaggccagtcgatgatctcagctccttgaatatgcgtttttgaattccttttttctgccagctgccttaaagtttgcatagcccaataaacaccgcgttcggttacagcctcaacaattatccgcttctttgtgatgctcagtcggtaggcttcatcctggttcatcggtatttcggggagggtcggcagtaatttaacttcaatagtaccggttgccttgggggagacggttcctcccatttcggagataagagtttcccactcctgttgaagcacaggagtggaaagctgtaccttattcacctgaaagtttaaatgagagggggtaaacttttgcggctgggggagcaggtgataatcacctgcttttaccactgaaattgtgcataagttaattataatatatataaataatatgagtctgtttttcatgattacaggtcgtatgataattcctattgtattatatctctcagccggattgcctgaaaagtcatatgagcgacactgctttcatataatatgccgactgtctctttatcaatcattgtcaaacaagaatatccccaaccgtcaccttcatccagcatcacttgatgttcgggtagccaggtgatacctccatccagactggccttgatcgtgatatgatgacgaccttttaccgtattcggattggagaataaaagaatatccttatttaatgtgttgtctgccgctttcacgctgattaaacttgccatacacaccggttcctgtaaagctttacgggaagaaggatgttctgtccaagtcttaccgagatccttggtagtagcgacagcacgactgcctccacggttatctctcatatttaacatcagtacgccaggctccacttccgctacctgagcttctgttgtattggtgcgcgcatagttatggattttccatgtttcgccacggtctttgctatacataattcccgcattcggaacacgggtagaatcgataaactgaatcgggaataccaatgtgccgtcttgcatggtgatacctcgtcccggtccttgcaaaaggaaataccaggatggatctttcacctgatctgttatattaataggctccgaccacgttttaccatcgtccgtactctttgacaataccaactgggccgtatgattcatatccattcccggataagaactccaccaagcacgctgattacccattccatgtgtccaagccgccaccacccatgttgtgttggtcttggtatccactaagatcgaagggtcgccaacaccgttctgcgcagcaggcaaaccgccagtttcaccaaaagctaaaggtaaacgcatcttctcccatgttttaccaccgtctacactacggctcaaaccgacgtccacatgttcctgcaaatcaatactgctattataacgtacatcataaactcccagcaatgttcctttattagtagttgccaatcccggaatacggaaggcagccgaaccatcgtcaccggcatggcgtacccctactcctaccctatgagctatattctccggcgaaaccgtatgcataagtgcttctttattatcaaccttaacagtaacaatcttagctgacactttatccagcaaagaggcgcccggtttcatttgcagactgatccagaaataattgattccgggaaaaagtttctgattagcattcagtatcactttccgcccgggattatttacctgtgatttattaatcgaataagaaggattcgcagccaatgtcttccccggcgtatggctggaaatataagatacgggagtaaagaatttcttaccatagttttgtctggcctccgtaccactataatataacttaacggactgtatatccgccatattcacatctttgccaaaattcaaaactacttcatccaaactacgactctcttttgcattcaaacgcaacataaacaacacgttatcctgtcgttcaatcaaaattggaatctgagtttcacgcacaaatacagtatccgatgcaacagcctgcaaagtcccacagacagataaaaaaaggatagataataataaaagtaggtttcttttcatggtattattaattgtttgagcacaaagatataaatttatcatattaccagcaaataattaaatattttattatatacaagaatattaataaactagcattagtgtgccatttctttctttaaaaggaagaaaaagataaaaagcgagatagacaaattagtccctatcccgctttttatcacaatgtactaacttttattccggctgctttttataagtgtcatatcccggagtttgttccagtaatggattgatattcatcgtgctaatatccaatggccataaaagtttatgcttttcactcgtactaatcaaaggagaagtagacggataattggctgctgccgaaaacgccaacgaattatgagaagcatcctgcatacgtacaacatcaaaccaacgtttaccttcccagacaaattccttatcgcgttcgtgcaatatagccaattcgtttgcttcaaaactaccgtcagcgtattcgtgcccggcatagtcgtcgccataagcacgcttacgtacatcattaacataagtactgcatgattcacctaatccgtttgccacttcggccatcataagcaaagcgtccgcatagcgatagataataatatccgtatcataaatacgattgttattagagttaattgaacctatgccttttttcataacgcagccaaaacttgcaggatctttatcttcttgagtataatattccaaaaaggttacatcacgacgagtatctttttcatcataggcagaccagaaatcataggtatattcatgcctgaatacaccgccagtccctttcagattcaaagtgtcggtttctatccgcttgctgtcacgtccatacacctgtccgataaatactgcatcctgatataaaaattgcccagcccagttggttgcttcgccgtcggcaaagtgtaatgtgaaaataatctctttattattacgattggaagtactgaaaacattttcaaaatcggacagtaattcaaacttacctataatctgattcaaagctgcttgagcaaccttcaaatcagttgttccggtagcagtatgtccggtaatggtcactttagcagcccacatatatatttccgctttcaacatcagggtagcagctttggaccatattgttttatcgtaactatttgtcactgtaatatctgcataattattctctgatttttgaatatcaccttttataaattcaagcgttgcttccgctgtcgcacgttccacataaaatttgtccgcagtcaccttgccattcaagagttcaacttcagtgacaataggcactcccccatacgtcttataaagcatgaaataatataatgccctcaatccatacgcttgagccaaatagtgttttctgtttgtatcatccaggaaactgcattcattctctacttgctgaataaaatgattgacttgcatgattggagaataaagaccgtaccaattactaatacccggcctgtcttgatcgattacattggaacggagattagcatagttcaaactagtattttcagatgaagttcctacacgttgtgttccaccacgaacttctcctagaacatagaacatatcataataacttctcagttgagaatgcatacctgtcatatatccatcaacttgagcttcattattccaatagtttccacttccgaaataatcctcgggagccaaatccaaagcatcgcatgatgtatagaggacagaggatacaaataaagaaatgatgtatattatttttttcataatctgtcttttttatatgttagaaagaaacgttgataccaaaaattacagtgcgaggcaatggatatccaccgttgttatccgccttttcaggtgagaacaagtgcttcgcttctgtcagataacctaagttttgtcctgtcacagacaattccacgttactcaatttagctttttgcacccatatcgacggtaaccgataagttagcgacagttcacgaagtgccagataattaccattatacacaaacatggaagaactacggcaatagtttctctttcccaactgatccgcccaaacatatgtaggatatttagcgttcggattgtccggtgtccaagtatccttagtttcctggatagtattatatgtaccttgcgcgcaagccataatccacattgatttccagtctaccgctttgaaccctaaagcatagtcgaaacgcgccgataacgtcaagtctttccagctcaccgtagtattgaaaccgcctgtccacttcggtaccgtatttcctacctttaccatatcataattatcaatcacgccgtccccattgacatctttccattttacgtcacctggctgaataggtagtgcgttttctttttggctgtcggacaatttattataaccttctgcccctccatataaaggtctgccggtcgatccattattaccggacgtaatatcaatcaaaccagccggtatctcatcctgtgatttatagataccgtcagcgataaacatatacaagtcacccggacgttgtccttcctgatagcctcctacccacattttagcgtcaccatagccggtatatacctgatatgcatcttgtcgattacgctccagcccgttatccggcaacgctacgaccttatttttgttcagtgctccattccagttcagattccatttccagtctttccggtcaataatacggaaagccagttcaaactcaaatccttgattctggaacttaccgttattggaaaccacagaacctactccagacgtggaaggtacggtgatattagcatatttatcactagtcagacgattataataggtcaaattagcattaatacgattttcgagaaagcctaagtcaagaccgatttcaaaagttctggatttctcccacatcagataaggattaggaatacttcccaaaagaaatcccgtagcgccattgtaagtattactaccgtatgacccctgtacggtataattgcctacaaagttcttgttaacattaccgttcagaccgaaacttgcacgtaatttaccaaatgaaagtatatcgcttgtgtttgccataaatttctctttgctgaaaacccacccggtcgaaacacccggaaatactccccaacggttttcttttgccagtttagaataaccgtcttttctaagtaccagtgacaagagatattttgattgataatcataatttacacgtccgaagaaagacatgatacgctgacgtgaatgccaagagtcaatagagcgttttccctcttcttttgacgtatactgtaaatccataaagtcgtcggtcggggctcccgaaccggatgcattgaaacctttattataagaatcataatattcgaaaccagccatcgcatccagataatgatctttgtttatctgataattataatttaatacagcattataggtctgatccagtgtgcggtcataataagcagaggtgctgcgtgaagtaaccttatttcccggagaacttaaataatccttattaaagctttcgtccttttcttcctgataataccagattgcaccaagctttaacgaaagtcctttcatgaagtttacagtgaaagattgattcattgtaaacttatcagtgttctggtcccggacaaacttatcaaaattatactgctgattaccgtccccggagttagggcctagcagcatctctccatctgcattgtaaccgcggaaagtaggaggcaatgacaaacaacgagaaaaataattagcctctgctgtctgagtagcaggcaacccgttccaagtagcgtccgcaaaattaaaactggaactggaagttaaccattctttcagcttataatcagcattgaaggtaaaggttatacgcttataccagttgccgtatgccgtaccgtcactcttattataacctaacccggcatagtagttccctttttcatttccgccacttacacttaaattataatcctgtgaaaatgctggagtttggacgttgaaatctgcgatgtctgtgtttttataaataagtttatccccatagatagggtcgatcattgtttgccaaccctgatccaacaaaaaagccagattatcagtatatttcattgtactccaaatagcagaactcgttttgtttccatccagaggggtcaccccgtcactcgcaaaataagcattacctgtaccgtaaggagtagcactagtcaatgaactaagtgaagaccatgccttcacagcgcttccgtccggatgtttcatatctcccatataagcattcttatatcccatacgcatccaataaatataatctccggcatcaagaaactcataggaatttttgaaatagtttaacccgaactttgctttcaggttcacttctgctcttccgctttttccgcgcttggttgtaacaaggattacaccatcattggcacgtgcaccatagattgcagtagcaccggcatctttcaatacttccattgattcaatatcatccggattgatatcactcaaagaagaacgtacctgtccatcaatcagaatcagaggagagccagaaccatcaaagttagtacctccacgaaggactagcgtcggtgtactgcccggattaccggaagtctggctaacggacaaacctgcaacagctccggataatgcctgaccgggatttgaatacaatccctgcttcaatgtttcttcttttaccttggaaattgagttggtaactttagtacgcaactgtttaccgccataaccggttactaccacttcttccagcatctcagaatcttctttcatctgaatccggaaagaagtctttcctttaagatcaattgtttgtacttgatatccgatatacgaaactctgatttttccgtccggattcatgtttaatacaaatttaccatcgatgtcagtaatggtaccatttgttgtacccacttcgacaacactcgctccgatgattggttcaccagcagcatcgcttaccacaccggtaattgtttttgtctgtgccatagcccctatggagcagaaaagacacaacataagcaaaaggatgtcttttttcattagtattacttttagttaataattgaaataattttagatacttatctaagtccaattagaactaatcttccggtaatacctcatctccctacgtcagattcctctttagaattttcatcggagcaaaaacatattcgcaaaatcgacctgttttctacctatttaagatataactcttcccttttattcatgactttaataatgcatatttttatatttaatagcatatataagaaa

SEQ ID NO: 3005 - DNA, 165 bp, Unknown
  gut microbiota DNA sequence
caaaagacggcccggctagacaatggtaccgtctgctttgaagatcgcaaacatattgtggtacctaaactaggacgtttgcggatcaaaggcgctcagcagcgactattggatcgtcaaggcgaaacacgcattggtacggtaaccatttccaaagatgcagct

SEQ ID NO: 3006 - DNA, 22620 bp, Unknown
  gut microbiota DNA sequence
tgcgcattttgacacacctccatctgcgttttatcactgctcatgttgcctttttaatacagactttgctgtattggcatttccgatactgtctgtctgctgtttggacttttcttcctgttttcgtttattacgtagcttccacttattccaaaagaacaggtcactccatttattgaaatctttcttgtacataatacctacaccttgtgtagtcagatttgtctttgtataatatcggtcgttcgtttcattgtaagctttcaaacgaatgtctcccgaacggtttatcagccattctgcttcaaagtcgcccacaaaattcgtgtttgccattggattatcccgataaccaaagtttccgttaataagtaaccggttattcagtaactgaccggacaagatgccttccacttccatatctgtccagcctttatcgcctgtgcttagatttgttccaatattccagttattcgtttcaaagacttgcgacaaggcgttattcaactgaccggagagggtggaagaaagtaccgaagacatcacgtttgaattttgattattacgtgcatcctccgtgtagaacttaccaatacccaatagataaaggatttgcatattcatctgttcttccgtactaatataattacgtaccaatgtttgtacttcatcccgttcgttcggaagctcaatacctaatttaatagtaggtcgtaccaatatcccgctcaaattcatgatacagttcaccttaacattgggttgttgtatgattgacgaagattcttccggtatcaggtcattcagagatgctgaatttaccgtgtaggaagcctgaatgtctaagtttgcatccagaggggcaccgttaaaggtaatcgtacttccgttcttgataacaaagtctttacggatcacttcctgcaaactgaatttatatactccctgattaatttggtagctaccgaacatcttcacatcccctttattgtaaaattctgttcgtatatttcctgtacccttgccactgatataatctccggcaacaggatccatgataatcttcattgttgcatctggcgtcgcatctacaagaatattcaatcgtatatccgtcttttgctcttcctcagcttcctgacgtttttgttgcaattgttcataataagaaattatttgaatagaatcctgaatagtgcggcggggagttttgtctacaaacttgataaactggttactcgtagctgatgcaacactaccattaatataagtaaagatgctatttcgattggtcgtcatggcgacattaacatccagtccctgtatggcatttccggtaagcaatgcatttccggtaccatacaccgtgccatagaaaggcatgtccgtcgattcttttgtattcattacaagcatgttgtttgcttgtatctcaaaacgataatttaagttcttaaaatgctggaaatgcagataaccgttcattcttcccgaatggccttccatatcagaaatatgtatattgttgaacgtcaatccggtaggagctaaaagaatggtatcctttatagcaaaatgagtattcaaaatatcaaaattcatggaagcatccgtcatgactgcgccatcgagattcaatcctttaaatttcccgtagaagtgtactttacccgttgcccgtccttttatatcatttgcaatagacttcatataatgttccagaaacttcagattcagttcatttgcttcgatatttaagtcaagcccactttccggttttagcggatgaatgatgccggtgacacgtgacggggtcgtagaaatatctttgatagatgcatccagtcggattcctctattttcattatcccattcgccatatatgttcaaatcgcccaaacgtccttgattaagagagaaattttttataaataaacgcgtattcatcacaggttttttgaaaacaccacttgcataggcagttcctgtagcatctccttcaaaatttacatcatcggaaatacttgcaatatcaaacacatatcccatgttgatatcctttaaatcaacctttacactatcttgcggattgtccgaaagacgtccgtttatacgtacataacgatcctggtggctaaaatagaagttgttcacgtctaccttgccggaatccactactacctgtgaaggatgtatctgccaaagggtatcattcagaataatatccgtcggtttcacctctaccattgcttttaataaaggcttctctccttcggtacgcaagaactttgccacagcggccaattgcccgctatatgtcaccgcagcactatttccccaattcaatgtcgtactgatattgtcgtctttagcttgcgcatccaaagaaaggttgactgctcctttcttcttcagattggtcaggcgcacccgcgcacgaatatgatctgatggattctcgcacaaaatcatgcccgactcaataaagttgttcttatattgaagacgggggaagtatccttccacacgcaaacgctgcaagggatcattaaagtatcctttcaaagtggaatgagtatataccgtcagcggaatatcaaaaatcgtggatagaatatctgtattatatatatgtatatcgaattggaaattattgtgtgtttcaattggctttttgggaggtaatattaatgacgggacatatttccgcataatattcagaatgctggcaggcaatgtgtgatactggaactttccttccacacttgctgtcagaaactcagaagtcaatctcaactgattctcgttattctgtttactggcccggatattcatgttgttcatgaagtattgtttctctggtgacataaattcgaggctatccacattgatttctccaatcatttcgtcaactgagcctcccgtgaagttggctcttagtttcaaagagaattccgtatccggatacttggaggtgagattcaggtcatgtggccgcaatttattgataatagcttgaaaattaaatgtaggaattctggaggaaacattcacatctccattcagataaatagagccattcggatcatccagtgctactttgccattaaatcctccttgcttatattctccgtccagtgtaatattctcatatctatatctactataatctacggaagctatcagccctttcaattcaacaacagggagtcggtcggttacatggcgcccatgtacatctaagttgaatgtgatttctcccagttgctcgttagccaataatttacctaacttatagtcggttgttttaacggcaccggaataagcaaacaatcccttacttttatcagaactcaatttcaagtccatattgacaccgcccaaatcagtatgcaattggccataagttactatatctgtgaaatagccggaaacctctccccggaaactgacatttcccaagcgttccagtactggaggcactccattataatcatgactcaaattgcggactaaaaatcctacgccacgagtagtagcagtaagttcggatagggttccaaacacataagcgtcttgcggatgcgacaagtcctgaagtgccacatctcctttaaggcggaactgacgattgtcggctgttatttccagatgcgaacaggtcaattgattgacagtaccttttacttccatatccaacgatatcggctctttgaagtgcgatagcgccggaagaaaaggagaaatatcttttaaagtgatttgtgacggcaacgtacggaaagaaaaacgaacctgctccgtaaaacggtcaaaggctttcaaactatcatatatcaaatgaattgtatccagtttcagagatgtttcgggcaattcgatagcaaaattgtcaatgcttgtctgcctgctattggcaactagcttcagactcatcttcttcaaagagaaaccggatactttttcatcaaggctcaaccgcttaattcccagatttattgaatctttactcaaggctttcaatgaaatattagctataatattctgaagatggatgtgtttggcattaaacttcccgagtgtttcttcttctgaaagtacatgataagccattcgcccacgacgaatcaggatagaattaatacgcaaatccaatgagttgtctttcttcaccgtatcattggaagcaaatgcatctaatacgaatttaaaattaggtggagagtctggtgtctttttttgaagattgatattgaaaccgaataactggacactgctaatggatatcttacctttaaaaaaaggcatgatatcaaatttggcagacaaacgagtcactttgagcatttcctgctcgtcttggtcgtcaagcaatacatcgtcaatgatgatacggttcaacaatcctatatttatccggccaattgtcacccgtgtattcaataagtcggagagctcctcggctacaaatacactcatgacttgctgaacacttggtatattcagcaaaacaatagttccgatatatactcccagtacaataccaactacccagcgtacagtctttttcagcgttctgataagcgattatttttattttgcgaacaaaaatataaaatagttcgttatgaatcgtagttttatgattacttttgcaccgttttaatagtttaattacttatgagtgtaataatattaggaattgagtcctcttgtgatgatacgtcggcagctgttatcaaggatggttatctgctgtcgaacgtggtatcgagccaagccgtacatgaagcatacggtggagtagtacccgagctggcttcacgggcgcatcaacaaaatatcgtaccggtagtacatgaagcgctgaaacgtgctggagtcactaaagaagaattgagtgcggtagcttttacacgtggtccgggattaatgggttcattgctcgtcggtgtctctttcgctaaaggattcgctcgttccttaaatattccattgattgatgttaatcatctgaatggacatgttttagctcattttattaaagcagaaggtgaggaaaatagacaacccaattttcctttcttatgtctattagtatctggaggaaattcacaaattatattagtgaaagcctataacgatatggagattttggggcagacgattgatgatgctgcaggtgaagctattgacaagtgctccaaagtaatggggctcggttatccgggtggaccgattattgataaactggcacgccagggaaacccgaaagcattcacattcagcaaaccgcatattccggggctggattatagctttagcggattaaaaacttcattcctctattcattacgtgactggctgaaagaggaccctgattttatagaacatcataaagtggatttggctgcatcattggaagcaacagttgtagatattctaatggataaattgcgtaaagctgcaaaagaatacaaaatcaaggaagtagccgtagcaggaggagtttctgcgaataacggattacgtaatgcttttcgggaacatgccgaaaaatatggctgggatatctttattccaaaattcagctatactaccgacaatgcagcaatgatcgctattaccggatattttaaatatttggatagggatttttgctctattgatcttccggcctattctcgcgttacattagaataatttccttattgaaaataggctccttgtccgtaagactaaaaatataccttaatatataggataaaataaggaaagtatgtttgctgaaataataaccattggtgacgaactgctgatagggcaggttgtcgacactaattctgcctggataggacagaaattaaataagataggcattgaggttcttcgtattgtttcaatccgtgaccgggaagatgagattcttgaagcgatcgataatgcgatgaaaagggtgaatattgttttagtgaccgggggactaggtcctactaaagatgatataacaaaacaaacgctatgtaagtatttccatactagactggtatttagtgaagaagtttttgaaaacataaaacgggtgttggccggaaaaatccccatgaatgccttaaataaagggcaggcaatggttcccgagggctgtaccgttataaataatccggtagggagtgcttctgttagttggtttgaaagaaacgacagagttctcgtttcaatgccgggagttccgcaggagatgaaagttgtgatgacggaatccatattgcccaagctgcatgagaaatttcaaacggatgtgattatgcatcaaacatttcttgtacaacactatccagagtctgtattggctgaaaaactggaactatgggaaactgcactgccggaaagcatcaaactggcctatttaccaaaacttggaataatccgcctgcgattgactggacgcggacaagataaaaaagaagtgcgggcgcttctagatagcgaaaaagctaaattagagaaaattttgggtgaagatatcttctgtgaggaagatactcctttggaagttattatcggcgaattactaaaaaagaagaaaataaccgtttccaccgcagaaagttgtactggaggaagtattgccgcacgattaacatctattgccggaagttcggaatattttaatggaagtatagtggcttattccaatgaagtaaagatgaatctcttgtacgtttctcccgaaactttggaacggcatggagctgttagtgaagaaactgtgattgaaatggtaaaaggtgcgatgaaagcattgaaaaccgactgtgctgtggcaacttcaggcatagccggtcccggaggaggaactcctgaaaaaccggtagggacagtttggatagctgctggttataaaaacgaaattcgtacttacaagcaggaaacaaatcgcggaagatccatgaatattgaaagagccggcaataatgcgttattaattttacgggatttactcaaataagggaaaattggtattcagaagtgaattattttaggaatttcttgttttatacggataaaagtgcttactttgcgtcctgtttgaaagaagtatagatataaaactataaaaataagatagaaatgtcgaagatttgtcaaattaccggaaagaaagccatgattggcaacaatgtttcacactcaaagagaagaactaaaagaacctttgatttgaacttgtttaataaaaagttctactatgtagaacaagattgttggatcagccttagcatttgcgctaacgggttgcgtattattaacaaaaaaggactggatgctgcgctgactgaagctgtggctaaaggttattgtgattggaaaagcattaaagtaatcggctaaacgtagaggagaaaacttacaatggcaaagaaagcaaaaggtaacagagtgcaggtgattctggaatgtacagaacacaaagacagtggaatgccgggaacatctcgttatatcacaactaagaacagaaagaatactacagaaagacttgagttgaaaaaatacaacccaattctgaaaagagtaacagtacacaaggaaattaaataataaagaagtataacccatggcaaagaaaacagtagcaagtttgcacgaaggctctaaagaaggtcgtgcttatactaaggttatcaaaatggtaaaatctcctaagactggagcatacgtttttgatgagcaaatggttccgaatgaaaaagtacaagactttttcaaaaaataattgaaatagcatacgcgctataaatacaaaatcctctcattgacaaacaatgaggggattttttattgcttcttttttttacttttcaatcctttgttatatctttgtagcattatgtattatacaaacaactgtcaatatgggattttttagttttttttcaaaggagaagaaggaaactttagataaggggttatctaaaaccaaagagagcgtgtttagtaaaatcgctcgtgccgtggctggtaagtcaaaggtagatgacgaagtgttggataatctggaagaagtgttgattacgtcggatgtaggcgtagagacgactttgaatattattaagcgcatcgaaaaacgtgccgctgcggataaatatgtgaatactcaggaattgaatcatatattacgtgacgaaatagccgctttgttgaccgagaataactcggatgatgtagctgattttgatgttccgatcgaaagaaagccttatgtgattatggtagtaggggtcaatggagtgggaaagactacaactatcggcaaactggcttatcaattcaagaaagccggtaaatctgtttacttgggagccgctgatacattccgtgcggctgctgtagaacagttgatgatttggggagagcgggtaggggtgcctgtcgttaaacagaaaatgggtgctgatcctgcatcggtagcttatgacacccttagctctgctgttgccaacaatgctgacatcgttattattgatacagccggacgcttgcacaataaagtcggcctgatgaacgagctgaccaaaattaaaaatgtaatgaagaaagtagtgcctgatgcaccggatgaagtattacttgtattggacggctctacaggacagaatgcttttgaacaagccaagcagtttactctggcaacggaggttaccgctatggctatcactaaacttgatgggactgctaaaggcggtgttgtaattggtatttccgaccaatttaagattcctgttaaatacatcggtttgggtgaaggaatggaggatttacaagtattccgcaaaaacgaatttgttgattccttgtttggagaaaatgcatgaaaagaaagagaatagatataatcactttgggatgctctaaaaatttggtggactctgagcagttgatgcgtcaactggaagaagtaggatatagcgtgactcatgatactgaaactccacaaggggaaattgcagtcatcaatacatgcggtttcatcggcgatgccaaagaagaatctatcaatatgattctggagtttgccaaaagaaaggaagaaggtgacttaaagaaactttttgtaatgggttgtctttctgaacgttatctcagggagctggctattgaaataccacaagtagataaattctatggtaaattcaactggaaggaacttttgcatgatttggggaaaagctatcatgaggagttgtatattgaacggacgctgaccactccgcagcattatgcttatctgaaaatatcggaaggatgtgatcgtaaatgttcgtattgtgctatcccgattattacaggacgtcatatatctaaaccgatagaagaaatcttggatgaagtccggtatctggtgtcgcaaggcgtgaaagagtttcaggttatagcacaggagctaacttattacggagttgatttgtataagaaacaaatgcttccggaattgattgaacgtatttcggaaataccaggagtagaatggattcgtctgcattatgcgtatccggcacatttcccgattgacttgtttcgtgtaatgcgtgaacgtggcaatgtttgcaagtatatggatatagctttgcaacatatcagtgacaatatgttgaagctgatgcgtcggcaagtgacaaaggaggatacttacagactgattgaacaattccgtaaagaagtccctggtattcacctgcgaacaactttaatggtaggacatcctggagaaacagaggaagactttgaagagttaaaggagtttgtccgtaaagtacgcttcgatagaatgggagcttttgcttattcggaagaagaaggtacttatgctgcagaaacttatgaagattctattccgcaaaaagtgaaacaagcccgacttgatgaattaatggatattcagcagggcatatcggcagagttgagtgcagaaaaagtcggtaaacagatgaaaattatcattgatcggttagaaggcgattattatatcggaagaactgaatttgattcgccggaagtagatccggaagtattgattaattgttctgaaaaagagcttgagatcggaaagttttatcaagtagaagtagtagatgcagacgattttgatttatatgcaaagataataaatgactatgaataataaggaatttacatctgaactagctgaaagactggggtacaccattaaggatactgccgaattaataggttctttactgtctgatatggtacaagaactggaagaaggcaacgtgattgcaatacaaggattcggttcttttgaagtaaaaaagaaagcggaacgtatttcaattaatccggcaagtaaacaacgtatgttggttcctcccaaattggtgttatcttataaacctagcaatacattgaaagataagtttaaataaatatttcccgttatgaatgaaagactaacaattcaagaccttactgacttgttggctgctaaacatagcatgaccaagaaggatgccgaggtgttcgtaaaagagttttttctcttgattgaacaagccttggaaaacgagaagactgtaaaaatcaaaggattgggaactttcaaacttatcgatgtagatagccgggaaagtgtcaatgttaacacaggtgaacgtttccagataaaagggcatacaaaggtttcattttctccggacgcgaatttgagagatacaattaataaaccttttgcacatttcgagactgttgtgttgaatgaaaacacagtattggaagatactccggtagaagaagtggaagaggaagaagtaggtgaggaaattcttgcttcaacaatagaagattataataaaaaggaggaaagtcaagagaatacttctaatcctatagtagaaaatgaaagtcagattgctgaacaagattcttccgaagaagtggatacggttcaggaggaacgaataacggaacagtctattgaagaaaaagtagtggttgaagaatcacttatggttgaacaacaacagccagaacaaccagtaaaagagaaaaaaagaattacggcagagcagattattgaacaagaacttctgaaagcaaatctaaagcccgaaattccaatagtatcaccacagtcggaaattacaaagccgactaaagcttctgtacaaactactgttagcccgatatctaaaaaagaggttgttaaaaaggagaaatctcctgttccttatttgatagctgtaatcgtcatagtattgttactatgtggaggtgtgattttatttatctattatccggacctgttttcttcttcatctgacaagaataccctcgatatgccgcctgtaacaactcaacctgttcgaactgaagcgcagctttccgatactattgaacataaagatactgttgtagaagtaactgttactacaccgaagaacgttgttgagccacagtcaattgtaaaaaaagaagagacattaacttctgcaaaggctgagagtaggcctgtccagcagcaaccttcagcttctgtttatcctgattctgcatcatataaaataacaggaacaaagacaaagtatacaatcaaggaaggtgaaactttaacaagagtttctttacgtttctatggtacaaaagcgatgtggacatatatagtgaagcataatccggatgtgattaaaaatccgaataacgtgccttatggtactacaatcaaaataccggaacttacaaaagaataattataactatctactcccccggctatacattacttgtactggtcgggggaagtgttatggatgtacaaaagcgtatgaaagtaccttaatctaaagatttcgcattgttttttaataaaaattagttgcaatcgttaattatatggcgtacttttggaagcaaaataaaaagccttatacacaggcaaggcttacatcaaattaatgggaattaaataataaaatattaagtatttatggctgaatcaattgatatccgcgagctaaatgagcggattgaaagacaaagtgctttcgttaccaatcttacgacaggtatggaccaaatcattgttggtcagaaacatttggttgaatcactgcttatcggattactctccgatggccatgtccttttggaaggtgtgcctggtttggcaaaaactttggctattaaaactcttgcttctttgattgacgctaaatatagccgtatccagtttacccccgacttattgcctgctgacgttatcggtacaatggtttacagtcagaaagatgaatcgtttaaagtacaaaaaggaccgattttcgcaaactttgtattagccgatgaaataaatcgtgctcctgccaaggttcagagtgctttgctggaagctatgcaagaacgtcaggttactattggtaaagagactttcttattaccggagccttttcttgtattggcaactcaaaaccctatcgaacaagaaggtacttatccgcttcctgaagcacaggttgaccgttttatgctgaaagttgttatcgattatccaaaactagaggaagaaaagttgattattcgccagaatataaatggagaaaagttcaatataaagccaattctgaaggcagaggaaattatcgaagcacgaaaagtagttcgtcaggtgtatttggacgaaaagattgaacgctatatcgtagatattgtatttgcaactcgtttcccggaaaaatatgacctgaaagaattgaaagatatgattggatttggtggttcgcctcgtgcatctatcaatcttgctttagctgctcgtacgtatgctttcattaaacgccgcggttatgtgattccagaggatgtacgtgctgttgcgcatgacgtgctccgtcaccgtattggactgacatacgaagccgaagcaaacagtatgacttcggacgaaatcatcagtaagattttgaataaggttgaagtaccttaattggtagttaactacttaccacttaactactttataaatggaaacaagtgaaatactaaaaaaggttcgccaaattgaaatcaagacacgaggattgtctaacaatatttttgcaggccaatatcattcggctttcaaaggtagaggaatgtccttttcggaggttcgtgagtatcaatttggggatgacatacgtgacatagactggaacgtgacggcgcgcttcaacaaaccttatgtgaaagtgtttgaagaggaacgcgaactgacagttatgttgatggtcgatgtttccggaagtttagaatttggtacggtcaagcaattaaagaaagacatgataacggaaattgccgctactcttgctttctctgctatccaaaacaatgataaaatcggtgtgatattcttttcagaccggatagaaaagtttattcctcccaagaagggacgtaagcatattctatatattattcgtgaattgattgattttcagccggaaagtcatcgcactaatatacgtcttgcattggaatatctgactaatgttatgaaaagacgctgtactgcgtttgttttatccgactttatcgatcaggaaagtttcaaaaatgctttgactattgctaaccggaaacatgatgtagtagcattacaggtttatgataggagagtcagtgatcttcctccggtgggattgatgcggataaaagatgcagaaaccggacatgagcaatggattgatacttcttccaaagctgtacgtcgggcacatcgcgactggtggatacaaaaacagacagaattgaatgatacatttactaaaagtaacgtagactctgtatctgtaagaactgaccaggattacgtaaaggcattgttgaatttatttgccaaacgaaactaatgaaatcaaagatgaataaaaatattattctgatagcattgttatgtttactgtctattgatagagtaggagcacaatctgtaacagtggaggcaaagatagattctttgcagatactgattggtgaacaagcgaaaatacaattacaagtagctatggatgccaagcaacgggctgtttttcccgcttataccgatacactggtacgaggggtagaaattatagaaactgccaagccggatactcagttcttgaacgatcgtcagcgtatgatgattactcaagagtatactgttacttcttttgactcggctttgtattatctaccaccaatgcctattacagtagatggcaaagagtatagatcaagagctttggcattgaaagtatattcaataccggttgacacattacatccagaccaattttttggacagaaaaccgtgatgaaagctcctttcgcatgggaagactggtatgggttaattggctgttcattcttggctttgcctttacttggtctattaatttatctcatagttcgtatccgggataacaaacctattatccgcaaaataaaggtagaacctaaattgccgccccatcaggctgcaatgaaagagatagagcgtatcaagaatgagaaagtatggcagaaaggacaaccgaaggaatattacacagaattgactgatacacttcgcacctatataaaagatcgttttggtttcaatgcgcttgaaatgacttcatctgagattattgacaagctattggaaatgaaggataaagaagctatttctgatttgaaggagcttttccagacagccgatctagtgaagttcgcgaagcacgatccgcaaatgaacgagaatgatgccaatctgatcaatgctattgactttattaatgaaacgaagcaacctgaagaagaaaatcaaaaaccgcaaccaacggaaattacaattatagagaagcgttctttgcggacaaaagtattgttaatttgcggaatcgcaattttgtcaaccgcattgataggtacctttatatatataggtatgcagctatataatctttttgcttaaaagtatatatagcttgaatactaaatagtaaactgttaaatcataaatgaaatgatttttgccaatattgaatatctgtttttgctattattacttataccttatattgtatggtatattctgaggcaaaagaaaagtgaagcaactcttcaaatttcggatgctcgtgtatatgcacatacacctaaaagctataagaactatttgttgcatgttccattcttattgcgtgttattgccttagtgctggttattctagtgcttgcacgtccgcaaacgactaataaatggcagaatagcgaaatagaagggattgatataatgctcgctattgacgtatctactagtatgttagccgaggatttaaagccgaatcggttggaagctgcaaaggatgtagctgctgaatttattaacggccgccctaacgataatatcggtataactttatttgcaggtgaaactttcactcaatgtccgcttactgtcgaccatgctgttttattggatatgattcataatatcaaatgtggccttatcgaagatggtacagcagtaggtatgggaatagcaaatgcagtaacccgactgaaagatagtaaggcaaagtctaaggtgattattttattgacagacggtactaataacaaaggggatatttctccattgacggctgctgagatagccaaaagttttggtattcgcgtgtatactattggggtggggacgaatggtatggcaccttatccctatccagttggaaatacggtgcaatatgtaaatatgccggtggaaattgatgagaaaacgttgacacagattgcaggtacaaccgatggtaactattttagggctacgagtaactcgaaactaaaagaagtatatgaggaaattgataaactggaaaaaactaaactgaatgtaaaggagtatagtaagagggacgaagaatatcagtggtttgcattggtggctttcctttgtgtgttattagaagtgttattgcgtaactcaatactcaaaaagattccataaggatgtttgtcaatcgttatttgtcaatcgtaaaataagaagaaaatgttccgatttgaagaacctacatatttatatttattgttgctattaccttttttagcagttttctacttgtattccaattacaggagaagaaaaaatattcgacgttttggtgatccggttttactggcccagttgatgcctgatgtatccaaatatcgtccggatataaaattttggataatatttgttgttatcggcttgttctctgtattattagcacgtcctcagtttggctccaaacaggaaacagtgaggcgtaaaggggtagaagttattattgctttggatatttcaaattcgatgttggcacaggacgtacagccaagtcgtctggaaaaagctaaaagattaatttccaggttagttgatgaactggataatgataaaatcggtatgattgtatttgcaggagatgcatttacacagttaccgattaccagcgactatatttctgccaagatgtttttggagtcgattagtccttcattgatttctaaacaaggtacggctattggagaagctattaatttggctgtacggagttttacacctcaagaaggagtggggcgtgccattgttgtaattacagatggtgaaaaccatgaaggcggagctgtagaagctgctaaagttgcagctgaaaaaggtattcaagtaagtgtattaggggtgggtatgcctgatggtgcacctatttccatagaaggtacaaatgattatcgtcgtgaccgtgaagggaatgttattgtcacacgcttaaacgaagctatgtgtcaggaaattgccaaagaaggaaaaggtatttatgtacgagtagataatactaactctgctcagaaagctattaatcaggaagtgaataaaatggcgaaatcagatgttgagtcgaaagtgtatacagagtttaacgaacagtttcaagctattgcatggattattttaatattattgttagcagaattgttaattctagatcgtaaaaatcctttgttcaaaaacgttcacctattttctaataagaaatagctatgcatatgttaagaagtaaatatattctattcactatttttctactatcggtagccagtgtctcggtacagaaagcagagcgtgactacatccgtaaaggaaaccgtttgtttaatgacagcgtatttgtagatgcggaggtgaattatcggaaagctttagaagtaaaccctaagtcgacagtatccatgtataatctggggaatactctctcacagcaacaaaagtttcaggatgctatggaacaatatgtagctgccggcaaaatcgaaaaagataaaatgaaactggctcatatttatcataatatgggggttctttttcaagctggtaaagattatgcaaaagcagtagaagcgtataaaatgtcgttacgcaataatccagctgacgatgaaactcgatataatttggcacttgcccagaaaatgctgaaagatcaacagcagaatcaggaccaaaatcaagatcaaaacaaagaccagcaacagaagcaagatcaacaacaagataagaataaagacaaacagaatgatcaaaaacaggatgaaaagaaagatcagcaacaacctccaaaatctgaaaagaaagacaatcaaatgtcgaaggagaatgcagaacaattacttaattctgtgatgcaggatgaaaaggatgtgcaggataaagtgaagaaacaacagaaagtgttgcaaggtgggcgtttggaaaaagactggtaatattaagttgacgatataaatttcataagcaatgagaaaactaattattatattaatgacattgatggcatatagcacccaaactttcgctgataaagtgtcgtttgttgcttctgctccggacgtggtggtggtaggcgatcaatttaggctatcgtatacggttacaacacagaaagtaaaagattttcgtgctccttctatcaaaggatttgatgttttaatggggccaagccgatcagaacaaagtagtactcagattgtgaatggtagtgtatcatctactagtagtattactttcacttatatattgatggccaatactgccggtgagtttactgttcctggtgcttcaatagtagctgacggtaatcaaatgatatctaactcagtgaaaataaaagtattgccacaagatcaaaatcataatagtagcaggaggaataatgataatagttcttccatacagccttcatcgaatgcaagtgtatctaaccaagatttgtttattacagcaactgcaagtaagacaaatgtttatgagcaggaagcgttcgtattgacatataaaatatataccagagaatctaacttacagcttaataatgccaagttacctgacttcaagggttttcattcacaggaaatcgaaatgactacaaatgctcgatggacacctgagcattataaaggtcgtaactactatacaactgtttatcgccaattcgtgctctttccacaacagtcgggcaaactatttatagagcctgcacagttccaaatgacggtaaataaaccagtacagtcagccgatccttttgatgctttttttaacggaggaaacaatgttatagagattaagaagcctatcacaactcctaaaatagccatcaatgttaatccacttccggctggtaaaccgacaaacttcttaggtggagtaggagagttcaacatttcttcttctatcaacagtaaggagttaaaaacgaatgatgcaataactattaaattagtgatttccggaacgggtaatctgaaacttatttccaatccggaaatcaaatttccagatgattttgaagtgtacgatcctaaagttgataatcaggtgagattaacaaaagaagggcttactgggaataaagttattgaatatttagcaatccctagacatgccggaacatataaaattccgggtgtatcttttagttatttcgatatccgttccaaatcttataaaactctgaatacagaagattatgtaataaacgtagagaaaggtgcaggaaatgcagatcaagttattgctaacttcaccaataaggaggatttgaaagtcttgggtgaagatattcgctatattaaacaaaacgaagtgacttttcaacctaaaggaagcttcttctatggttcaatgtcgtactggctattctatattattccggctcttgcctttattcttttctttataatttatcgcaaacaagcagcagagaatgccaatgtagcgaagatgagaacgaagaaagctaataaagtagcaataaaacgtatgaagctggctggtaaactgctttctgaaaataagaaagatgctttctatgatgaagttttgaaagcattgtggggctatatcagtgataaactgaatattccggtatcccgtttgtctaaagataatattgaggaaaaattgagaaatcatggagtgagtgaagagctaattaaggaattcctgaatgcattgaatgactgtgaatttgcccgttttgctccgggagatgaaaatcaggcaatggataaagtttattcatcttcaatagaagtgataagcaaaatggagaattcaataaaacattaacctagaagagattgtgtcatgaaaaaaatattattttttatattcttatcaatgtcggtaacttgcttcgcgcaagattcactgagcattgaacccagacaaataaacgaagctgattctatccatgtcgatacacatacacttcttgataacaaattggaagatgtgacaaaaactaaaggagattccgcatatataaaagaagattatgcggctgccattcaaatatacgaagcattactaaagagtggagaagcatctgaagtttattataacctcggaaatagttattataaaataggtgaaatagcaaaggcggttcttaattacgaacgtgccttgcttttgcaaccgggaaatagcgacatccgtgctaatctcgaagtagcacgtgccaaaacaatagataaagtagaacctactcctgaagtcttttttatctcatggactaagtctttgattaattgtatgagtgtagatgcatgggccacatggggaattgtttctttcattctactgatagtatctctctacttctttatattttcaaaacagattatgtggaaaaagataggcttcatttcagggattatctttttaataatcacagtatgctctaatctttttgcttcacaacaaaaagaaaatttggtaaaccgtaacgaagcgatagttatgaatccgagtgtcacagtgcgaagtactccaagtgaaagtggtactagtttatttattcttcatgaaggaagaaaggtaaacgtcaaagacaattctatgaaagaatggaaagaaattcacttagaagatggaaaagtaggatgggtcccagcttctgctattgaagtgatataaaaggtattaatagattttatcaattttgaaaaaaaagataagcaaataatttgttttatctttttttttgcttaagtttatagcgtgataaaaaatcacatagtactaaccattaaatttatgagacatgagaacaataacatttaatgaacttcgtaagattaaagattcattgcccagcggtagcatgcatcgaatagcagacgaacttggtttacacgtagatactgtgcgaaactttttcggaggccataatttcaaggagggaaaaagtgtcggaatacatcttgagcccggtccagatggtgggcttgttatgttagacgatacaacagttctcgatcgggctttaaagattctagatgaattgaatatgagtatgcaaaaagaacaggctaccgaatctgtgcaagtttaaaatatagcaaacagaaatcccaattgcgttaaacaattgggatttcttatttgttcaccttcaaaatgtatcaattatggaagacaaattagtaactctagcaattctgacatataccaaagctcagattctaaaaaatgtacttgaaaatgaaggtattgagacatacattcataatgtgaaccaaatacagcctgttgtatcctctggagtacgcttacgaattaaggaaagcgatctaccgcatgcactgaaaatcacagaaagctctgcttggctatcggaaagtatagtaggagagaaggaaacaaaaaaaggagaaaaatcaaataagattttaattccggtcgatttctctagttattcgatgaaagcatgtgaatttgccttcaacctagctaaaacagagaacgcagagattattttgttgcatgtatattttacacctatatatgcatcgtcattgccatacggagatgtattcaactatcaaattggagatgaagaatctgtaaaaacaattattcacaaagttcattctgatctcaaagctttatctgataaaataaaagataaagttgaatcgggggaatttccagatgtcaaatatagctgtattttacgtgaaggcattccagaagaagaaatattgagatacgctaaagagcaacgtcctaaactcatcattatggggacacgaggaaaaaatcaaaaagatatagatctgattggcagtgtaactgctgaggttattgaccgaaatcgtacagccgtattagctattccggagaatacaccattcaaacaattcagtgaggtaaaacagatcgcttttataactaatttcgatcaaagagatttaatagcttttgatgcatttttcaatagttggaagtcatttcatttttcagtatctttgatacatcttgctgaatcaaaagatacgtggaatgaaataaaacttgttggcataaaagaatattttcacaagcaatacccagggcttgaaatccattatgatgtcgtaatgagtgataatctactaaaaggacttgaacaatatatcaaagataatcaaatagatataatcgcattgacttcatacaaaagaaatatattcgctcgattattcaatccaagtattgctcgtaagatgatttttcattcagatacgccgttacttgttatgaacggatgatcaaaagaaatagaattttagtgttttaaacagtggaataataaacattatgtttaatagcaaaagggagcaataaataaactttgctcccttttgctgttttttaatgaactcattttttaaaaagcataaaaaaagaaggcaacttttgtgtaaccttctttttcttcatcaaagaaatatattatttcatcatcttatcaatttcttcgaattccggacccatattcaaattatagtatacacggtaaagaccttgcaaccataaatctttctggtcaggttttaaagctctagctttttcatagaagggctttgcttcttcatagaatttcttcactgccgcttgagcttcagcatacttaggatcattgatatctgttgttgctttatctgcataatcttgtgctttcatcagatacactaaacctacattagaataagcttctgcatatt

SEQ ID NO: 3007 - DNA, 765 bp, Unknown
  gut microbiota DNA sequence
ctttcatacttagctaatgcttgtgtataacaataatttgtagaagactcttgtctacattttatgatagcattatcataatctgcttttgcttgtgcatacgctatctgtttatttgtttcgcaactattaacattatcttctgttcgtgtctttataagtgtttttcctgtaaattcacgactttcagcatactgcatgaatagtaacatacgttcatcctcgcttagtttggagaacccagtgtgcaaaagtaagttttccttggcttcattcatctgttggagttctttttctaaatttgcttttccgataaactcttccatataatcatcatcgtttaaattttccatgagtttgttatactcttctgcgctcaaggttgaagtgtaagcttgaaacttatctgatagaagttcactgttcctttcaaattcccaaaattcatcagaagttgctatggtatcaataaggagttttgtatcatacatttgctcatcattataatcattcgaattacaactattgaaaaaagttgttgcaagtacaacacagacaatggctgttacatggaggctaatttttttctttgggttaatcatatccgttcgatttagtttgttgtgggtacaaagtaacgaaaaatagttttgttttaaagataatatttgcataaaaaatagtttatctagttaggtcttgatttaatgcatatttgtaatgttacaatatagggttatctaatcttttctgtgattataagtg

SEQ ID NO: 3008 - DNA, 49050 bp, Unknown
  gut microbiota DNA sequence
acctaagttcaagtagaacttagtaacaagcaaaggatattcgactaattttttattaactaaatcaagaaatgcttatgaaaagaaaacctccgcttatcttatgaattatgaattttggaaatgaaaattcaaaaacaaaggcaaacatgttgatacttcaaaggagtgttaacaggcttattctctaaaattgattccagtcaggtccccaaaaaactgatggatttcgattaatcgttaacctttgatcttggtttaaaagtttatttgatcttcctttcataggataaaaaactgataaactattaaataggatcattaatttaataaatgaaataatagtaatgagaaaaacatctttggtaactattttatttgcaatgctgataacctttctttcagcatgtaaaagtgattcagaagaaggtggcacaacaggcaaaccttatgatccaaatcaaccgattaaactaacctctttttaccctgaaaatgggggaatggcaacgaaagttattattaatggagaaaatttcggaactgatctttcgcagataaaagtattctacaatgaaaaacaagcggcagtggtacgttccataggaactaaaatttatgtcattactcctcggcaaccgggagataattgcactattacagtagaagtaggtaaagataaagccagttttgaacagcagttttcgtataagacacaggttactgtaagtacgattacgggaacgccgcgaacggaagtaaatgcagttgacggaacattggcggcagctcagttcggattgactcattttgtttgcgtagatcgtgagaaaaatatatttgtttgcgaaaggtccagttatcgtttacgccagataaatgagcaacaaaatatggtaactacattagctacaaatattacagctccatttattccaatggttgaaacagaagggcagaaagtctttttaccgctttgggtacaaggaggtaatttgttacaatttgatccggaaacacaatgggctaaaaaacaggtgaagccacagaatgtaacattagaccaatatatatccgctgctgttaatccggaagataaactggtgtatataaaggcattaaatggaaacttggctaaaatggatcctaagagtaaggaagcagaactagttactacggggctggatgcgggttggacttatgatgctatctgttgttttgatagtctcgatccggatgtgctctatatttgttatcggagcaagcattgtatttatcgctatgaactttctaccggaaattatgaattgtatgcaggagcaagagaagatcctggctatgaggacggaaaacgtttgaacgcacgatttaatttcccttcacagatatgtttcgacttagacggaatcatgtatattgcagattccagtaatcattgtattcgttcgattgaccgggaaggagcagtaagtactgtaattggtgtcccgggcagagccggctatgtagacggtacgccggatgacgctttatttgatgagccttggggagtagctgtggatgaagaaggtacaatttacattgcagatactaaaaataagtgtattagaaaacttgctattcagtaacctgtttatcactaattcaacatgagaaaattatatattattcaaattttacttttatgctgtttgggcgtcatggctcaaaaagcggggaaatcgctgactatttcgggtatagttgtcgataagtcgtccgataaggaaccgattatcggcgctaatatattcttgaaagaccgtccgggcgtaggtacaacgaccgatttggatggtagatttaaagttcaggcacataaaggcgatgtactgatcgttaattatatcggatatgataagatagagtatttcgttaccgatagccagacaaacctggttcttaaaatgactccttctgctactgctttggacgaagtagtagtggtgggtatgggaacccagcgtaaagtgagcgtagtaggagctatcacaagcgtggatattggtgaccttgctgttccggccacttcactgaataactctttgggaggtagagtgccgggagttatctctatccagtcgagtggtgaaccgggtaaaaatatctcggaattttgggttcgcggtataggaacatttggtgctaatagttcggctttggtgttgattgacggtttggaaggcgatttgagtcaggttgatcctgctgacgtagagagcttttctgttttaaaagatgcttctgcaacggcggtttacggtgttcgtggtgctaacggagtaattcttgtaacgaccaagcggggaacagtagaaaaactcaaaattacagcccgtgccaattttactatttcacagttgaagcggttacctaaatatttgagagcttatgattacgccaagctggccaatgaagccagagtcgtttcaggagagaaagaactctattctcctatggaaatggatttaatccaatatcaattggacccggatttgtatccggatgtaaactggcaagacgaaattctgcataagacttctttccagcagacttattatgtaagtgcacagggaggtggtagtattgcccgttattttgtgagtatgggtatgtcgaaagagtcggcagcatatattcaagaccctgacagccgttacaaggcagacacaggatacaacacatataattatcgaaccaatttggatatcaatgttactaagtcaaccaccctctatttggggttggacggatttatatccaataaaaaagagccgggaatggctaacacagatttactttggaatgctcagtcaatgttgacaccgttgactattcctactaggttttcaacaggacaacttccggcttatggtgtcaatgatgcctattcaccttatgtaatgcttaatcatacgggaatggctacccgcgagacttacaaaaatatggtgactctcgctctgaaccaggatttgtcatttcttctgaaaggattgaaagtaaaagtacagggcgcgttgaatagcgacgtatattatgatgagactcgttttgtaatgccggagatgtattcggctatcgggcgaacgacttccggagaacttcaattggcaaagaaagttgacgctcaagcagctacattcagtaagacattgaatcattggcgtaaatatcatttcgagtttactgccaattacgaaaggttattcaatgataaacacaggacaacagccttgctttactattacatgagtgacgagaaggcgactaaagacatcactgacagtatgagcgctattcccaaacgttatcagggagtatccggaagaattacttatagttttaaagatacctatttcattgatgcaaacttcggttatacaggttccgaaaacttcgagccgggtaagcaattcggtttctttccttcgggagctatcggttgggtgccgacaaactatgatttcatgcggaaagcggtgccttggctggattttcttaaaatccgtttctcgtatggacaagtaggtaacgaccgtatttccaataaacgcttcccttatctgactattattaattctaatgcggctacgggctggggaagcgattccaatggtgtgaacgagtctatcgtaggtgctgacaatctggcttgggagaaatcaaccaaagcggatgtgggtattgaagcgaaattcttcaaagaaaaactctccttagtggtcgattatttcaatgaccagcgaaatggtattttccagcagagaactcaggttcctgatttcgcgggtattatcaccatgccttatggtaatgtgggaaagatgcgtagctacggagctgacggaaatatttcttattcgcaggatataggcaaagacttctcatttacgatcagaggaaactttacctattcgaagaatgatgtgcagaactgggaacaggctgatccaaaatatccctatcagcagataagcggtatgccgtatggagtgcaacgtggttacatagcattgggattgttcagagatgaccaagatgtggagagcagtccgtcgcagtttggaactgtccgtccgggtgatattaaatataaagatgtgaatggtgatggacgtataacggaagacgaccaagtgccgttggcctactctaactatccgttattgatgtatggattcggcggagagttccgttacaaatcgtttacactggcttgtctgttcaaaggaacgggaaatacaacctattttaaagtcggtaatggatatgaaatgggatatgttcctttccatggtgaaaagacaggtaatgtacctgtggaagccggcgttcaggcaaatcgctggactccagcctggtattcaggagatccctctacggaaaaccctaatgcagcattccctcgattatcctatggtaagaatgaaaataatactaagaaatctactttctggaaagacaatgcgcgctatttacgtttacaggaaattagcttaacctataacctgaagaccaagggatttgtaaaaagactgggtatacagtcattcgactttcaattggtgggatataatctggcagtctggagcggtgtgaaaacagtagatccggaacaagcacagaaaatggggcgtgtttatcctattcctgcccgttacgcatttcaaacctatatccatttctaaatatgcatgatatgaaatattttaaaagattaatgataacgctatgtacagcgttctacttttgcctgtcctcctgcaattacttgaatgtggatgagtattttgctgatacattgggatacgattctatttttcagaataaaatgaatcttcagaaatatctatgggctacggctgctttcttccccgatgagggcgctatctggggtggtgcttatacaccgggtgttaccggttcggatgaagcctttgtgcaatggaacacgggcgaatttcccggagtaacatttgttttggggcacacgactcccgataacttgggaacgatgaataactgggcacagatgtataaaatcattcgtaaggttaatattattttcagtagaatcaatgaatgtaaagaccttacaaatatagaacaacgcgagattctgggctatgcacattttatgagaggctatgcttattataatttgcttcaaaactttggtcctgtcgttcttgtgggagatgagccgatgaataccaatgaatctcctgcatactataataaggaaagagcaacgtatgatgaatcagtagattatatctgtaacgagttggaaattgctgcaaattatattcctttgcgggttacggtatctcagttcgggcgtcctacacgcggagctgcgtatgcgctgattgctcgcttacggttgcaacaggcaagtcctttgttcaatggaggaagtgcagcgaaaacgactttcggaggttggatacgtaaatcggacaatgttccctatgttagccagacttatgacgagcaacgttgggcggtagctgcgcatgctgccaaacgggtaattgatatggatatgtatgagttgcataccgtaaaaagtgacaagtacacgccggaattgccgaccaatgtatcagacgtaaactattatacgaaaactttcccggaaggggctgtggggattgatccctataaatcttatagcgatatgtttacgggcgaatcgaccgctactaagaatccggaatatatatggggaagaacatccggtagtcttcgtagttatacccggcacgcttttccggtggggctaatgggaggatataatggaatggctgtccctcagaagtttattgatgcttactatatggttgatggtagagatcgtaccaattcgagcgatgaatatccatatctggaagacggattcacttctgaagtgaagtctttctccggataccagttaaagagcggtgtttataatatgtatataaaccgtgaaccgcgcttctatgcatcgattggttttagcggttgtttctggccttgtgcttctacaagtgaagctgtgaagaaaaatgtctatgtctattattggaaaggtgcgagtggctatggggcttccggaaaggataaagcggtaggttccggtgacgccaacaattatccggtgaccgggtatgtgatgaagaaatatgtccataatgatgatgcttggagtggtaccgatgcaaccgtattacctaaatcattccccattatccgttatgcggaaatattactttcgtatgtagaagcattgaataatctgaccggatctcatacggtgactttcagcgatgaaagcacgggcacttatactcgcgatatgaacgaaatggcgaaatactttaatatggttcgctatcgggcgggtttgccgggcttgactaccgatgagttaagttctgctgataaaatgtttgacatcattgtgagagaacgcatgattgagttccttcacgagaacagacgtttttatgatgtccgtcgttggggtatttatttggatacggaaaaagaaccgattgtaggtatgaatacggacgggtttgaagatgaatttttccaaagaacaacggtcaatcatctttttgcacgtaccagagtggccgataagaaaatggtcttcttgcctattccccgtgctgaattgcggaaagtgccattaatggatcagaatccgggttgggataattaacgggaactataaattaaaatttgatatgagaatgaaatcaataacaaaatatatgatgtattgtgccgtgttaatgggattgacagcgtgcaatgaaaattcaatatttgaaggtgagctatacaagaaggtggtgtatgtgttgagtgaaacggacttgacgtttccggtcactcattcgctgaatactccggtttccgttggatatataaccatttacgcaggtggtacacgggctattgaccaggacgtgaccgtaacgttggaaaaagatcctgacttgattgataagtataatcatgataactttgacttggatgaggataagtacgcgaaagaactggatccttccagatatacgattaaaagttatactgcggtgatgaaagttggcgatcaggacccctatgtaaagttgcctattgaagttaggaccgagggattgtctcccgattccacttatctgattcctttacggattgccagttgcactccttatgaagtgaataaagataagtcgcgggtgttgtataaggtgtatattgagaatgattttaccagtcagaaaagtcctttgacattatttatgaggggtactcagctgcgggaagatgatacaaagcctacacaggtatcagcgaataagattctatatcccttgtcgaaacggggtgtgagattgaatgccggcattgaaaacagtgccaataaagcagaagaggaattaataaacaagtcgagccttatcatggaaatcggtgaggaggaactgacttatatcgatggtaccaaatataatactcttatactaaaaccttataaatcagaattgatagaggtagtacaattacccggtacaactgatgatgatgaagcattgtctgtccagcaggcaaacagatacatcaccgtagacggagtcacccgtttttatctttcctataaatatcgtacactgaaaactgctgcgaccaatgacgcacctgccgaatggaactcatggattgaggtttatgagaacatgaaagttcctactgacgattaagcttgtttataatgaacgattagtttaaacaaggtaaaggcttgttcttttaaatcccgtatatgtgatagtttgagtattcaaaacaacgtatacgggattttttatgtgtatgattagtgtagaatatttttattgggctactctcttttcctccgtgttatcctgaaaggatattactagccgtaatccgtagtcaatgtcccaacgcagtggattgactccataacggttggtgattttgcagtatttggcgatagtataataacttcctccgcgtagcactttatgtagatcaatccccttcaggtcaggatcaatatttccggtgaaaggaacttttttatcataccagtccatgcaccattcgtagatgtttccgctcatatcataaagtccgagttcgttgggttttttggttcctatatcgttggatacatatgtgttttcattggagtatttttctttaaaccaagcgacttgtgtcgggtcatcgctaccggcataaatgtagttttgggtattcaagcctccacgtgcggcatattcccattctgcttcgaacggcagacggaaggggaggccggataactgagagagttttcgggtgaatcgttgagtgtcataccagttaacttgatctacgggatagttacgtctgtgttggttggaaggattctcccccataatgacgtaccattcatcctgacttacctcatagcggttgatgaaaaaagagcccacattcacaggataatcgttgttttctccgagattggctgtccctccttctacgtaaaccatattccataatatgtaacgtatcacttctttttgctcattactaatgccgggcgaccagcgtagagctttctctaactgcgaaggaagcgcaccgacaatggttttttctctccggcatttatcgcaaaatgctttccatatcttttgtttctgtgccatattgggtaatataatacccagcaatagaagaaggaatattataatccgcttagtttgttttctttccatgatagttctatgtttatctttttgacgatagaagatgagaataactgcaatcattagtcttaaatttatttaatatctctttgggagtcttctttggacaaatcccttattttcattaaaatcatctttattttcggcaataatcgttatatatttgttattatagataagagtatcaattatttaatttgaaaagaatatgaaaaagaaacagacaggggttatattgatgttggctgctctctctttgatgagtatacagccggtagaggcgtgtacacgtgccgtttacctcggcccggaacagttggtgataacggggcgtacaatggactggaaagaagacattatgtcgaatatctatgttttcccgcgtggcattcagcgtgttgggcataataaggaaaaaacggtgaactggacttccaagtatggaagtgtgattgcaaccggttatgatataggaacttgcgacggtatgaatgaaaagggcttggtggctagtctacttttcttgcccgaatctatttattcgcttcccggtgatatccgtccggcaatgggaatcagtatttggacgcaatacgtgcttgataactttgccactgtacgtgaggccgttgatgaactgaaaaaggagactttccggattgacgctccccgtatgccgaatggaggaccggaatctactttgcacatggccatcaccgacgaaacaggcaatacggctgtgctggaatatctggatggaaagttaagcattcacgaagggaaagaatatcaggtaatgacaaattctcctcggtatgaataccagttagctatcaacgattactggaaagaagtcggcggattgcagatgttgccgggaacgaaccgttcgagcgaccgttttgtccgtgcctctttctacattcatgccattccgcagactgccgatgcaaaaattgctgttcccagtgtgctgagtgtgatgcgtaatgtttcagttccatttggcattaatactccggagaaacctcatatttcttctacccgttggcgttccgtctccgaccagaagaataaggtctattattttgaatccacattgacgccgaatttgttttggcttgatttgaaaaagatagactttagcccgaaagccggtataaagaaattgtctttgacgaagggagagatttatgcaggagatgcggtgaaggatttgaaagatagtgagtcatttacgttcctttttgagactccgctcatgtagtagtttcttgttatctataaaataaaacggtggacagatgcttgattgtaagcctgcccgccgttttgtttataccgtttataataatggttcttgtgtccactttaccgtccggcatattcctgatgaaattcggccacagcttcaatgcctttcctgaaaatatccagtgagaagttctcattcggcgaatggatagcgtctgattccagaccgaatcccatgagtacggttttcactcccagtacctgttcaaaagtagaaatgataggaatgctgccgccacggcgtactgccaacggctttttcccgaaagctatttcaaaacctttttcggctgcctgataggctgcaagtgaaatcgggcagacataaccttgtccgccgtgcatcggtgttactttcacttgaactgtttctggagcaatactgagaatgtaatcagtgaacatttgcgaaatcttatgatgatcctgatgcggaaccagtcggcaagatactttggcataagcctttgaagggagcacggtctttgaaccttctcccgtatacccgccccaaatgccgcatacatcaaaagacggacggcagctattgcgttccagtgtactgtatcctttctctccgaaaagttcttttacgccgattgcttccttatacttcttttcatcgaaaggaatatgggctatcatttcacgttcagcttgcggtacttcttccacgtcatcgtaaaatccggggacagtgattcttccgtctgtatccgtcaccttactgattatccggcaaagcacattgataggattggctaccgcacctccgaagtgtccggaatgcaggtcgcggttcggtcctgttacttcgatttcccaataagccagtccgcgcaggccggtggttaatgacggaaggtcggcacccaacatactggtatccgaaacaaggataacgtccgctttcagcaactctttatgttcttcacagaatgcctctaggctgggagaaccgatttcttcttctccttcgaagataaacttcacgttattcctcaataacccgtttttaaggagatattcgaaagccttcacctggatgaaagactgtcctttgtcatcatctgctccgcgtgcccagatatatccgtcccgtatttccggttcgaatggttggcttttccataattcgagtggttcggcaggcatcacgtcatagtgtgcgtaaactaatacggtttttgcgtctgggtccacaatcttctgtgcaaagacaatcggattgccttgggagggcattaccaatgcttcatccactcccgcttcgagtaataactgtgcccagcgttcggcacatgccagcatatcgtcatgatgttcgggcagggcgctgatactgggaatacggatgaggctgaacaagtcctccattatttgaggttcgtttgctgcgatgtatttctgaatttcgttcatataaagataataattaaagctgggtggctttgtccagcaaataataatcaagtatagtcatagcggccattgcttcgacgataggcacggcacggggcagtacgcaggcgtcatggcgtccacgggctttcagtgttgtgtcgattccatcgatattgaccgtttcctgttccattagcagagtggctatcggtttgaatacaacacggaagtagatatcctgtccgttgctgagtcctccttgaatacctccggagtggttggtatgtgtttcaatccgtccgttgttattgtagaaaacatcgttctgttcggaacctttcattttcagtcctttgaatccttcgccatattcgaatgctttggcggcattgatacttaacatagcattgcccagtgcagcgtgcaacttaccgaaaacgggttgccccagtccgataggacatcctttgataacgcaggtcagcgtaccgccgattgtatcaccttcgccttttactttgtatataaggtctgccatttcctttgctttgtcagggtcagggcaacgcacgtcgttagtttctatcaggtcgaggttgtaatctgaataactgccttccaacttgatagcgcctacttgtgaggtataagcggtaatgctgactcctaattgacgaagtgccagtttagccagcgcaccggccaccacacgcgaaatcgtttcgcgtgccgatgatcgcccgccgccgcgatgatcgcgtattccgtattttacggtgtaagtgtaatcggcgtgtgaagggcggtatacgtttttcagattattatagtcgttggaatgttgattttcattccatacgatgaaaccgatgggacatccggttgattttccttcaaaaatgccggaaaggaactcgactttatcagcctccttacgtggggtggtcaggatagattgtcccggacggcggcgattcaactcttgttgtacaaattcttcgtcgatagtaattccggagggaaatccgtcaattactccaccaactcctttgccatgagactcaccgaaacttgtgagtcgaaagatattgccaaatgaattaaacatagttgtggcttttttaaaattactctatgcaaatataacaaagttttcggtaagaatgttgcgatctcaaaatatcttcaaaaaacgaaccaaattgaaccttttttctcctttttagtttataattgacgattatttaataactaaaccaacaatgtatgaaaaagaatctattgtatttatgggcattaatctgttcagtcgctctctttacagcttgtagcagtgatgatgataatgatataagtggtaataatcctcctgaagaagaagcagttgttacagctcctgatgtagtgggcacttattggggtaatctggatatatcaatgaagccggataattccgatcaggaaacagtgattggcaatgggatagccaagtttatcaccatttcccaggtcagcgatacggaagtaaaaatggaactgaaagaatttgaattgtttctcaacggaacgatcatgaagttcggcgatattgtaatagacaaatgtacggtgaaaaaagagactgacgcctcgactttcacaggtcaacagaatttgactttttcgggagatgctgccgctctcggcacttgtgccaccacagtagaaggaacagtggaaagtggagctctcactatgaatatcaatgtaaaagtagctacattgcaacagaccgtaaaggttacttattccggagtgaagcaggtggaagaatccggtaacgactaattttatctctgaatatatactactgcttttccgcttccatgtctatggatcattcctttttcgatgaaagagttcaattggagtatggcatgtgttttgtttactccggtgatactgcaatagttagtccggttgatgcataggtgctttcgtcggaaatccagtagtaacttcaggcattcttcttctgatatattcttttgggaatgtaattcagcaataactgttacttgtttattaaaacgcatatccgaatccgatattgaggtaaatcggatacattgcaaaagtgatggtatgaaaatcatttttaaagatattattcagtccccaggtgagatcagcatatatattaaggtgtttgaaggctctccatccggcacctgcctgtaatccccattggaaatgtctcaaatcgttcgaaaagtcgtaagtggcaaccttgttgtcggtaaactctactttaggtcccgtcgggttgtcttcacgtaaataaccgtcgtatacatgtcccgaaaattctcttgaaaggatgtatgagaaataaggaccggcttttatattccagcgattgttcagtttataagtagccattagaggaatggtgagtccggcagtgtgtacttttgtttttacgcctcctgtccatacgccgctgattctttcgcctccctgtcccagaatttccataccgtagttctttacggtggcgttggtagtcattgccttattttcgagccgtagtcctacaataacacctaacttgttctgaacggcaaaccattttgttacttctcctccgatactgatagcaagtgtcggattgtaaccattgatagagcgaatctccaccggaagagggaacggagctgtgccgccaatactgaatcccgcttttatttcgtattccagtccgtgaagggcggaacggataagggtcttgtttctatcgacctgtgaatagccgggtagcgttattccgatacaggcaagcaaactaaataggtatggataaattttcatcttcattgtcggtataaagtcgttatggtttaatggtccaagtccgagcggtaaatcaattcagcttcatcaattaataaggtgcttccgatagctccgttgaagtggtctccttccagactggatgtaaatacgatagatatattatattttcccattgtcaatttttccttgtcgatgaattttcccggaagggttgtgaacgggagtttaaagtaagtccattcgtctgtttccttggcgtctttgatacgtgccatagaaaccaggttaggactggtgaatgcattcgtcccatcgagagtggggacggatacgctcgtttcgtacatgatagcatatatatcgcatatatcacgtttcccttcgacaggtttgccgccttcggtgaactggtctcccgccttgtatttatagtaacctgccagataagtcggcacgtgccggaaaggaaggccgaacttcgttgcttgcaggggattgctcatggcattgttcacgtcgaatgaaccgataaacaagttgccggcggcaataggcattccgaccaatccgccaaaaaatccggtactgcgtgtcacgagcgaaaggcattttccatttttcccgtttgctatttggaaagtagggtagtcgtcggctgttttagctactccggtcatggcgtaaccggcgttgccgctggcccattccatgatgactttatcattttccctttccacaaatatgtagtatttctttccgctgatggtatcttcgaaattgtaaattgtagcaagttccgtatcaatgactgatatggcataagtctttttccaaattccgtcagcggctgtcacttgatattcctgcggcgaattgaaattgcgttctgtaccactggcgggtgtgatcgtagctcccgaagtaagtgtaaattccggtgcaagggcggagatattcgttcccggagtgacaaagagggttacggaattattattgatgataggactagtcgtcattgttattcccggtagccggcaacttagaatgtctgcctctgcattgggagcttcgtcgcgaatgcaagaagatgtaacaataaccagcagcaaatagataatcacgtgttttgctttcatttttctacttattctttcagttaaagtttggttctcacgaggagtaataacaatatggaaatttatttgttcattattgaatgtatgataaaaaagaatttcctatttttgtaggaacaaaactaaagaagtgcatgattgaatctgaaagacagcaaattatagagctgataaaaaaagaagtaattccggctattgggtgtacggaacctattgctgtggcactttgtgtagccaaagcagcagagacattgggcgtgaagcccgaaaaaattgaagtgttattgagtgccaatatcttaaaaaatgcaatgggagtaggtattcccggcacaggcatggtgggacttcctattgccgttgctttgggtgcattgatcggtcggtcagcttatcaactggaggtgttgagagactgtactccggaagcggtggaacagggtaaacaatttattgcagaaaaaagaattcgtatttctttaaaggaagatattacggaaaaactgtatatcgaagtaatttgtaagtccggtgacaaaactgcgaaagccgtgatttccggcggacatactacctttatatatatagcgatgaacgaaaatgtactgctcgacaagcagcaggctaccgccgaggaggaagaagaaacctctcccgaactgaatcttcgcaaagtttatgattttgccctgacagctcctctggatgaaatacgctttatcctcgatacagcccgcctcaataaagcggcagccgaacaagcttttaaaggcaactacggacactccctcggaaagatgctgcgtggaacttatgaacataaagtcatgggtgacagtgttttctcccatattctttcttatacttcggctgcttgtgatgcacgtatggcaggtgcaatgatccctgtaatgagtaactcaggcagtggcaatcagggaatatccgccacacttcccgttgttgtctttgccgaggagaatggtaagacagaagaagaacttattcgtgctttaatgttaagtcacctcaccgtaatttatatcaaacaaagtttgggacgtctttctgccctgtgcggttgtgtggtagctgccaccggctccagttgcgggattacgtggctgatgggaggaaactacaaccaagtagctttcgctgtccaaaatatgattgccaatctgacaggaatgatttgtgacggggcgaagccaagctgcgctctgaaagtaaccacaggagtttcaacagccgtattatcagcaattatggcaatggaagaccgttgcgtgacttccgttgaaggaattatcgacgaagatgtagatcagagtatccgtaatctaacaagaatcggttcgcaagccatgaatgagacggataaaatggtgttggatatcatgacgcataagggatgttgaatggaaaattagatcattagaaaagaaaaatggagaatgaaactgtatgagttcattctccatttcttatttatttaccattgggtaatggcggtgaattcttacttatggcagtggccgccttcgcagccacagtcgtcgccacattcattgtcaccacagccgccaccgcaactgtcgcatccgcaaccgcagccttcgccactcatcaatttaatcagttcctgaatttcttcgttagtagcaggacggctttcgatgatttcaccttcaaaaatcaggtcggcaccggccaacgggtgattgaggtcaactactacaacgtccggtttgatttccactacgctggcgttcacacgctggccatcgccagtctgcaaaggtacgatgttaccttctttgatgtgttcgctatcgaatttaccgtcaatttcgaagatatgtttcggaaggtcgataacgtgttgttcgtcatattgtccgtatgctttatctgccggaatggtaaaatcgaatttatcacctttggcaagagaagttatctggttttcgaagtcttcgagagttgtacctaagcctgaaatgaattgaaaaggatgttcagcttttgcttcttcgaacaattctttttctccatcttccattgtatatagtttgtatgcaacggtaatgtacttgttttctgctgtttccatttgatatttttatttctaaattaataaattcctaaaaagataggtgggcaaagatacgaattatttgcttgctctccggtatggggaaggtaaatttcagattattaagtgcttttgtcagaaagacgggaagaagtgtacggttggataatagttgcaaattcaactgttaagtgataaaatagagaaataatgccgctcttatcttacaatttttagtttttgagtgatttttttcttcgatttgtttggagataataaaaaagcccttacctttgcatcacgaaaataaagaaaagaagatatgaatatgttacatacatctattaacctagcagttttgcatattattcgcgtcgtggtggtcccatcaagagcgtgagaaaggttttgtgttgtatgtgttcgtaccataaaagatagaatttagagcctttctcactgatgtgagagaggctctttaattaaaagatagattgaaatgaaaaagcaattacgcagttcgtttagtacgcaaggccgtcggatggcgggagcccgtgcattgtgggcagccaacggtatgaagaagagtcagatgggaaaacccattatagcgatcgtaaattcattcacacagtttgttccggggcatgtacatctacatgaaatcggtcagcaggtgaaggcggaaattgaaaagctgggatgcttcgctgcggagtttaatacaatagctatcgatgatggtattgctatggggcatgacggaatgctttattcacttccttcacgtgacatcattgcagacagcgtggaatatatggtcaatgcacataaggcggatgcaatggtatgtatcagcaactgtgataaaatcactccgggtatgttaatggcggctatgcgtctgaatattcctaccgtgttcgtatcaggcgggccaatggaagctggcgaatggaacggtcagcacctcgatctgattgatgcgatgattaaatcggccgatgaaagcgtaagcgatcaggaagtagcgaatatcgaacaaaatgcttgtcctacttgcggatgttgttccggcatgtttactgctaactctatgaactgtctcaatgaagcaatcggtttggcgttgccgggcaacggaactattgtagctactcacgaaaaccgtacacagcttttcaaagatgcagccaaactgattgtagaaaacgctatgaaatactatgaagaaggagacgagagtatacttccccgtagcattgccacccggcaggcattcctgaacgctatgacattggatatagcaatgggaggttccaccaatacagttcttcacctgttggcggtagctcacgaagcggaagttgattttaaaatggatgatatagatatgctttcacgcaaaactccctgtctctgcaaagtagctccgaatacacagaaatatcatattcaggatgtaaaccgtgccggtggtatcatcgctattatggatgaactggcgaaagccggtttggtggatacttccgttcgccgggtagatggaatgacgctgggggaagctatcgacgaatattcaatcaccagcccgaatgtgagcgaaaaagcaatcaggaaatattcgagtgcagctgcaaataaatttaatcttgtactcggttcgcaaggtatgtactataaagagttggatacagaccgcactaatgggtgtatccgtgatttcgaacacgcttatagcaaagatggcggactggcggtattgaaaggaaacatagcacaagatggttgcgtagtaaaaacagcaggtgtggacgaaagtatctggaaattcaccggacctgccaaagtctttgattcgcaagaagcagcctgtgaaggtatccttgggggccgagtcgtcagtggcgatgttgtcgtcattacgcacgaaggtccgaagggtggccccggtatgcaggaaatgttgtatcctacctcttatataaaatctcgtcacctcggcaaagaatgtgctttgattaccgatggacgtttcagtggtggaacttccggattgagtatcggacatatatctcccgaagcggctgccggaggtaatatcggaaaaattgtagacggagatattatcgaaattgacattcccgcccggacgattaacgtgcgactaacagatgaagaactggttgcacgcccgatgactcccgtcactcgcgaccgttacgtgccaaagagtctgaaagcatacgccagcatggtaagttccgccgataagggagcagtgagaatcatcgactgatattcatcttcaatataaataaagaatgagtaaagacttaataacaggtgcggaagcattgatgcgttccttggaacatcagggagtgactactatcttcggttatcccggaggttctatcatgccggtattcgatgctttgtacgatcatcaaaatacattgaaccatatcttggttcgccacgaacagggagctgctcatgcagcgcaaggttttgcccgcgtatcgggtgaggtaggtgtttgtctggtgacaagcggtcccggagcaacgaatacaatcaccggtattgccgatgcaatgatagacagtacacctatcgtagttattgccggacaggtagggacgggttttctcggaacagacgcttttcaggaagtcgacttggtaggtatcacccagcctatcgctaaatggagttatcagattcgccgtgcagaagatgtagcttgggcggtggcacgtgcattctatattgcccgtagcggtcgtcccggtccggtagtattggacttcgccaaagatgcacagaatgcaaagacaaaatacgagccggcgaagctggattttatacgtagttatgttccggtgcctgataccgatgaagattctgtgaaggaagccgccgaactgataaataatgccgaacgtccgcttgtattggtaggacagggggtagaactcggaaatgcacaaagtgaactgagagcctttattgaaaaagctgatatgcctgccggatgtacattgctcggactttccgctttgcctaccgatcatcctttgaataaaggtatgctgggaatgcatggtaatttaggtccgaacatcaataccaacaaatgtgatgtcctgattgctgtcggtatgcgttttgatgatcgcgtgacaggtaatctggctacttatgccaaacaggcaaaagtaatccattttgatatagatcctgcggaagtaaataaaaacgtgaaagtagatatcgctgttctgggagattgcaaaaatacattagctgccgtaaccggattactaaaagagaacaagcataccgaatggaacgatagttttaaagaatatgagaaggtggaggaagaaaaagtaattcgtcccgaactttatccggctacggattcactgaccatgggcgaagtagcacgtgccgtaagtgaggcaacccaccatgaagcagtattggtgacggatgtcggtcagaaccagatgatatctgctcgttactttaaatattcgaaagaacgcagtattattacttccggagggcttggaacaatggggttcggacttcccgcagctatcggagccactttcggtgcaccggagcgtaccgtctgcgtgtttatgggagacggcggacttcaaatgaatatccaggaactcggaactatcatggaacagaaagctccggtgaaaatcatctgcctgaataataacttcctcggaaacgtgcgccagtggcaggctatgttcttcaaccgccgttattcatttactccgatgttgaatccggactacatgaaaatagcttccgcatatgacattccttccaaacgtgtctattcccgtgaagaattgaaagtggctatcgatgaaatgctggcaacggacggaccgttcctgcttgaagcctgcgtaatagaagaaggcaacgtattgccgatgactcctccgggcggttcggtgaatcaaatgttgttggaatgttaggggaagttgagagttcgtatttaaaatttaaagttatgagtgataaaacattatatacaatcattgttcattctgagaatattgccggattgctgaatcaggtgacggctgtatttacccgtcggcagatcaatatcgaaagtttgaatgtttctgcttcatctatcaaaggtgtgcataaatatacaatcacagcttggacagataaggacactattgagaaggtagtgaaacagatagagaagaaaatcgacgtgattcaggcgcattacttcacggaagatgaaatatatttccatgaaatcgcattatataaggtgtctactcctgcttttcaggagaatccggaagcgtccaagttaatccgtcgatacaatgctcgtatagtggaagtaaacccggtgttttccattgttgagaagaacgggatgagtgaagatataacctcgctttacggtgaactccgggtattgaattgtgttttgcagtttgttcgttcggggcgtgtggcgattaccaccagttgttttgaacgggtgaatgagttcctcgacggacgggaggcaaaatataacgaaagtaaaaacctgcaggaataatgagtgaagaaaataaaataggaacttatcagtttgtggcggaacctttccatgtagactttaacggtcgcctgactatgggggtgttgggaaatcatctactgaattgtgcaggttttcatgcaagtgaccgtggctttggtattgcgacactgaacgaagataactacacatgggtgctctcgcgcctggctgtagaattagacgaaatgccttatcaatacgagaacttctcggttcagacatgggtggaaaatgtctatcgtctgtttactgaccgtaatttcgctattattgataaagatgggaaaaagatcggatacgcacgttccgtatgggcaatgattagtctcaatacccgcaaaccggcagatttgctgaccttacacggaggaagtatcgtagactacgtatgtgacgaaccttgccctattgaaaaaccttcgcgcatcaaagtgacgagcgaccgaccggtagctaccctgacggcaaagtacagtgacattgacattaacggtcatgtaaatagtatccgctatatcgagcatatcctcgatttgtttccgattgacttgtacaagacgaaacgaatccgccgctttgaaatggcatacgtagccgaaagttatttcggtgatgaactctcttttttctgcgacgaggctaattcaaacgagtttcatgtagaagtgaagaaaaacggtagtgaagtcgtttgtcgttcgaaagtgatatttgaataacatagaatataaaatcaattaataacgggtggcgtaagtccccaaaactaaaaacaaaaaagaaaatggcacagttgaattttggcggtactattgaaaatgtagtaatccgtgacgaatttcctttggaaaaggctcgtgaagtattgaaagatgaaacaatcgctgtaatcggttatggtgtacaaggtcccggtcaggcattgaacctgcgtgataacggtttcaatgttatcgttggtcaacgtccgggaaaaacatatgataaagcagtagcagacggctgggttccgggagagactttgttcggcattgaagaagcttgcgagaaaggtactatcgtaatgtgtctgttgtctgacgcagcagtaatgtctgtatggcctactatcaagccttatctgactgcaggaaaagctctttatttctctcatggttttgctatcacttggaacgatcgtacaggtgtagttcctcctgctgatatcgatgtaatcatggtcgcacctaaaggatcaggaacttcattgcgtactatgtttctcgaaggtcgtggcctgaactcttcttacgctatctatcaggatgctacgggcaaagcttatgaaaagacaatcgctttgggcattggtatcggttctggttatctgttcgaaacaactttccaacgagaagctacttccgatttgacaggtgaacgtggttcgctaatgggtgcaatccaaggtttgctgttggcacaatacgaagtattacgtgaaaacggtcacactccttctgaagcattcaacgaaacagtggaagaactgactcagtccttgatgccgttgtttgcaaagaacggtatggactggatgtacgctaattgctctactactgctcaacgtggtgccctcgactggatggggcccttccacgatgctatcaaaccggtagttgaaaagttgtatcacagtgttaagactggtaacgaagcacagatttctattgattccaactctaaaccggattatcgtgagaaactggaagtggaactgaaagcattgcgcgaaagcgagatgtggcagactgctgtaacagtacgcaaacttcgccctgaaaataactaatcagattgaatatatatgtcgtaaaaagacgggaagaaacactctttccgtctttttttcaaaatatccccgtctttatagagaaataatgcaagtttgttgttatctttgtggcaacaaaataaaacaagttgtaataatgaagaactactataaaaatgaaataccggaataagaacgtaaaatatatatatttcctatatcccaatatctgtttataagtgtctgttagaccaacagtcctttgctggtaagaaaaagccgattgatagaatatctcgaatttttaattccaagacttgagtctgatgtggcgaaagataaaaagggtatataagacagaaaacattgtttgttttgtttgtgttaaaaaagttctttctcgtgagaaaaggggctttgataaaaagaggattactcataatcctctttttttatgaatgacatcaatctcttataaaaaggatgcttggtaagtgtgacggcatctccgagaatgaccagtttcatacgggcacgggtgatagccacgttcatcctcctcaggtcgttcagaaatcctatttgtccgtcctcgtttgcacgaacaaggctgataaagataacatcccgttcttgtccttgaaagccgtctactgtgttgaccgtgataaggctacggaaaggacgtagaaagctgcttactttaattttactccttagatattgtacttgtgctttataaggcgaaatcaatccgaaatcaatcttttcgtccaatattcttgcttttccgatccggttgatatatgcctccaattcctggagaagcaggttggcttcctgtttattgatgcgtccgaaactctcacctacaaattcctcgtgaaaatccatttcagaggtatctatccagttcataggcgtgtcgaaatcgagaatgctccggtaacgcacttccggtgcagcttccaattctccgtggtaaaaccattcggatggaaaacgcatgattgattcgtgcattcggtattgcattttgagcagtgagacagcagaaggtttcttatgtaccactttctccattagtgtgtgatccagtccgctacgggcggcttcgatacatttgatagtaggagggagttgacagtggtctccggcaagaatcactcggtcagctttgcgaatggcaatccagcaggctgcttcgagtgcttgggcagcttcatctataaacagggtagggaaacgtcggccgttgagtaggcggtggttactactgaccaatgttgaagcaattacacgggcactgtcgaaaaggtcggtgttaatttgtatttccagttcagtagcacggtcacggaggcggctcatgcggctgcgcataccctcccgttcggaataactacctttgcgcatccggctgcccgtttcacggattgattttcggattccccaaagctcgggataggcgggatgactttcgaaacggcgctcgtaagtaaatgataacattttatcatttactcgtgtagggttgccgatgcggagaactggtacgccacggtctaccagtttttcacttatccagtctacagcagtgttgctttgagcgcagacaagtacttgcggttcccggtgcagcgtttcataaatcgcttcgacgagcgtggttgtttttcctgttcccggagggccgtggacaatggcgacatcacgcgtgcataatactttgttgacggctgtctcctgtgtactgttcagccatggaaaacggacagggtataattcacggaatccgggattttgcgttcccagcaagatatcacgcagttctgagaggcggttacctttggcgcggattgcatcttctaatgcttcgaacattgtccggtaggatgtttcatcaaaataaagttgtatacctaatgaactgtccgcttgtaactctataactgcccctgcaccaggtaaaaccactactattctttcttcgtctgcgtaactgacggtagcaataaaattcatatatttcacttttccatcgaaagactggtggaaaaaacagacggggcgaccaaactcgaaagagtgttctatctctttattttcggtccgtgtaatatctattacaagttgattcagagaattgtagtagcttcgaccgggagagacgggataccagcacagaccgcgtttcactttacgggcaatacccattgtttcggtttgtcgcttgaattcctctttctcgtattcatactccatgcgtagcaggagttgctggtactgaaggtcggagaccgggcttttcgaattattattcataataagtgcaaaggtaacgaatcttctttttggatagaaaaaatatttcattttgttaaacaatcctcgaacgccgttcgttattttaatagatagactaaaaaaacaaaaagtaatatggtatatgatatgactatgctagaagcattttacagagcctataaagggaaagtagagcatgtgcgggggatcttgaaacgccccctgacgttagccgagaaaattctgtatgcgcatctttatgatgccgccgatgtgaaagactacaagaggggagaagactacgtaaactttcgtcctgaccgcgtggctatgcaggatgcaactgcccaaatggctttgctccaatttatgaatgcgggcaaggaaaaggtggctgtgccttctaccgtacactgtgaccacttgatacaggcctataagggcgcaaaagaggatatacttactgcgactaaaacaaacgaagaagtgtatgatttcctccgcgacgtatcctcccgttatggcattggtttttggaaaccgggagcgggtatcattcaccaggtagtactcgagaactatgcttttcctggcggcatgatggtaggaacagactcacatacacctaatgccggtggtttgggtatggtggctatcggtgtaggcggtgcagatgccgtagacgtaatgacaggtatggagtgggaattgaaaatgccgaaaattataggtgttcgtctgatcggaaaactaaacggatggacatctccgaaagatgttattttgaagctggcaggaatattgaccgtaaagggaggtactaatgcaatcattgaatatttcggtccgggaaccgaatcactttccgctaccggaaaagctactatctgtaatatgggagcggaagtaggagctactacttcacttttccctttcgacgggcgtatggcgacttatttacgagctaccggaagagatcgtattgtcgatttggcagagtctgtggaagctgatctccgtgccgacgaagttgtgacggatgaacctttaaaatattacgaccgtgtcattgaaatcgacctgtccgaacttgaaccttatattaatggacctttcacgccggatgcggctactcctatttccgagtttgcggaaaaagtattgttgaacggttatcctcgtaaaatggaagtcggactgattggttcgtgtactaactcctcttatcaggatttgagtcgtgctgcttctttggcaaaacaggtagcggaaaaaaaactgagtgttgcttctccgttgattgtaaatccgggctcagaacagattcgcgctaccgccgaaagagacggaatgattgagacttttgaacagatcggtgcaacgattatggcaaatgcctgtggtccttgcattggtcagtggaaacgtcataccgatgacccgacacggaaaaattcaatcgtgacttcctttaaccgtaactttgccaagcgtgcggatggtaatccgaatacttatgcctttgttgcttctcctgaattgacaatggcactgactattgccggcgacctctgtttcaaccctttgaaggacagattagtcaatcatgacggtgagaaagtgaaactatccgaacctgtgggagacgaactcccgatgagaggatttacgccgggtaatgtcggatatatcgcgccgggtggagctaaaacggaaatcaaggtgaagtcggactcacagcgcctgcaacttttaacaccttttcccgcttgggacgggactgatttgcttaatatgcctctgttgataaaagcccagggtaaatgtacaaccgaccatatttctatggcgggaccatggctccgtttccgtggtcatttggaaaatatctcggataatatgttaatgggagctgtcaatgtcttcaatggcgaaacgaacaaggtctggaaccgttctacaaatacttatggaacagtctccggaacggcaaagatgtataagtccgaagggatttcttctattgtagtcgctgaagaaaactatggagaaggttccagtcgtgaacacgcagcaatggagccgcgctttctgaatgtccgtgtgatcctagccaagagtttcgcccgtattcacgaaacgaatctgaagaagcaaggaatgcttgccattacttttgttgacaaggcggattatgataaaattcaggaacacgatatgctttccgtcactggtttggtagactttatgccgggacataatctgacagtcgttcttcaccacgaagacggaacaaaagaaagttttgaagtgcaacatacatacaacgaacaacagataggttggttccgtgctggttccgccttgaatgcgagataaaattgaagtaaatctttttaaaactgttatttataaagaaaaaagaaatgagcaaaataaccatacaaaaagatagtacgctattagtgcctgatgtgcctaccgtaccttacattacaggagacggggtaggggctgaggtgactccttctatgcagattatagtagatgcagccgttcggaaagcttatgggggtaaacgtcatattgaatggctggaagtgccggctggagaacgtgctttcaatgaaacaggttcgtggcttccggaagaaacgatgcaggcatttcaggaatatctggtaggaatcaaaggtccgttgactacacctgttggcggtggaatccgttcgttgaatgttgctttgcgacagacacttgatttatatgtctgccttcgtcctgttcgttggtatcagggagtacagtctccggtgaaagctcccgagaaggtgaatatgtgtgtgtttcgtgagaatacggaagatatttatgcaggtattgagtgggaagcaggtactccggaggcaaagaagttttataagtttttgaaagatgaaatgggtgtgacgaaagtccgttttcccgaaacgtcttctttcggtgtgaaacctgtttcacgcgaaggtacggaacgtcttgtgcgtgctgcatgtcaatatgcgctcgatcatcatctgccttccgtgacattggtacataagggaaacattatgaaatatactgaaggaggattcaaaaagtggggttatgagttggcgcaacgtgagtttggtgacgctttggcggatggtaggctagtgataaaggactgcattgccgacgcatttttgcaaaatacactgctcattcccgaagaatattcggtaatagccactttgaacctgaacggagattatgtttctgaccagttggctgcaatggtaggtggcataggcattgctccgggagcaaatatcaattataaaaccggccatgctatctttgaggcaacgcatgggactgctcctaacattgcaggtaaaaacgttgtgaatccttgttcgatcattctttcggcagtgatgatgctcggatatttcggttggacggaagctgccgctcttatcgaaaaagctcttgaaaatagttttctggaagcccgtgccactcatgatcttgcccgttttatgccgaatggaacctctctctcaaccacagatttcacccgtgaaatagtggaaagaatcgaaaaataagaataatgattaaaaacatacgaatatgaagaaagagtacctgatttacaagctgtccgaagaaatgaaggaagctacccggattgatacagcattgttccccaagttcgacgtgaaacgcgggctacgtaatgaagatggcacaggtgtactggtaggtctgaccagaattggtaatgtagtaggctacgaacgtattccgggcggcggactgaaaccgattcccggcaaactgttctatcgcggttatgatgtggaagatatttctcatgcaatcatcaaagagaaacgtttcggttttgaggaagtggcgtacctgttactttccggtcgtctgccggacaaggaggaactagcttcattctgcgaactgattaatgataatatggcactggagcagaaaacgaagatgaatatcatcgagttggaaggtaacaacattatgaacatccttgcacgcagcgtactcgaaatgtatcgcttcgatccggatgcggacgacacttctcgtgataacctgatgcgtcaaagtatcgaccttatttcaaaattccctaccattattgcttatgcttataatatgctgcgtcatgctactttcggacgttcgctgcatatccgacatccgcaggagaaactctctatcgctgaaaacttcctgtatatgctgaaaaaagactataccgaactggatgcacgtactcttgacctgcttctgattcttcaggcagaacacggtggtggtaataactcgacttttactgtccgtgtcacttcttctaccggaacagatacttactcggccattgccgcaggtatcggttctctgaaaggcccgcttcacggaggtgcaaatattcaggttgctgatatgttccatcatttgcaggagaacatcaaggactggacaaatgttgatgagattgacacctactttactcgtatgctgaataaagaggtttataataagaccggattgatttatggtattggtcatgccgtttacacgatttccgacccgcgtgcacttttactaaaagaattggcacgtgatctggcacgtgaaaaaggcaaggaacgtgagtttgccttcctcgaacttttggaagaacgggcgatcgcgactttcggacgcatcaagaataacggcaagacagtatcgagcaacattgacttctattcgggctttgtgtatgaaatgatcggattgccgcaggaaatcttcactcctttgtttgcaatggcacgtatcgtaggctggtgtgcccaccgcaatgaagaattgaacttcgaaggcaaacgtattatccgtccggcttataagaacgtgcttgatgatctggcttatatcccaataaagaaacgctgacaggaaacaatccttttattgaatagataagtgtagtccccaggtgtatattccgatcatttccggaggtatgcctggggataagtgttttttagagaaaactttcagtgtgtcatcgagtttttatttaaggagttttgcgttgcaattttcctcttttttgttacttttgcacattgtaaaagaatatctgtatgactatgaatgcatttaatctgtttttgggcataatgagcctgatcgctctgattgtttttattgccctttactttgtgaaagccggatatggtatttttcgtaccgcttcgtggggtgtggctatttccaataagttggcttggatattaatggaggcccctgtatttttagttatgtgttggatgtgggtgcattcggaacgccgttttgatcccgtcatactgatgttcttcatattcttccagattcattatttccagcgtgcattcgtttttcctctattgctgaccggaaagagtaaaatgccgttagctattatgtcaatgggcattctttttaatttgttgaacggatatatgcaaggacaatggatatttcatcttgcgcctgaaggaatgtacggcattgattggtttatgtcaccatggtttattctcggaactctgcttttttttactggtatgctggtgaactggcactcggattatatcatccggcatttgcgaaagccgggagatacccgccactatctgcctcaaaaagggatgtaccgctacgttacttccgccaattacttcggcgaaatagtagagtgggcaggctgggcgatactcacctgttcactttccggacttgtgtttctttggtggacgatcgctaaccttgtcccgcgtgccaacgcaatctggcaccgttaccgcgaggaattcggtgatgaggtgggaaataggaaacgtgtattcccttttctgtattaaggctatcttttgacaaaatatatcatactactatgaaatcaaagttatttaccccggtcacttttggacctttgacacttcgcaaccggaccattcgttcggcagcttttgaaagtatgtgtccgggaaacgccccttcacaaatgttgttggattatcaccgttcggtagccgcaggcggggttggcatgacgacggttgcttatgctgccgtgacacaaagcgggctttcttttgaccgccaattatggttacgatcttccataattcccggtttacgcgaagtgaccgacgccatacacgatgagggtgccgcagcaggtatacaaatcggtcattgcggtaatatgtcccacaagaacatttgtggagtaactcctatctctgcttcttccggtttcaatctttactctccgacctttgtgcgcggaatgaggaaagaagaacttcctgaaatggcgcgtgcttatggaaaggctgtcaatctggctagagaagctggtttcgacgctgttgaggttcacgccggacatggatatctgattagccagttcctttccccttacacgaatcaccggaaggatgaatacggaggttcgttggaaaaccggatgcgttttatggatatagtgatgaaagaagtgatgaaagctgccggtagcgatatggcggttcttgtgaaaatgaatatgcgcgacggtttcaaaggtggaatggagtcggaggaaacgatacaagtagcccgacgcctgctcgaactgggtgctcacgggctggtattgagcggtggtttcgtcagtcgtgcgccgatgtatgtgatgcgaggggcgatgcctatccgttctatggcttattatatgaattgctggtggctgaaatatggcattcggatgttcggaaaatggatgattccgactgttcctttcaaagaggcatattttctcgaagatgcgctgaagttccgtgaggcccttccgggtgctccgttaatttatgtaggcggccttgtttctcgtgagaaaattgatgaagtgctggatgccggctttgatgctgttcaaatggcacgtgccctgctgaatgaaccgggatttgtgaaccgtatggcacgtgaagaccgtgcacgttgtaattgcgggcatagcaattattgcattggccgtatgtacacgatcgaaatggcttgtcataaacatttgaatgaagaactgcctccttgtctgcaaaaggagattgaaaaattggaaaaacaatgaatgaagtgaaatgggcgatcattaccggagctgacggaggcatgggaacggagataacccgtgccgtggccacagccggctatcatgtcataatggcttgttataacccgcaaaaagcggaaaacgtgtgccaacgtttaatgaaagaaaccggaaatccgaatttggaagtactcgctattgatctgtcttcgatgcactccgtagcctcttttactgatcggattttggaacgtaaactttccatttccttgttgatgaataatgccgggacaatggaaaccggattttctattacgaacgatggatttgaacggacggtcagtgtaaattatgttggtccttacctgctgactcgtaaattagttccgactatggcatccggagcacgtattgtaaatatggtttcgtgtacgtatgcaatcggccgtcttgattttcctgatttctttcacagggggaaaacgggaaacttttggagaatacctgtttatagtaacacaaaattggctttgttattatttactttcgaactatccgagcaacttcgggagaaaggaatcaccgtcaatgctgccgatccgggaattgtctctactgatatcatcacgatgcataagtggttcgaccctctgacagatatattcttccgtccttttattcgtaagccgaagaaaggagcttctacggcaattggtctgttgctggacaaaaaagaagccggtgtgacagggcaactctatgtcaataatcaccggaaaagcttatccgataagtatgtgaaccatgtacagaaagagcagttgtgggaaataacggagcgtttgctggcgcaatggttggagtaggatttttttctctttttatttaatttatctagtaattacttatatataggtattgtgtatatctatatgtttagtttttgttgtctaatttttaccaatagatagggattgttttgcactcctgtttctacttacctttgcatcgcttttaaagtaaatgaataggtataaagtaaaaaggagatgattaataaatgttttttggtttttctagtattcttattttctgtatcagcatattcacagcacgagcgtcattatactagtatgatttcgggcagagtgatatctacagaaaaggaggtcgtagattttgcgacggtctatctgaaaggaacgaactatggcagttatacgaacgaaaagggaatttatcacttgaaaactgtggaaggtgaatatatacttgtcgtttcggctgtaggttatcaaacagtagaaaagaaggttaaattagctaaaggagaaaggatacaggtcaatgtcaccattgcaccgaaagtgaaagagttgggagaggtcgtagtaacaacctccggagttggccgggtaaataagtcagcctttaatgcggtagccgttgacgcgaagaagttgcataacagtacacagactttagccggcgcactgactaaggtgccgggggtaaaactccgtgagtcaggcggagtaggatcggatatgcagttgtatattgacggttttagcgggcggcatgtgaaaatctttattgacggaataccgcaagaaggggccggtgctgcattcgatttgaataatgttcctattaattatgcagatcgcatagaggtgtacaaaggtgtggttcccgtaggattcggtacggatgctattgggggagtggttaatattgtcactaacaaacaacccgggaagtggtttctggatgcttcttattcttacggttcatttaacactcataagtcatacgtacgtttcggacaaatattcaagaatggttttatgtatgaagtgaacgcttttcagaatttttcggataatgattattatgtagatacgtatgtacgtgactttgaaatcagagaagatggaagtgtgcgttttccgccactcgacaaaagtaagatttaccatctgaaacgtttcaatgaccaataccataatgaagctgtgattggaaaaatcggtgtggttggaaaaaaatgggcggacagattggctctgagcttcaattattcctatttctataaagagatacaaactggtgtttatcaagatgtcgtgttcggtgaaaaattccgcaaaggacattcattggccccttcgttggaatactacaaaaagaacttattcgtgaagaatttggatttactgctgactgccaattataaccataacctcactaataatgtcgataccgcttcacgggcttacaactggcgtggtgagttttacgaaaggggcagccggggagaacagtcttatcagaatagtgaatctaaaaacaagaactggaatggaacactgaggatgaattatcatatcggagaggcgcatacgtttacttttagccatgtggtaagtgattttgaacgtacaagccgctctatcataggtgcttcttccaaatttacggattttagtattcctaaaattacgcgtaagaatgtcagcggtctttcttatcgcctgatgccgtcggacaaatggaatatttcggcatttgccaaacattaccggcaatacaacaaaggtccggtgtcacagaatacggatggcataggtaattatataaatttatccaatacggtaagtgctttcggatacggtgctgcgggtacatattttttatggaaagattttcaggtgaaactttcttatgaaaaggcttttcggcttcctacgacagacgaactgtttggtgatgaagacttggaagccggtaaagtaaatctgaagccggagaaaagtgataatctgaatctgagtttcagctataattatcagtttggcaaacacggggtgtatgccgaggccggcttgatatatcgggatacgaaagattacataaaaagaggattggatgtattggggggaacaagttacggatactatgagaatcatgggcatgtgaggactaaaggatataatttatcgctgctttatagcttctcgcattggttcgatgtaggcggtacatttaattgtattgatacccgtgactatgaaaagtacctggcaggcacctctttgcaggaaagtatgcattacaaggtgcgtatgccgaatctcccttatcgttacgccaatataaatgctaatttccattggaatgacctgtttattaagggaaatgtactgacgataggctatgatagctactggcaacacgatttccctctttattgggagaatatcggcgataaagattcaaaaaacatggtgccggaacagttttctcataatttatccttgtcctatacaatgaagaacgggcgctataacgtatcatttgaatgtcagaatttcacggatgcgcaactgtttgacaatttcagcctacaaaaggctggacgtgcattttatggaaagttcagagtgtttttcggtagataataagattaagtttttagtataaatcaataataaagaatatatgaagaaaaagtttttgctgtgtgtgtttgcggcaaccttttgtttgagtggtggtgtgtttgttgcatcttgcgatgatgttgataatccggtggataacccttcgactgacggagaaacagcctatgtagtggctgctacagttggtgaagcaagttatttggtggcagttagttctcttgatgaaggaacagtatcaacaaaaggaaaaggtaccgaagtgattggcggtacgtattgggtatataaagggttggattatgtatttgctttagtttataataaaggtggtgccggtacgggagcttcttattatttgggagcagatggtaaaatgaaagaaaaatatacatatacctttaatcgtatcacatcgtatggaacatggggagacaaggtggtgactgtttctaccggagactcaagtcagaaagacgatgagcagaatgtagctcaggctttgttgtttaattatctggacgcaactgacggttcgcaagaagaaggcacattgatcgccgaaaatttcttgggtaatggtgaaaaagttacttgggcaggattggtagaagctaataataaaatttatacttctgtcattccgatgggtatgagtaagtacggtattaaggcatggccggacaaagtaaccgaccaagaacttatcactaaagctgatggcggtagtggtagtggtgcttatacggctggcgtaattccttccacacaatatccggacaatgcttatgtagcaatttatagtggtactaacttcaacgggacacccgtgattgctacgactgataaaatcggttatgcatgtggtcgtatgcgttcacaatattatcagaccatttggcccgctgataatggcgatgtgtatgtgttctctcccggatatgggcgtacggcagtttcatcttctgatttgaagaaagtgacaggaaagaaaccctcaggcgtaatgcgtatcaaagcgggtgcaacggatttcgatccggattactatgtgaactttgaagagataggcactaaacatcctattttccgttgctggcacatctctgaagattacttcctgcttcaattgtataaaaaaggagcggatgatatgattcatggcggtacaagtgcggatgtcagcgagttggctatttttaaggcagaagataggacgattattcctgttacgggtttgcctgctgaaggaaagtttggcggcgagccttatggagaaaatggctatgcttatatggctgttactgtgactactggtgaacaccctgctttctataaaattgataccaaaacgggtaaggctgtgaaaggtttgacggtagaggctgacgctatcactacagtaggtaagatgaaatatccttcaaagtaacaaatacctgttaaatagaaaatagttctttttagatgaaagcctgccgagcggaaagctttgcaggctttttcaagaaatagtagtaataaatagattatgaaaaaaatatttgaaaagatacatttgtggctttctgtccctttcggattgataatcacccttatttgtttttccggtgctatgttggtattcgaggatgaggtgaatgagttgttccgccacgaactttattatgtggaaacagtgggagaagtcccactccctatcgaacagttgcttgaaaaggtgacagctacattgcccgacagtgtttctgtgactagcgtcagcatttcttccgattccgagcgtgcttatcaggttaacctttccaaaccacgtcgtgcgtcattatatgtagaccaatatacgggtgaagtaaaagggaaaagtgagcgtagcggcttttttatgtttatgtttcggatgcaccgttggttgctggatagtatgaatccgggtaatgaagggatcttttggggaaagatgattgtgggtgtcagcacgctattattcgtttttgtgctgatttcaggaattgctatctggtggccacgtacacgtaagacactgaagaacagtctgaaaatatcaacaaaaaaaggttggaagaggttctggtatgatctgcacgtagcgggaggaatgtattccttaatctttcttttagctatgtcgttgacggggctgacatggtctttcccgtggtatcgggccgctttctataaagtgttcggtgtggaagtgcaacaacgggctgcttatgggcaggagcggaaaggtggttctcaaaagggagataccgagctggctttgcgtgatggaagaaaagaagggaataaggaacattcggaaaacggtcacaattatatacactctgtcacttcacctttcgtctattggcaagaagtttacgataagctaagccgccagaatccggaatataaacaaatcagtgttgcttccggtacggcgagcgtctctttcaaccgtttcggaaatcagcgtgcagctgaccgttattctttcaacactgataatggtgaatttacagaaacaaatctttatcaacatcaggataaatcaggaaaaattcgtggttggatttactctgtacatgttggcaactggggaggaatgttgactcggattcttacctttattgctgctttgattggtgcctcattgccgttgaccggttattatttatgggtaaaaaaacttatgaataagagaaaacgtgagaaagctatttctttatcttccgttgaggcgagaaaaatagcataaagtggccatacgaaaagtctggatattgaatgataaaaagagcggtggatgaattggaaaaaccaattgtccaccgctctctatcttatactaatataaaaaagaatttttaagaagaatgagttagatagaaagctctttcaatacattgacaagatctctcttaataggcttgtcgttcttgatagccttgctgaacggcacgtaaacgatttcatcatgttcgattccgatcataacgttgcgctggtcctccatgattgcgtcgatcgctgccgcacccagacggcttgccagaatacggtcatgagccgtagggctaccaccacgctgcaagtgtcccaagatagttacgcgcacatcgtattgcggatattcattctttacacgttcagcataatgcatggcacctccggtcagttcactttcggccactaatacgatactgctgttctttgatttgcggaatccgttcttgataaattcttccagttggtctacttccgtactgaattccggaataatggcagcttctgctcctgaagcaattgctccgttcaaggcgaggaaacctgcatcacgtcccatgacttcgacgaagaacaggcgctcatgtgaagtggctgtgtcgcgaattttgtccactgcatccagaatcgtattcaatgcggtatcatatccgatggtcgtatctgtaccgtagaggtcgttgtcaatagttcccggaagtccgatacacggaacatcaaattcctgtgcaaagatacgggcacctgtcagcgaaccgtcaccaccgatgataaccaaggcatcgatgccctctcttttcatattatcgtaagccaactggcggccttccggagtagtaaactccttacaacgagctgttttcagaatcgttccacccagttggatgatattacttacattctgacttttgaactctttgatttcgcctgttaccagacctttgtatcctctgtatatacctttaacttgtaatccattataaatagctgctcgtgtcactgcgcggatagctgcgttcatccccggagcatcacctccggaagtcaaaataccgatacacttaactgttcccataacttaaatatttgtttgacgtggcaaatgtacaataaaaagttgaaagcgatgttccggaagttctttttcatgtgaagaaaacattaaaaatactcaaattggtctttcttactttctttttattcttttgtggcaagaaaactgaaagaatattgacacattgtcgctctctaaaatcttcttcttcggattgcttctgattaaaaactaagatattaatgcttgaatgtgtttgtatattttctccattaaccatttgggagtagaagttgctccacacaccccgatagatgttacattttgaatgagcgaaggatcaatctcctcctcattatctatcagatgagagttggggtttaccttcaaacattcttcaaacagcatttttccgttcgaacttttcttgccactgacgaaaaatatcaaatcgtgcgacgctgcaaactcccgtagcttgggcatacggttggcaacctggcgacagatcgtgtcataatattcaaaagtggtttccggcgaaatgttctgtttgatgtattctacaatttcctgaaactcatccaatgacttcgtggtctgggaaaaaagccggatactcttactcaaatccagttttttcgcttcttccgctttttcgatgacgatcgcttttccgtccgtctgtcctaccagccccaacacttcggcatgacccgttttgccgtatatgacgatttgtttctccggatgttcgttttccagaaattcctgtttgatccgtttctgtaatctgagcactaccgggcaagttgcatcaataatttctatattgttttcgcgggcaataatgtaagtctccggcggttccccatgtgcgcgaagcaacaccttggcattccgtaacttcttgaattcctcgcggttaatagtgattagtcccattgttttcagcctgtctacctcccggctgttgtgtacgatatctccaaggcaatagagcgtttcaccctttgccagttcctcctctgctttgtgaatggccgtcaccacaccgaaacagaatccggaaccttcgtctatttctactttaatcataaaatttgatttgagagtgataaggggcttcctactgaaaactagttggtaactttattaaattgatcaaacagccattctttctgttgtgcaatggtcagattcgtattatccagcagcaaggcgtcatccgctttgcgtaacggactgacatcacggtgctggtcgatgtaatcccgttgtttcacattctccagaatctcgtcgaaactggcttcctgtcctttcgctttcagttcgtcatagcggcgccgggcacggatttccggcgtagctgtcacgaatattttcagttcggcatttgggaaaactgttgttccgatatcgcgtccgtccattacaattccttttttagctcccatagactgctgttgggctaccatttctttgcgtacaaagtcgagtgcactgatcggactgaccttggaagacacgctcatcgagcgtatcttatcttccacattaacatcgttgagataggtttcggggcgtccttccttgttcagtcggaaagagatatgaatattcccgatttcttttttcagtttctccgtatcgatgatgtcgccgtcgaaaataccattctctatgctgtataaggtaaccgcgcgatacatggccccgctgtcaatgtaaatataccccacttcacgcgctaaatcctttgccatagtacttttcccgcaagaggaaaagccgtcaattgctattgttatctttttcatattcagttcatctgatttgtccgccaaagatacgtttattttgaaaatcagccatgcgtttcccctataaaagcagtggaataagtctgaaagaattaaaaaagttaaaaagtcggataaaaagaggaggagagaagaagggttatctgaaaatgtactatatttgcccagagacacatagatagacactttttttattaatcattatattaattatttttatggaagttaaaaaatcacccaaagccgacctggaaggcagaaagtctacatggttgctcgttggttacgtggtagtattagctttcatgttcgtggcgttcgaatggacccagcgtgacgtgaagattgatacaagccaggcagtagctgaccttgtgtttgaagaggaaatcattcctattaccgaaactcctgaacaacaggctccaccaccacctgaagctccgaaagtggctgaattgctggagatcgtcgacgataaagccgaaattgatgaaacaacaaccattatcaatgaagataatgctgctccggtagaagtaaaatatgtaccggtacaggttgttgaagaagagccggaagaacagactatctttgaagttgtagagaacatgccggacttccctggcggacaagcagctttgatgcagtatttggctaagaacatcaaatatcctactatcgcacaggaaaacggaactcaaggacgtgtaatcgtacagttcgttgtcaacagagacggtagtatcgtagatgcgaaagtggtacgtagcgttgacccgtatctggataaagaagctctccgcgtgattaacaccatgccgaaatggaaacctggtatgcagcgtggaaaaccggtacgtgttaaatttacggttcctgtaatgttcagattgcagtaatttgtatacactataaattaagaggctgctttcggcagcctctttttattcattaatctttctaattcatcatgtttacagcttctcaactactcgataagataaataattatatttctgaaattcagtttacccgggaaccgaaaggactttatgaaccgattgaatacatcctttcactgggagggaagcggatacgaccagtattaatgttgatggcatataacctgtatcgggaggatgttgcttctatatatgaccctgccgctgccattgaagtatatcataatcacactttgttacatgatgatttaatggaccgctcagatatgcgccggggaaaaccgaccgtgcataaagtatggaatgataataccgctattctgtcgggagacgccatgcttattctggcattccgcctgatgacggctgctccgtcggagcacttgaaggaggtcatggaattattcggtctgactacattggagatttgtgaggggcaacagctggatatggaatttgagtctcgtgataacgtcacggaagacgaatatatcgaaatgatacgcctcaaaacggccgtgttgcttgccggcagtttgaagattggtgcaattctggcaggagcgactgccgaagatgctgaaaatctatataattttggtatgcagataggagttgcattccagttgcaggatgatttgcttgatgtctatggtgacccggaagtgttcgggaagaaaataggcggagatattctttgcaacaaaaagacgtatatgttgataaaagctttgaaccgcgcggacgaaaagcaacgggaagaattggaccgttggctgaatgcggacgattgtcagcctgccgaaaaaatagaagcggtgaccggactgtataatcagttggatatacgtaatgtttgcgaaaataaaatgcgtgaatactacacaagtgctatggaaagtctggcagcagttgccgtagccgaggaacggaaaaaagaattaaagaacctggtgaagctgttgatgtaccgtgaaatgtagctaagttcttgaataatatgccatatagaagactaccaaatacagaccaagccagagttcgggcgctgaaagcagcggtcgaaaagggcgatttgtatagtgtccgtgatttggctatttcattgaaaacattgttcgaagcacgcaatttcctgcaaaggtttgaagcggcgcagatttactatacacagtgttatgacaatcaggcgaaggccagccgcaaacatcaggctaatgtaaaaacggcccgtctgtatatttcccactttattcaggtactcaacctggctgtactgcgggatgaaattaaaacatcgcataaaaatatgtacgggttgcccgaagcgaatgtagtgcccgacctcttgagcgaagccgctttggtggagtggggaaagaaaataatcgaaggcgaacagcaacggactgcccaaggtggcatacccatttacaatccgaccattgcgcgcgtgaaagtgcattacgacatcttccttgacagctatgaacggcagaaaaaccttcaggcactaaccaatcgcagcttggaagaactcgcttccatgcgtggtcgtgccgacgaattaattctggacatctggaatcaggtggaaactaaatatcaggacgtcactccgaatgaagtccgactggataaatgccgtgattacggattgatctattattaccgttccagcgaaaagtaaaagaagaaaacgaactgacatgctgatagatacccattctcatctttttttagaagaattttccgaagatttgccacaggtaatggaacgtgcacggaaagcaggcgtttcccgtattttcatgcccaatattgacagtatgacaatcgaaccaatgttggctgtctgtgccgattatccggacctttgttatccgatgatcggtctgcatccgacttcggtcaacgagacgtacgagcgggaactggcaattgtacgtgaacgtctgtcggccccgaacaacttcgtggcaatcggcgaaataggactggacctttattgggataaaaccttcctgaacgagcaactgtttgtccttgaaaagcagatcgagtgggcgcttgaatacaattttcctattgttattcattccagggaggcgttcgattatatatataaggtaatgaaaacctataaaaacaccccattgaccggtatttttcatagtttcaccgggacgcccgatgaggcggcgaagttgttggagtttgaagggtttatgctgggtattaacggagtggtcacttttaaaaagtcaactttgccggacactttgcggacagttcccttggagcgtattgtgctcgaaaccgattccccctatctgactcccgtcccgaatcgcggaaaaaggaatgagagcgccaatgtgcgggacacctttctgaaaatagctgagatttatcagatgaatccggagtacgttgcacaagtcactaccgaaaacgcgctaaaagtgtttgtaatccgcaaataagctccgaaaggttttaaattatattaatttgcagtatttattcaagataaaaaacggataatgctttatgaaaagaaaaaaaaggatacatttgtagctgaaaatgcgggaaacccattgggagagatgctcgagtggttgaagaggcacgcctggaaagcgtgtatacgccaaaagtgtatccggggttcgaatccccgtctctccgcgtaatgaaaagagaaatgtgaagtaaatacaataaataataatcaattaattaatcttaaaaattagacacacaatgaaaaagttatttgcaattgttgctgtgattggggcctttacatttggctcaattcaacttgctcaggctcaagacgctcctgcagcagaacaaactgaacaacaagctgctcctgctgctgaagctactacagctgctgctcctgctgcagaagaaggtggtattcacaaggaaatcaaagttaaattcatcgaaggtactgcatctttcatgagtttggtagcaatcgctttggtgattggtttggcattctgtatcgaacgtatcatctatttgagcttggctgaaatcaacacaaagaaattcatggcatctatcgaagctgctttggaaaaaggagatgttgaagctgctaaagacattgcccgtaacactagaggtcctgttgcttctatctactaccaaggtctgatgagaatcgatcaaggtatcgatgtagttgagaagtcagttgtatcttacggtggcgtacaggctggttaccttgaaaaaggatgttcttggatcacactgtttatcgcaatggctccgtcactcggattcttgggtactgtaatcggtatggtgcaggcatttgataaaatccagcaggtaggtgatatctctccgacggttgtagcaggtggtatgaaagtcgctttgatcacaactatcttcggtttgatcgttgctttgattcttcaggtattctacaactacgtactttctaagattgaagctcttacaagcgaaatggaagattcttctatctctttgcttgacatggtaatcaaatatgatctgaaatacaaaaaataatttgaaatgagtaagttaacatataaggcatcgtactacgcactgtatgcgatgtttgccattatcctcatcgtaatgggtatcttcttctttggaggagacgctacgggcgatgcagtgattccgggagtagatcccgaaatgtggcagccggctcaaacagacgccttactctatttgatgtatgctttgtttggtatcgctatcgcagctactgtgattgctgccgtattccaatttggtgcagctttaaaagataatccggcttctgctatcaaatctttgcttggtttggttcttttggttgttgttttaattatagcttgggctatgggtagcggtacgccgatgaatatcccgggttatgaaggtacagataacgtttatttctggctgaaactgactgatatgttcctttattctatttacattttgttgtttgtgactgttgttgcaatcattgtgagtggtataaagaaaaaattatcgtaatcaattgaggatactcgattaaataagtaattaaaatggcaaaaggaaaaagaaaagttcctgatattaactcaagttctacggcggatatcgctttcttgttgctgatcttcttcttgattacgacatcaatggatacggaccgtggtttggcaagacttttgcctccaccacccgaagaacagaatgatgatactaccgataagattaaagaacgtaacatcctgcaggtttatctgaataaagatgatgctttgatgtgcggaaatgattatatcggagttgatcagttgagacagaaagccaaagaatttattgctaacgttaataacgcagagaacatgccggaaaagacacaaaagaatgtggaattcttcggtacatatatggttaatgacaagcacgtaatttctttgcagaacgaccgtggatcttcttatcaggcatatattagtgtgcagaacgaattggtggctgcatataatgaattgagagacgagttagcaacagaaaaattcggagttaaatactcggagttgagtgacgaacagcaaaaggcagttcgtgaaatctatccgcaacgaatttctgaagcagaacctaaaaaatacggagaaaaaaagtagtaagtaatgggaaaatttaataagactggtaaacgtgaaatgccggctttgaatacttcttcattgcctgaccttatctttaccttgttgttcttctttatgattgtaacaacaatgcgtgaggtaacattaaaggtgcagtttacacttccgcaaggtactgaactcgaaaaactggagaagaaatcattggtgacattcatttatgtgggcgaaccgactcaggaatatcgtgcgaaaatgggtactgaaagccgtattcagctcaacgacagctatgctgaagtgggcgaagtacaggacttcatcttccaggaacgtgctagtatgagtgagggtgacgctgccaaaatgactgtgtctctgaaagtagaccagaagactaaaatgggtattgttactgacgtaaaaaatgctcttagaaagtcatacgctttgaagattaactactcagctactaaacgtggtgagaaataaatagttaatttgatatataaaaaaggagggcttccaattctgaattggaagccctcctttttttattgggaacagttttttttatttgtatatttagattcttcttcaaatttggtggtcatttaactagtcggtggtatctccattcccctcctccggggaggttgtgtaaaaagtaagaatcaagtgttctttgacatattgtataaaaaggattttatatctt

SEQ ID NO: 3009 - DNA, 168467 bp, Unknown
  gut microbiota DNA sequence
gaaggcaataaaggggactacattacctttaccttacagaatggagctaaaatagacggagtatccattgccttctcccgtgagaacagactggaaactgacttcgagatacaactatcgagtggcggcggacaattcctcactgtatattccggtaatgtgaaagagtacaataaactgttggacttccgtttcaaaggaactactgccagcgatttacgcattgtactaggtagtgaccgagtaggagtagcagagataaaacttccccaactgcaaaaataggaaaaggcgtgtttaaaaagtcggtagtatcttcaattccccttctttccgaaagaagaaacttttcgatactaccgacttttctatcagtcttttcctctatattattttatatgttcatttccctcaatctccccagcccggattatttggcttcaacttaggattcagagccatttcgtttaatggcaaagaaaataagtaatgtttgggagattcaaatatagccggggtagtcacacgttttccatatacatccaaacttccatctgcataagttcccacttctgttttcaatacagcgatttcctcaggtgtgtaaacatctgtatatagcatcattcccgctttgggggctaccagtctttcaccacatccccaacgcatcaaatcagcgtaacgtaatccttctccgaacaattccacgcggcgctcacgacggatctcacgaatcaaatccgtattagttcctttaataatcggatgcttggctaccagtttagggtcagttgccggcgaactggttagctttacattaaatccgacacgttttcttaaagcatttacagtcaaatccaattcaggatcttttcctaattctgctccggcttcagcgcgaatcagtaacacctcagcataacggaatatgatagcatccagagtacctacgccatgagtatcggaaaactctttttcgttataaaacttagcaattgcgtatcccgtactggaatgtgtccctccttcaaggaaagaagatattgaacttcttttcccttccaaataataagtataaggtcctgcatacggggtcgcgattgtctgcaacagacgtgggtcacgattctccaattcatctttaaccgacgttacccccgtctggtcatacggttgccctgttattgtcaaataatcatccgcacaatctttgctcatacccatcatttgagccatttcacccaaacgtagttgccgggttacattattacctttatcaactttggggtcatattcttttgatagaataacctctgtgttagtattataattatcctgaataaataattcgtgatatgccgtagcgggagaagttccttcatacaatttatatccatattccgatttcattaattcaccagcagcatcataagcagcttgtaggaatttggtgtcattttctatattatggtaacgacgataagtaccctcaaacaaacagattcgtgcttttaaagctaaagccgcatctttactcaccctatatacctttgtctttttaggcaaccatgcaatagcctggttaatgtctctcaatacattatccatgacaagaatccgggaatcacgccctttatataattcttccgtatcagaaggtgtcagtgctgtgtcataccaaggaagatcaccgtattttcttactttattaaaataatccatgcacttgaagaacaagatttctccggcgtattgttgcttcacaatttctgtttccggtgatttctcataattcattagaaactcgttgcatgcacgaatattctcccacttccaatcagacccttcatcagaagcattttttacagctatctgatgtccgaagcttacatcattcttttcccaaggaagaatattgtccgagttccagtcgtcttccaacatcgaattgtaccctttaggggcaccatgaccgttaatcaactttggataaaagtcattgcaatattgttctaaagcattggcattggcagattcaaagaattttccggtttcaatgatatcttccggggtcctgtccagaaaatcgcatccctgcataaagaatgccgctacccctagtcctagtataattatttttttcataataaacagattttaaaaagttaagttaataccaaatgagaaggtccgactaaacggataagccttaccatcggaagtaagattacccaccaatttattgtctttggagttggactgacgtgtactgacaatatccggatccagatacttaaatagcttagtccctacccataaattctgaccacttgcaaatactttcaattgctcgattccaactgtagatatccacgctttaggtattgtgtaactgattgttaaatccttcaaacgaatatatgcaccattctgcaagtattttgtttgggtttgcttactcctgccactataacttggaagcgggtaataggcattggtattattctcactccaagaattatcaacatggtaatcattaacagcagattgccatacattgctattactcggaaatccccaaaacaccgggctgtcaatccataaatctcttttagctatcccttcaaaaaagacacgcacatcgaatcccttccaggaagcactggcattgatattgaaagaataacggggagtggtgttacctatcactttctggtcacctgtattatagatagtcttggcagatgtaataccttccactccatccaaatctttataacgtatgtcacctactttccaagtctttgatatatctccctgaatagtagccattctctgagcttctgcttcgtcctgaatgaatccatcagttacatacccccatatttctccgattcgcttaccttcatagtaattattcaaagctccttccggattatcgaattttgtaatagttgaataactgtctgcaagtcctacaccgatagaatacattaacggactgcctccgacattattaatcttatcattccaagaaacagataattcccaaccatttgtccgcatattcgccaaattttctttaccaccggaacttcccaatacggccggataggttttagaaatcaccatatcgtttgtattacggatatagtaatcgaatgaagcatttaaacggttattcaacatagcgatatccagaccgaaattggtagttgttaccttttcccaagtaatattggtacttgccaatgtcggtgctttcaatccggatataacttttccacccattacataagataaagtttcattatccagataacctaaatagtcaaaatttccgtttgttacctgattgcctagcgttccgatagaagcgcgaagctttacattatcaaaaaggttgcgtgcaggttcaaaaaacttttcttccgacagtctccaaccaacagacacagaagggaaaaatccccattgtgaaccgcttttatatttggaagaaccatcataacgtccattcacttccaacagatatcggcctaaatagtcataattcaagcggaagaacatgccttgtacagcccagaccgttgcatcttctcctatagactgcaaagtagtagcaaggtcactgaccggagtattgttgtcgtacagtcctgaaacttttgtcttcaaagctgttatttttttactttcctgattatatccggccatgacaccgaaagagtgctgcttgatagttttcttatattcagcccagaggtttaaagcttgataagtgtcattgtacttatcattatttaccccatttgaacttccttgcggaatacttgtaccatccggttgtgattgatacaaaatattttgatgctttttctgttgcttaaaaaacttatttcctgtataatcccctttaatggacaaaccttttatcggagtaatattgaatgctcccgtataccaaaagtcatcggaagaagtaatatcacgtcctgcttgagccatgattcctgcaatattatagttgaagttagaaccggccacagctgcaaaatttccatccggcagataaaccggaataaaaggaaaagcacgataaacttcatgataaggactacttcccatataatcgtatgtattcggaatgtccgactcgttacggttatacttagtccggaaggtgatttccaaccagtttgtcaattgagaagtaaaattgaaagacatattgatacgtttataagtatcatctccaaatgcaaataatccatcttgtcctttgtatccgatagaagcataatatgaatttttctcagttcctccgctgatactggcattatgttgctgcatgaaagcagatttcttatagaactcctcgaaccagtttgtattagcagcatacgcccactggcctatacctgtatacttgcctgtttggtctataaatacagaagggttattgaccgggtcactattatacctgtcaatggcttctactaattcagtggaaaagtctccgttaccaccggaattaacactagcctgattaattgcatgaatccatttgctggaatttatgccttcgggcaatctggaaggagacgaccaggagaaattgttgttgtaattcacacgcactttctcacctttagtacccttctttgtagtgatcaggaccactccaaatgcagctctagctccataaacagcagctgaagaagcatcttttaacaccgaaatgcttgcaatatcctgtggattgagcaaagaaatatcattagtttccactccatccaccaatataagagccgagccaccgttcaatgatgttgttccacggacattgatttgcgcagttgcgttaggactacctccatcaaatgttatattcaagttgggaatagctccttgtaatccttgggttacgttagctatcggccgatcctccaacacatcgccatcagccatagtaacggctcccgtcaaatttaccttcttttgggttccatatcccactactactacttcatccagcacttcagagtcctctttcaaaactattttaaaagaagtcttaccattaacgctcaatgtctgacttttcattccaatataagaaattgtaatttgagcattggatgctacattgttgagagtaaaaataccgtcaaagttggtaatactaccattggtagttcctattaccaatacactggcaccaataatcggttcgcctttttcgtccgtaacggtaccgctaactgtcagtgattgccccaaagtattcacggacaaacaagaaagaaataacacaaacatgcttcgaagaaacatgaatggcagtgttttacattgtttcatagaataaattgttagttagtaattagatttatatcaaggtcacattaataataaggaagtaaacaaaatccctatgcgtgaaatcggacaaggaactgtttacaataattaatggttaacttgttcttttatttattaaagtaagaggatgtgcctcacggcactatttatttttgcttatgtgtattatttcattgtggtattgcaaatataccataaaattcctaataatcaaaaaaaatagtctttttttgaaaagattagttagcgctttttcgaatatcgaaaaaatacataattccactcctctatcccaaatattctcttaaaataaaaacaatcctaaagaagaattccagcaaattattgactttattccaagtcaatcacttacctttgtcatactgatacaatttatgcaatattccgtacaacataaaatatcaatatcatgaaacaattattgattacaactcatttgtatacattcgctgttatctgtgtaattgcaactaccattagtagttgtacctttaaaaaaaagactgatatggaaacaccaaccggaacaaaggaaaatgaactaaccatgctagtaggaacttacacgtcaggagacagtaagggaatttacagtttccgtttcaacgaagaaaccggaacggcaaccgcacttagtgaaacggaagtagaaaatccctcttatctcgcagtttctgctgacggaaaatttatttatacagtcagtgaattcaataatgaacaggcggccgccaatgcatttgccttcaatcaggaaaaaggaactcttaaattattgaattcacagaaaaccggcggtgaagatccttgctatatcattacaaatggaaataatgtgataaccgccaattacagcggcggcagtatctctgtttttcctatcgcaaaagacggttcactcctgcctgcttccgatattataaagttcgaaggttcgggaaccgataaggaacgacaggagaaatcccatttacattgtgtccgtatcactccggacggtaaatatatgtttgccgataatttgggaacagaccaaatacataagtttatcattaacccggacgcgaatgcagagaataaggaaagttttcttaaagaaggttctccttccgcctttaaagtgaaagccggttcaggtccccggcatctgacattctcacccaacggtaattatgcctatctgattaatgaactgtcgggtacagtaatagccttcgagtataaagacggagatttaaaagaaatccaaaccatagttgccgatacagtctgtgcaaaaggcagtggtgatattcatatcagtccggacggcaaattcctgtatgccagtaatcgcctgaaagcagacggcatcgccattttcagtatccaaccggataacggaatactgacaaaagtaggttatcaacttacagggattcatccgcgtaatttcattattacgcctaatggcaaatacatgctggttgcttgcagagacagcaatgtcattcagatatacgaaagagatgcagacacaggcctgttaacagacatacacggagacataaaagtagataaacctgtttgcgtgaaatttatacccaatcccaaacagagctaatattcacaagacctaaaattatatatagcctgatacttatattctctttcaagtgtgaaacaatttaaatgtgaaagagctaagctgattaacaaatcagcctagctcttcattcaggaataaaaaagcatccactatctcatttgatcaaactacgaaaggcctgaatcccctgatgattaatatccaatttttctacctctttcaataacctggcagatttctctttctgattcaatccccaatatcccaatgccatcatatatttgcaatgaattatattccttacagtcaagttatcctcccaaatcaaaagatcaggcaatgacacagcgaaataatccattttaatcttgtcaaacaaatgcttctctccataagaaatcaacttatgaaaacgtccattcgcctcatctatgcgtcctagttttagtaatgccaacccctgataaaatattttatcgggtttcgcatcattataatacatggcggcggcaggttctgtcgtcccaacagtggcctgttcccaatatctgacagcttcatctttacggttcagattttcataagcgcaacccaagaaataatagaaatcattctcttgtgcaccgtacaatttgccttcacctaaatgatgcggatattccaagcattcttccaataatgcaattgcttcttgattattgccagcagtcaatgcttgcttagccagttccacacgggctagttgatattgggcaggtacttttccctcaccaccttcccaagggtggaagctatgtgcatcaagcaatgctttggctttttcatattcaccagtctggttcaacagagttatttcttccaatacaagatcgtcacgttgctcaatcaaatcaggatattgccgtaagaaagccagacgttccttatgcggacgacgaacacgtttataaagctggtccaattccattagaatacgtgcatctgttgtatcaagccgaaaagcacgttccatgtattcgatagcctttgtttcttcattctttttattgaaataagccagagccagattacgccatacagtcgggaagttatcatctagccgggcagaagtttcccatgcttccatagccaagtcgtactgacgtttgtcatagtatagattacccagataataaggagctttagcatcatgcggattttgctccatggcacattgtaatgcaaggattgcttccagacggttagggaaacaataatcaggacacatctcagccgcttgggcaaacacctgtcctgttcccggtaattccccttgaaccagacaccagcctaaataataataagtcataggagtaacggcaccttcagttatagctatattccataaagaagcagcctcttgccaacaacctgccgcacaataatcaagcgctatttcatcatagttatgaggttcgccacgcatcatttccttcaaagtagccaactcgtcagaaacattggttatcaaatatttttcataacgacagccaaagttgaatttatcaatggccaatgaatcctcaatcagttgcagagcttcttctgattgtcccattcggcggaggatagcaacttttaaagcacgggctttatgattgtgccagttgcggattagcgagtgattaatttcatccaatgcatctgccaagcggttttgcatagtagaaatctgtgcacaagcaaaatatccggcatcctgccaagcagcattccagcaagctttatagaaacggtcgtaagcctcattgtaacgtccctgatatttcaaggcaaggccaagattataaatcggttctccgtcataaggattcggattacgtttttgtagggtcttcacggcagtaagcagatattgttctgctttatggaaacgccctttacgtatataccacagaccaagcgcgttattattacgtacatcaatcggatcacgccgcaatgcttcttcgtagtattctacgggattataagtagcatgcctgtattgctccaaatgcatacctgttaaataaagctgttcagttgtctttatttcttgtggaaatagcgcagcttcggcagcatcaggaataggtttcacttcttccggttccgcatgccaataaagcaattcccttccgtttgccgtgatttcaagaatcagtttattaagtttctcaccattcacatttaccacttcattcagcaattcttccggggtgatagtcacttccttgctataatacactttaccgtcttctcctttcaaaataacgtttaccgtctgacgagaagtagcaaatatcttacaacgtacacagtcttctccttccagttcaatgttcatcagcaaatccctgctggcattcttcaccactcccaattcccggtaaggcaggaaatattgaatgaaactcttttcttcataaggttgcagccaagtaaagtccggttgattttcagtatatacacctgccattaattcaatatacggtccatcctcatcggtcagattacggtcccatgcacgaccgaaatcaccgttcccccaagtccattgtttcttacccggagaaatatggtgattggctacatgcagcataccggcacgggtatcattctcatatccaccctcgaagtcaaagcgggaatttacagccatataggaagtaggaaccttgatattcttatagttcgagatgtccactccggcggaatagtccatcttataataagtacccgttgcgataggaaaactggatacggcacgttttccatggtcgaacacggcattgatatccggcgggaatacgctctgatagtaatcattcaccgctacggcaggattcgcccaccacagaaaggtctgcggtacttcggtacggttgtaaagtactcctttgatttcaagaaaagcatgtccgggacgaagtgtaaaacctgccattcccttctgatgaaacatacgttccatttcatttacccataccgtgacgcttccgtcggcattttcctcaatagtcgtatccacgggcatataagtactggggcgatgatgttgaggccagttaaattcgataccaccagaaatccacggtcctgcaagtcccaccagagccggctttatcacatgattataataaataaaatgacgctctctgattttatcataggccatctgcacacgtccacccagttcaggtagaatcatcactttgatatattcgttttcgataaaaatagcattgtattccttatccaccttttcatcggacattgattcaatcacaggataaggataaactaccccactactgccttgatacacccgtttctccaggaaaatcggattcttctccggtttacctacttcataggtagggataaccaccttttctttccatgcttttaccatcgtattattgattataaatttattttttattcgttgacaaaaaaacaaaaggcaaagaagatcggagacagggaggttttatatcctcccagcctgattaatgatgttatgcctatttacttgctaatttgacaatccgttatcgtttatttaattaagtccttttctaatgcttccagcgatttgcctttcgtttcgggcaatgcacggaaaaagaacaggtagccgacagcacaaatggctgcataaatccaaaatgtaccgctgcttcccaagaaattattcagtagcgggaaagtgtatgtcagtgtgaaactaccgacccataaagcaaatgtacaggtagccatcgcaacggcacgtactcggttcgggaaaatctcggcgagcagtacccaggtgattggccccaacgacatcgcatagcaagcaatagccaaaacgaccagcaccaccataaagaatccactgacttcgaagaaataacaagtacccagaataagataaatgcctgccagtcccccggctcccaacagcataagaatacggcgtcctaaacgttcgactgtatagattgccacaaaagtaaaaattacatttgccacacctgtcaccacaatattaaagagaacatctcccaatgaatatcctgcggactgaaatatctcctgcgcataattgaagataacattcgtaccgcaccattgctggaacacagctacgataatacctaaaacaagcactttacggaacggacggctaaacaacaaccgcaatcctccttccgacttcgaagaaccggtttcttccaccaggcgaagttcctgaccggcatagtcgtcaccgcctattttgctgagtacattccatgccttcccttcttttcctttcatcgccagccaacggggactttcgggaatgaaacatgccagcaacaagaatatcgcagcagggaaggcagccgcccaaaacatccatcgccatcccatttggccattccacgaagcgcagatatccgcgagagagaagtctgcaggaataggctccgcaatcagccagtttgtgatttgagcgccaagaataccgagcacaattgtcaattggtttagcgagacgagctttcccctgattgaggcaggagctacttcggcaatatacataggagaaagtcccgaagcgattccgatgccgatacctcccagaaagcgggcggccaggaaccagctaaatactgaaaatgccccggtagcataggcagaagacaagaatatgaaagcagaaattatcaggagaggtttacgcccataacggtctgccatcatccctgccaccatagcgccaatcagacagccgagtaaagccacgctcatggcaagtccctgcatggcaggcacatcggctatatcgaaatagagttcgtagaaaggtttcgctccccctatcactacccaatcatagccgaatagaagtccgcccattgcggatactaaacagataaaatagacaaactttttattataacttctcataccattagaagattgattgattaattgattttgcaaacttgttttttagactttcgaccgaacacccggtactcctttttttctagtccaagcccctataaatagatgtcgcttttgtttctatcactttaccttcattctttagtatcaggcttctgatatcctcttcgccaagcatcgtccggggagcaaaactttcagaattcatatacgtaaccaggctgtaaagcatctgttgtatttcaggcttgtcgcttccctcggaaagaatatccatagcactcattatcagttttccctttccacattttgtttcaaagacagataccaactttctgttatttgtaaaattgtcaatagattccacaatcggttcaaccggcggtaacgaatcaacaaccagtactttcgacctcttcaccagattccaccattgccagttgctatgcatttctgtagggaagtgccgcaaagccgcatgttgagtattgcacagaagtcccattgttcctgcctgtctggggaaatggacaggactccagaagaccggaagaaacttcccttccaatcctttcagataactcattttcggagaaaacaaaacttttcttccttgcttcaacgcagccaaagcttcttctacatcttgagtcagcaggacatctccgacattcaatgattcgatacgaggatatacccaaacaggccacgtatttttccattcagttccttctacagataccgtgagatacaactttgaagccttccgtacacttttaagttctgtacggatatctccacattgtgtcactgttcctttggatatactttccacattcagtctgccgttcgagatttgcgttcccgcctcatcagccagctgccacattatctgtttattatcaatagccgcattcgaatagttgacaacttcaattgatgcagagaacatctcatcaccggaataaaccgctttagcaaaacgagccaacggaacaacaggcgcacaaaactgcctgaaagcagaagcctcaatcaatcctttcgaatcccagaaagcatccaaaagtccgaccagtgcagttccctgtcccgggaaatcatgcaaatccaacaactgaaaaccgctgaactgctttgttttcatcgctctttctatctcctccttatataacaagaccgccaattttcccgatgcttccagaaaatcctccgctttcgaatataatcctttcttctgtaaatcctgtttgacagccttaaaatttagaggttccagtactcctgtgtatttctctatttcttttagattcggaaatacggcatactgcccaatctcatgagagataagagggacattcatgtcctgcatggcggcactgtaatctttatagaaacaaggtggttcctgatcgaaaataccttgtcccctcacccagcctttatctgtccattgcgtgacaaaaaagtcatcttccggctccggtttcgctccatgtcctttttcgaaagtaaaagtcgaagttgtatataaacgtctgctatctttccctttcatatatctgaccatgtcattcaacagtttaaaatcatactggagttcattaccaacactcatcatgcagaatgacgggtgatttccatacgcttcgacaatccggtcaaattcgttataaagaaattgggtcattgcctcatccttgccgatagtataagaccagttcggcagttccacctgtaaatagaaacctaacttatccgcaacgcaaaatgccgcttccggcgggcaccaggaatgaaacctcaaatggttcagcccccactccttggctgtggcaaagactttcatccaaccttcttccgtcatcggcggagtacctgtcagaggaaaaatacaacactctaatgttccgcgcaggaaaattctattaccgttgaccgtcaggatgccttgaccattatctatctcgcgcatcccgaaagaaacatctttccgttcagttttcttcctgtcaaaccggcaaactacagacaaattatataattcaggagtaaattcatcccatttcttcatatctgtacccagcgaataatcatattcgagcttctgcctgccttcttgcaaagtaatctgaaattctttttctacaaacttctgtccaccttcagactgtccgacctgcaaggctagtttcactttctccggtttatgcccgctattctccaaagtaaccgccacccgtatcttcccatttctgacatcaggataaacattcacatgctgaatactgactttctgccgggcagtcagtttcatcttacccaacactccattccacataatctgagtgtcattggtataagcatgtgccaggtcgtttgcagaaatatcatatcgctttctattgtcaatacgtaaagctattatatgtttacctgccgacagacctttcggcatgacaaaccgatgaggagcgatcaagctttcctgtgcacccgccacttcttctccgtcaatccataaacggctctgccacaggactctttcaaaagagaactccaacggctgtcctgccatacttttgggaatattaatctcacgcttgtaccatgcgacccctacataagcgttcttacgggtcagacgaagcaactgcggtttttccagtttgggaacgagcctgttggaagtccctttccgggccaaatctgtggttccaggcaaacttatattatcggagaaagatttcagataccatccctctttctcccctacatctgtactatctaaagccaattcccaatttccactcaaatccaacagattttgggcggcagaaatactggagattcccaataatactattaataagaaagatttcatattataacttttcataccattagaagattgattaattaatattgcaaagatagaaccggttgagtagacaaaaaatagaatttcattttataaagatagacaatcttatttttttgccctatatttgataaatagtatacattactatatatttgcataaaacagttgaatcacatactatgatattatggtaaagttaaaaaatggatttaccggagaaagggctttagtgcttccccgaatgattgttgacaaactggaggaagatcctctgacctccatgctccatatcacggatataggatattatccgaaggccaaacatcacttccgggaacgaaaagaaccgatcaatcaatatgtattcatttattgtatcgacggggccggttggtatcggataggtgaacaggaatataccgtttccgccaatcaatattttatccttcctgcgggagttcctcatgcctatgcttctaataaatcttctccatggactatttactggatacacttcaaaggtatccttgctcctttttacgctcaggaagcaagccgtccaatggatatccagcccgaatcacattcacgtatcagtacacgaatcaacttgttcgaggagatattcaatactctgaagaatggttacagcaatgaaaacctgcgttatgcgttctccatgttccatttttatttaggaacactacgctatatacagcaattccgcaacgctgccacacataatgactcaacagaagatgaaaatataagcgaactggcaattcattatatgaaagaaaatatggagaaacacctcagcctgcaagatatagccgaccagatcgggtattctccttctcacttctccatgctgttcaagaagaaaacaggacatggcccggtaacctacttcaatttattaaaaatacagcatgcctgttttttactcgacaccacggatatgaaaattaatcagatatgctataagataggtatagaagatacttattatttctcccgcttattcagcaagatcatgggaatgtcaccacgggaatatcgtaaatcgaagaaaggataactgcctcgaaacttttagtttcaagcctttggaacaatagtttcaaggcggtgaaactttagtttcaaggcgcgaaacaaatagtttccctatatggaaactttagtttcaaagccttgaaactaactgaagtaaagcttgattctgatgaggacctacaaaggaagtatgagaaatgcaatacgaacagtatgagaaatgactgttttttaccggttttaggttaaaaaagtatgagaaataccttattgaaaaagtatttctcatacattattatattgattaataacaaattatctaaaaacaatgagaatatgagaaatgcttttctcatttccggttcttcgccaaatttggtggtaatttaaccagtcggtggtatctccattcccctccttcggggaaggaggggtggctgaaagccggggtggtaggtggatacacaatgctgataataacagacttacgcattcacctaccacctccccctacggggactcctccttcccaaaggaggagaatggagaatactatcgactatcaaattattgttgaatactatcgattatcaaattattattttcctaattaagtttaccaccaaatttgaagaagaacctcatttcccttctggtaggcgaggactactttttctctatcgacagcacaaattggcgtaaatatacttgttgttcatcactacccgcatttgtaaatcgaacgaatttcaccggggctttttgcaatccggccgtcagtcgggcatctttctgcttcaagtcgatcgttttccattctttaccgtccgcggagatttcaaaacgtccccatgtacaaggttccttctttccgaaattaatatctatactttctgccggatagatattatccaattctatttctatgaagtttcctgccggccatttcacgacttcgttcatcggagagataagtatgcggttcgcctttatttgtaatggcaaattctttatttgctccacattactgataagcttatgtggcatataatctgttgtggcatccaaatcggctccatacttctgattatatcgttttacggcagtcgcaaatatctggtcaatcaaaggctttataactttggaggctgtcttcactcccggttgataaggattctgattataattctggtcggtataaaacattcgttgctgcaaagctttcacatgattatatctccgtaagaaaaaagacttcgaatcatttttgaccattttcagtacttcttctccggtttcggccagcagattgaattgatgaagccacggagttatttctacaatcaacggctcgttttctgtattcaccaataggatatcgccagcttccttcatctgttcaaatgtatcccacaagaggtcaaaatcaactttttcatattttccactctcaacataactgctaaggaaacgtttggcaacgggttgaatattcatagactcttcgcggcgataaccgtgtccattgggacctaagtcggaattgtgcatggcaaaacattccaattcgtccgcagcccccggaagaatggtacggatagcgtctttccacgttttccaagtatcatatttagtaggattccatgcatagcttgcaacactgtaaatagcaatcttagaggcttcggcgtgctccataggattggtcacaaaaccggacatttccttcgctattgtggtgtcgttgccataaacaggtccgagcagtaaatggtcgcgtacataatcggataccggaaaattccaccaaatgtaggcgggacgtttaatgcgttcgttaatccaggaaatgccgtcgcgggtaatatcggaaatcacacgatcacctgtccacataatctggacagaaggattcagtttctcacctaatgtagtcagataattgcctttggggttcgaccagcttttattatactccgtaggacacatgataagcggagttacatccggctttgcctttacaaacgcctcatcaatatagttcaataattcagcttgcttctgaggattggtaccttcgcccgagatgtcatcaaagaacaccgcgaaggaacggacaccgagctgatacatcttctcaaattttgagagcaataaatcacggtcttcctggttccatttgatatcctgtcccgggtgaatagcccatacaaaatcaacttcattttcattggctactttcacaagctcctgcaattgggctgcttccttttccggataaggcaaacgccagttgggagcgctgtgatacggatcgtctttaggaccgtagatataggtattcatcttattctcaccataaaacttcagttggcgaagacgtgcctgatggctccagggagttccgtagaagccctccactacaccgcgataacggacagaaggataatctttgatttccacttccggcaattttccttctttcagcaactgggcgaatgtctgaatagcataataagtaccccgttcatcattgccggccaatatgatttctttatcattgacagccagataataaccttcttcatgattgggaatcaacttgttatacttacgtacacttttgtctcccttctcaccaatataaatacggattccttccttggtactttgcttgccggtaaggataccttgcaacgctttcaccgcatgcgggtttgcttctttttcaccttctatccggtagatagcaggaagactgagtgttttaccttgttcattgagttgctgtgggggcggctgtaaacttacattttgtgcaattgaagtgagtccacacaacaaacaggctcccattaaataaatctttctatttttcataagtaattaaaaggggggttagtatattattatacaaagaaatacaaatcaatctagttatacaaatttccgggagacagataacatagattttagaataaaaaagaacaattacatattgaaaagttcttaaaaaggaactattaacaactcatcagccaataaaatgagaaccggattgcatactacatttaactttgaacttaaagattcataattggtagtggtatattccattatttgtcttacatttatgacgttttatactttactaactttatatataatacagcatggaatatatcaatcgtttctactggctaatagctttatgtcttattatttccaccggagccaatgcttccgtaaatcccaaaccttttgttatccccgaactgaaagaatggaaaggcagtgacggagcttttgttcccaccgaggctacaaaaatcgtgtatgccgccaacaatccggagcttgaacgcatcgcacgaatctttgcccaagactatcaaacaatgttcggacgttcgctcgaagtagtgcaagggaaaggagctgccggcgactttatcttttccctccgcaccgacaagaaattaggaaaagaaggatatacgatccgcgtcacagaccgggttgctttatccgcccccgaaaatatcggtgtatattggggtacacgtaccttacttcagattgccgaacagtcagaaaatcatcagctcccgaaaggaaccctgagagattacccagactatccgcttcgcggctttatgatagactgcggccgtaagttcatcccgctttcatacttacaggattatgtaaagactatgtcttactacaagatgaacactttgcaaatccacctgaacgataacggcttcaaacaatacttcgaacatgactggtcaaaaacgtatgccgccttccgcctggaatgtgatacttatccgggactgacggcacgggacggacattatacgaaaaaagaattcgtcgacctgcaaaaattggctgaacaaagctatgtagagatcattccggagattgatatccccgcccactccttggctttcagtcattataaaccggaattgggaagtaaagaatatggcatggatcatttggatttatttaatcccgaggtttatactttcttcgacgctcttttcaaagaatatctggaaggagaagaacctgtattccggggcaacaaagtccatgtgggcaccgacgaatattcaaacgccaaaaaggaagttgtggagaaattccgcgccttcaccgatcactatatccgttatatagaaagcttcggcaagcaagcctgcgtatggggtgcactgacacacgccaaaggagatactcccgtcaaatcggaaaatgtcatcatgaatgcatggtataacggttatgccgacccgaaagaaatgataaagcaaggataccatttaatcagtatcccggacggactggtctacatagtcccccaggcaggatattattatgattatctgaataccaaatcactatacgagaaatggactcctgcacagataggcaaagccgtgtttgaagaaaaggacccgaatattttaggaggaatgtttgctgtatggaacgaccatgtgggtaacggcatttccaataaggatattcatcaccgggtttacccggccttgcagacactagccgttaaaatgtggacaggcaaacaagtcacaactccctatgacagtttcaatgaacaacgcaatttactaagcgaagctccgggtgtgaatcaactcggaagaatcggaaaagctcccggcctggtttacgaacaggcagctgttacccccaaccgtactcttccctatcgggaaatcgggtataattatctggtatcttttgatataaaaggagctgatgaagcaaaaggtacagaactgttccgttctcctgacgccgtattctatttatctgatccgataagtggaatgttgggctttgcacgcgacggctatctcaacactttcaactaccgtatcatgcccggcgaacatgcaacagtaggtattagcggagacaaccgcgtcacccgcctgcatataaatggaaaaatcgtagaagaactaaatatacagaaacgcttttataatggtggaaaagattccatgaattacgttcgtacattagttttcccattacaagaaacaggtaacttcaaaagtcagattaccaatctgaaagtctaccaccaataggacggatattgatacagaaaaggctgtcccgtgtttcattccgggacagcctttttataatcagttatgacaaatgtaactgctttcttaccagtattattttatggatactcaataaagaataatcgtatccttctcctgccttgtatttaatccaaaactgatagagattttccgcaataccttcgctaattcttcatctttacgaatagttcccgtaaacagattatccctattctttttattctcgaaacacactttcgtatgatacttcttattgattaagtttatcagttcaccaagcggcttatccgtaaagttatactcttcttttctccagtcatatccttcaatatccaacgtctcggtttcaatcgtctttgaatcaatatagtaagtgatgcgttgagcaggcttcacctctatggcctcttgccccgtcacctgaaaatctatttttccggtaaagagagtcacctccgctacttcatcatcagactttatattaaattccgtccctttgacttccacaagcgcatctttgaaataaaccctgaaaggactgcctcctgtcatctttttcacctcaaaagacgtttctccctctaagaccactttgcgctctttcaaaaaatcgtcctgatatgaaagcgtacttcccgcagcgagccataccaccgaactatccggaaggacatacgtcatacgcgtatcggccggtcccaggactattgtctctaaagaagctcttgaagtaatcagataccacgtacctacgaccagcaaaagacaagcggcggcagccagaatcctaaaaccccgattatagcctgacaattttttctttgcaggtttgtgattccaacatacatccgtaatgttggtccatatctcctcctcaatttttttgttttcaatagaagtgccaaagaatttatcccactgtcttagtaataaacggcacaccggtccttcatccgctaattttattttttcctccggagtcagtcctttagaaaacatcttctttactatttgtacaaattccttggcattcataatactttatttttttaattgagattcaataggatcgtcatactgagtctgaagctttaccaattcccctttcagtttttcagttatcttttcataaccgggcttcccaaacaaattatgcatttcacgcggatcttttttcaggtcatacagctcccacgcatcaatatcattataaaaatgtatcagtttatagcgttcggtacgcacaccataatgacgtttcaccgcatgttccgccggatattcatagaaatgatagtaaagggacttacgccagtccttaggacgttctcctttcagcaaaggcaacaaagatactccctgaatatcttccggaatatctactcccgccagttccaagaaggtaggtgcatagtctatattctgaaccatttgcgacacttttcctttcttgccatgaggaaaacgggctaacaacggagtacggaatgactcctcgtacataaagcgtttgtcaaaccaaccgtgttctcccatatagaatccctggtcggaagtataaaccaccaatgtattttccagaagccctttttcttcgagatacttcaacacccgtccgatattgcggtcgaccgaacgaatcacactcaaataatcatgcatataacgttgatacttccactccgccagttccttgccttccagtttccgggctttaaaatctttgataatagggtcataataagcatcccaggcagctttttgttgcggattcatacgcttatacatagcgcgtccataaccttccaatccagtttttgtatgaatctcattttctttatccgccattttcaggtcatagacaaggtccatatccttgaatatgttcatctcctgttcggaagcagctatacggccttcatatttatcatagaaattttccggcaatggaaacttcaccttatcaaacgctcccaagtcacaagtgtcgggcatccatgtacggtgcggggctttatgatgcaacaacagacagaacggtttttctttctcccgtttgttctccagccattccagcgccaagtccgtagtgatattggtggcatacccttctatctgcactttcttaccattatctataaaataaggattgtaataatcaccctgaccaatcagaatattccaataatcgaatcccgtgggattagaggtgagatgccatttaccaacaatagcagtctgataacctgccttctgcaacagcttagggaaggtctgctggcttccgtcaaaccggtgcgcattatctataaaaccattcttatggctatgttttcccgtcaacatacacgcacggctgggtccgcttatagagtttgccacaaaactattggtaaagacaactccttcattgccgatacggtcgatattgggtgtctctataaaacggtgatcgtaggcactgatagtctgaaatgagtggtcgtcactcattatatacaaaatattcataggcttctcagacgcccctttactctgagcaaaggagggcaatgttaccaaggcggctacccctgacaaaaaaatgcagtgtttgttgttcatcactataaaattaagttcgttatgtaataaatacattcattaattaagttccccttactgaaaaggaacagttttaattttctgtatcataatttatggaaaaacgtgcagcaaagataaaaataaatatccataaaataagacacttagcaaataatagaaacagaatctgtttcaaaaaacttcaaaacagattctgccttcatcttaccgttaatagcccggattctgcaccatttgcgggttattacttacctgatctaccggaataggcatcaaataattcgccggagtacggaattcacgaatgtgacttgtcatttgtgtatccttgaagaagtcctcatctttggtagcttccacatttaatcctctcggatatacaccaaagtatttttcccccaacttccagcgacgaagatcccagaaattatgagtctccatataaagttcaatcatacgttcctgacgtacaatctgcatcaaacgaccatcggggcctacggaagaataatctgtcaacggctcctttgccttcgcccaggcagtcagtacaggggcaatgccggcacgctcacggattacgttcaatttcttcatgccttcagccacataactagcatcaccatatccgacacaagcttctgcataatccagatacaactcacctaaacgaatgataggcaacggatatctcaaggaaggcacgttgtccgacttacgggcagccgatcccggatgaacccctttcttattcagataaccggttggagagtagttatttcctctgttcattttgccactgttgtcttccttcttgtactgtgtcaaccatcttttgcgttgtttacggtcggaacggtccattttatcctgataagtaatacctttggtaccgtcggctactacattctccgtctgacattcgtaaaagccattatggaaagatatccaggcatagaaacgcggctcacgatgatcgttcaatttcaaagttattccctctccgcgtgtatcatcatccagaatagtagtctgaaaacgattttcatagtcatacgtcgggtcttggtcaatcggaagaccattttcggtatagaatcgttctaccattgtcagagacggaccatatcctcctccaaaagaaagataaggaatggatttattctgtatgctatacatttcttccaagcgggtatttgcccaaagtacctccttagttccgttcttgtccaggtatgtaagacgcagctgtctttggataggatctttcggatacggataggtggctgtaccaatggcatcatcgccaacgtaatataatctgtatccgtgatcttctgcaaagtttattgcttccaaagctgcatcggcagctactttatatttctctttactatatgtttgagacatcaataaggtgccgtcattgttggcaaagtcactgtaatattccgagtttccattgaatagaggagaagcagcataaagcaacaatcgggccctcagcgctttggcagctacactagttgccagtccgtaagaagatcccatacgttccgtaggcaatttctccgatacgattctgaattgttcggatacccagtccacacattcgtcataaggagaacgggctgccatcttgtcataaggtgtattcatatccggtaattcttttaccaagatgataggaccataatgctgcatcaataccgaatgataataagcaatcagaaaatccgcctgattggcgaaatcattaatcttatcatcactcaatcccggaacggacgcaatattcttcttcaacagataacattgccgtatacctttatacatattactgtatgtcgcatccacattgccgatatttcctgaagtatatcctccctgaaaatatagtttaataggttctccgttgaaacagcttactatttcatctcctgcatatccgataaaagtatgcgagttctgataagcaggcataaaggaataacaggaatacagatagttcaatgcagcttgttccgaagcaaatgcatcttcttcattggctgtttcattcggcacaatatccagataatcacatgagcccaagagacagccggcaaatacgaacgataacaaaatattatatatctttttcattttattcaaattagcggttattattaatagtcatctgaaaaccaaagttgaaaacacgttgcgtaggatatttcaaaccattacctcctccttgttccgggtcccagtgcttgaatggcgagaaagtcgccaggttcatgccactgacatagaaacgcatattcttgtatgtataacctatttctgcgttcttcaacttgataaatgcagcgttgcgcagccaatagtcagagcgttgagtgttgtttacactcgtgtccctagtcagacgaggataagtggcgttgatattctgattgtcgggagaccagcgatcgtcagcaatccaagtcaggacattacgcaaactgttgtctccgaacggatgaaaatcactcataaccaatgaaacctttgcaactccctggaagaagaaagagaaatcaagattcttccagcgtatagaagggccgaaaccatatacaatctccggaacggtaggattcttcgcccatacccagtcagaaatatccacgatatcatcatcataaccataaagtttggagatattcacatacttgatatcaccggcactaagatttcctccgatctgctggttagagtttttcacatcatccggatctttgaaaagaccgtcggaaatcataatactaggaatatttgcactctgccctacttttgactggaaagcatatttcggagattcatcgtattttgtaatctcattatgagcatacgtaaatgtccctttgaaactgataaaccagtccttacctattttcttattgaaatctgccgcaaagtcgaagccttgattcttcatggctgccaagtttccgaacacctttgttcctgctgttcccagatattgaggaatcgtacctctctcctgaaatatatcagtacggatttcgtggaaatagtccattgtcaggttcaatgagttaaacaactgcaaatccaaacctacattgactttcttacccacttcccaagtaacctccggattaccataacgggaatatacaggacctttataagttatatcaccgtccagcccggtagtatatccggtacctgtcaggttgattgtcggcatatacacaaaacgtgccccaccaatattgtcattaccaacaagcccccacgaagcacgaatcttcatgttagagaaaacattcttcaaaggttcaaagaacgcttcctcactgatgttatatcccactgcaatagaagggaagaatccccaacggtgtcctttggcaaaattctcggaaccattgtaacccatattcacttccgccagatatttcccgtcgtaagcatacgaaagacgggcagcaacaccttgtttacgtttgggaagtgcagcaatcaagtcgccactgaataattgagtcaccagttcatcctgattatagataaacatggcattcacatcatgctttccaaatgtacggttgtagtccatgatagcctggaaatagaatcggcggtcgcccgagttggcaacacccggtttcaagtccgtagatacttctccaccgctttcattctgaagtctggtgacaaaagaatacactccattatcatctaccgagaaatcctgtaaatggtatttgttccaacctgcggaagcactgttagtagtacttgaccagttcttgaaagaggccaatgccttaaatctaagtccctcggtaataaaattcagtttctgctcaaactccaatgccgccactaccgtgctccggaaattatcctgatagccggatgcaagctgtgccaccggattctgttgctgtcccggtttcaagcggtcattcacaccccacttgatatgtgtagtaacaccgtcgtcagggaaatagatcggagcttccaccggacttgtattgatagctcccgcaaacagatcgttcatactgatgttgggttgcttcgtttttctcagctgcacattcaagcgcaaagaaagacgtgaatccttacccaaatatgcattaatgttattctgaaatgaataacgcatcacattaatgttattattataggagaaaaagtctttggaacgattcttaatcatacctgtctcgtgattgaccgtgacacttgagaaataatccactcgtttgccgcctccccggatattaacattgaaattctggttaaatgcctgatccttaaaaagctcgtcataccagttgacattcggataagcatacggatttaatccagcacgcgttccggcaatttcttctgccgaatagggagattcggtagagccgccgttcaacaaagattcattgaacaaatccatgtaagtggctccgtcgacaaacttcggcttacttgtcggacttgtgatctgtccttccacacggaaattgataatcggtttatcaatattacgaccggatttagtggtaataatcataacgccattagccccacgggtaccgtacattgccgtagcagtagcgtctttcaaaatagagaagccgtcaatgatttccgggtcaagattatccaaatcaccggaggatatttccactccgtccaatataatcagcggattggttgctccgttcattgtagaaataccgcgaatataaaaatccgatccatccgctcccggttgtccggtacgctgaacagcaataacaccagccaatcgtccggcaaaagaattggaaagagaagccgaaggaacctgcagttccgccgggcggattgcctgtacggaacctaccatactagcctttttttgtccgctgccataagcagtgaccaccacttcttccaactgctttgcatcttccacaagttctacaagaagtaccttgccgttgaccactttcacttccttggtttcatatccgatatatgaaatgacaagcacatctccgggagtggccttaatcgtaaactttccgtccatatcggtaatcactccgctgttcacgtcttttacccgtacagttgctcctaccaccgattctccggacctcgcatctactacacctcctacaatctctacttttttctgctgtgtgcttgctgccttcttttccaatttcaagatgatatcatctcccataattacataactgataccacttccggcaaatacttctttcaacacatccgagatttctccttcacaatccagatttttacccggtaatgcatcaaggtcactcggattgaagaaaaacttaaaattagaactggattcgataatcttaatggcttgtctcaaagttatcgactgtccttttactgtcactctcccttgcgcagcactcaacgtcaaagggaaaaataagattaataacacgataagcctcaaatgccatcgactacacatactttctttcatgattacaatttaaaattaaacaaagtttttcatacacatagattttgcaaaatcaataaattctctagtttataatacaatatactcaaaccggctctttcattttccttaactttacgccaattcgggattcatgcattatatattaaatacatctaacccatttctaccccttactcaaatctgcattttattatttttttttcgaaaagatgtgtttttgaattattcttcatatcttcgctctttgaaatcctcattaaatcataagatgaatgaccaagaagcaatagtattactaaaatcagacagccacgaagcttttgagtacttgtataaagtatatggcggacaagtatataattttagtaaactatatatcaattcatctgaagatattaaagaagtagtacaggaagtgtttgtcaagctatgggaagcacgttcttttctaagagaagatgagaacttcagaggatttttatttatcgtcacccggaatcttatctttaaccgccagaaaaaaacatttaatgaaaacttctataaactgtctgttttaagtgcttacgagcagtcgaacattgattcctacaatatagaagaagaattgcaggctaaagaattaaacaattatattgacaagattattgaagaacttccaccgaagcaacaggagatatttattttgagcagaaaagaaaacctaagtcataaagagattgccgaattgctgaatatcagcgagcgaacagtagaggttcatatagccagagctatccggcacattaaatctcggctggaatacctgatcgccctcctgggagtaatggacttacttaattgaaataggtcggctaccattcttttatttcttattttgagcaatacggttattgccggcctgcgacttcacaattattccacttccgttcttgctacatttaatacattccttccgcaatttcctttctttcaggtcaaagatcagattcggattaaagtgttgtccgttgatacgggtttcaaaatgcacgtgttcggtggtagcacgaccggtacgaccggtcagaccgataggttgcccggcttttacgacatcaccgctccgaaccagattcttacagttatggctataaatggtttccagcccgttcgcatgacggattactaccaaatttccgtatgcataataaggtttcgacatccgtaccaccccgtcaaaagcagcacgaatcgtatcattagcacaagtcttgatatctgcccctgaatgtcccccacgagtaccataagcagaaatgaccttaccacccggcagagggaaagcatattcatgctccttcaacgagtccaaatgcaggtatatatgattacctttagcaaacaatccgggagtagccacacggatatggtttacctccctgaaagaaaaagaggatttgtcttgtgcgttcgcaatcatcggtaagaataagacgaataatagtatgagaatgtctttcatgtattttttcgttttcaatcagaatactcccctgattattcaaaaaagataagttcgctgctatctgattttgcatattcgttcagcaatgactgaatcatctcagcagcttctttcaggcctttttttccattataaccattgacgattgctaaaatatgggtagtaccgagattcattttagtccgttcgttatcactggtaggcgtaccgataccacccgacgcatcacgataaacgggcaatccttcgatattcaacacaccctttccgataccttcaaacggttcccctgctttgccgatacccaattcaagatatgcgccttgtattttatccgcgtcaaaaccaccgatagaatgtcccgtccgaagagaaactaagttgatgagatctaccagagtatcaatctggtacagaggaattccgcgcatcaagcgacgacgcaaagcttccgctgacggacggtaacgtccgggatctttaccacaacgtttgtaggcttcgcgggtggcagctatgacaggctgatgtttgatgtcttctatctgtgtagtagtagtcagttcttcggtgaaagcattgatttccttccaaagtccttcgcagtaagcagtattcttcactgcggcatatacggctgctccggcaaagaccggacaagcatctttgatctcctgtgatacttttatttcaaacataacttattataaaccaatcatcggcatcccaacaattacaaatgccgattattactttctaatcattattcccgacaaaatacggccggagtcaatccccagtctacgcgcagagaaaaaatcatcttgatgaatataggtacagataccggctacttcaatctgcccggcaggaattccggcataaagcaattcactccggttggcttcccacagatcaatatggtgtttgcctgtcttcctcttttttgtagagataatggacatatcaaaaccactttctttgaatgcttcataaacctcatcacctacttcaaatgattcgagtgaaatacttggaccgatgcaggccactacgtcagcaccccgggttccgaaattccggctcatgtgttccattacactactgacaatatgctgcaccgtgcctttccaaccggcgtgaacggcagccaccacttgcagccttctgtcatatagtaacacgggtacacaatccgcagtcgtaacacaaacacaatatcccggcacattggtaatcaaggcatcaatgcctctcaaaagtgttcgtctcacttctaatgactccttaaagaacgattcgtcaacgaccagactcgcactaccatgcttttgctccggaataactaattctttaatttgatgtcccgttatctgaaataacttattctgattacaattcacattgatacatgaatccttggtataaggcgagcaattaaatgagccatatgttccctcactgacacctccatgacgtgttgtaacaaaatgagctacttcggggtataccgtcaatgacttataccccttcagctctttatcttttgtgagtgaaatcatttttcctcccaatcctcttcttcgtattcgtaatcaatgtcctcatcgtcatcatccgcttcctcctcatattcatagatgatgtcttcatcttcacccatgtctttgagttcctgttgcagacgggttacatctttcggacggtgaacaatgtcttctatcttgttgctttccttattcagttcctcccacagaatatctttcaatacggagattcccaaaccggaaacagaagagatgaacacgtgcggaacacccgcgggcaatgtcggttctatctcgtccattagctcctggtcgagcatatcgctctttgttatagccagcacacgttgtttatccagcatttcgggattaaaagtactcaactcattcagtaggatttcatattccttgcggatatcatcactatccgcaggaaccataaacaacaataatgagtttcgttcgatatggcgcaaaaaacgtaatcccagtcccttaccctgactcgctccttcgataatccccggtatatccgccattacgaatgatttaccgtcacgataggaaacgatgcccaagttcggttcgagcgtagtaaacggatagtcggcaatcttcggtttcgcagccgaaatagcggaaagaagcgtagactttcccgcattcggaaaacctaccagaccaacgtctgccaggagcttcagctccatgataactgtcatttcctgcattggctcgcccggctgcgcaaaacgcggcgcctgacgggttgccgtcttgaaatgccagttcccctgaccgccgcgaccgcctctcaacaaaattacttcctgcccgtcttcggtcacgtcacaaaggtattcccccgtttcggcgttatacaccaccgtcccgcagggaacttctattattttatccgcaccgtcttttccgaaactacggttcttgcttcccgattcgccatgacctgccattgcgtgacggtcgaacttcaagtgaagcaatgtccagtaattacgattaccgcgcaagatgatatggcctcctcttccgccatcgcccccgtcgggacctccgttgggacaatatttctcgcgcctcatgtgtgtagagccccttccgcccttacccgagcggcagtaaatctttacgtaatcaacaaaattcgattcagccatacttttctaataatattattataacttgtctattgcttcgcaaatttcagcgaagataccttccatagtacccagaccgttgatatgctggtatttcttttcgttcttgtaccagtcaatcagcggagcagtctgtgaatgatatacatgcagacgttttttgatagtttcttcgttatcgtcagcacggccggagtctttgccacgcttaatcagacgtaccataagttcatcttccggcacctcaaggtcaaccattacagaaacatcctgtcctctctcggccaacatcttctttaatgcttccgcctgtgctattgttctggggaaaccgtcgaaaattacacctttgctatctttgaagctatcgaatacgcttgccagaatatcaatcatcagttcatccggaatcaactgtccctggtcgatataacctttagcagttttacccagttctgtaccgttcttgatttctgcgcgcaatacatctcctgttgagatgtgattgataccatacttttctacaatacgctcgctctgtgtcccttttccagaacccggagcaccgaaaattacaatgttcaacatcttttttacctaaaaattaatttgtatttgaatttagtctactactgtgtaaatatcggggtaatttcgcccgaaaccgtcataatccaatccatatcccacgataaagtcgttcggaatttccattgctacatattcaatgttcaggtccaccttcagtttttccggtttcaccaataatgaagcgatgtggatagattcgggattacgcgtacccaatgtttcgagcagtcgctgcatagtcaaccccgtgtctacaatatcttctacgataacaaccgtacgtccggcaatgtcctcgttcagtccgattacttctttgataactccggtggaagtcactccctgataagaagccagcttgacaaacgatatttcgcaagggattgtgatgtgtttcagcaagtcggccgtaaacataaacgaaccattcaacacgctgaggaatagtgggttcttatctgccaaatcgcgattgatttcgttcgccacgcgaatcacttctttctgaatatcttgttctttaatggaaacagtgaactgcttgtcttttatctgaatgctatccataaccggttattttaaaaaagttgtcgcaaaaatacaatttttattccactctgtacatcttcttctgcaatttctttgaaagaagaagcagaatcggtgagatagttagcgatgttcctccattaagcagtccacagaatatccctttatgaaataaataaaaaagctatttaacagcctatcggataagaataaatagacaataaaaagaatagccggaaagaaataagagtaatcatattttagacgcaaacacccccactgatccacttcattaaatttttagtcgggtagataataaagcggattcccaccttaaatgtacattggtttccaccttagccaaaagtaaattcaacattctcaatgctggcaaaaagcattccttcccttttcctcagaaagaccttgctttcccttgccaaccagccgatagcaagagctacgtcttcaaacgtcaaacctaactcacggcacaaatcgaacattgacagttcacctttttcatttaagatacgccatacttttccggcattcaaaccaattctagtcttttccataatgcaaactttagaagattaaacaatccgttatctatgatttaatcattgtgagcacaggaaaataatgttatgcacattacctacctacaaagataacatttttctcgaaaaaagcaaataatcagcaccataatactcaattctcctactatctccgacactgactgaagcgcttcttcgtcatccttgtgcgaacaggctatatcttatgtccggtacattcatagagaagttactccccattaaatgtaaacttgctgaaaagtttcacttcatgcattacaatctataatcaaagcttgcgtttatagttcttcacctgtcaacaggaactttgctacctatacaaaacaactttactttccataaagaagaattttccgacctatctcctgtaactcatctatctatgattaacacgtttttcttcccataacaaacgggaaaagtcagaataatcatgtacatttgtagggcgaaaactaaaaaaaacatcacaatgaaaatatttccaagcagcagtataaagaaactggacgcatataccattgagcacgagccgattgcctcaatagacctcatggaacgtgccgcaaccgcactgacaaaagctataatgaacaggtggagccgggaaactcccgtcaccgtatttgccggaccgggcaacaacggtggagacgccctcgccgtggctcgtatgctatccgaaaaaggatataaaacagaggtatatctctttaacccgaaaggtgaactctccccggactgccagaccaacaaggaactggtggaaatggcagaggaagtgacattccacgaaatcagcacccaattcgtccctcccaccctgacaccggaccacttggttatcgacgggcttttcggttcgggactgaacaaaccgttgagcggaggattcgcagccgttgtgaaatacatcaattcttctccggctatggtagtagccattgacatcccttccggacttatgggagaagaaaatacattcaacgtgaaaaacaacattatccgcgccgacgtaacgttcagcctgcagcttccgaaactcgctttcctttttgccgaaaacaccgaatatgtaggcgaatgggatttattgaatatcggattgagcgaagagggtattgaagagacggaaacaaactacgagatgctggaactggaagatatacgttcactcatcaaaccacgccaacagtttgcccacaaagggaatttcggtcatgccctcctgattgccggctcgaaaggtatggcgggtgcatcggtattggcagctcgtgcctgtctccgttcgggagtaggactgctgactgtacacgcaccgatatgcaacaacgacattcttcaaacctccgtccccgaagctatggtagaaaccgatgccaatgaaacctgctttgccatacctaccgacacggacgattaccaagccgtcggcatcggccccggactgggaagaagcgaggaaacggaagctgccctgctcgaacagctcgaacattgccagactcccgtagtagtggacgctgacgcactcaacatccttgccaaccaccgccacacactgacacacctgccgaaaggttctatcctcaccccacacccgaaggaactggaacggctgaccggcaagtgtcaggattcatacgaacgactgaccaaagcctgcgaactggctcatgccgccaacgtacatatcatcctgaaaggcgcctattccgccattatcaccccggcaggaaaatgttatttcaacccgaccggaaatccgggaatggcaaccggaggcagtggcgatgtattgaccggagtgatcctagctctgctagcccaaggctatcccgccgaggatgcagctaaaatcggtacttacatccacggactggccggagatttcgcccagaaaaagcaggggatgatcggactgattgccagcgacatcatcacctgtctgcctacggcatggcgacttgtaagcgaataaaagttaagaacttacagttttttcaataacttcattaactttgttttcaaaaccagttaaaaaagaaccgaatatgaaaaagttgattatagcaacgggactactaatggctacttccgcctatgcacaaacagaagtgttgacaggcgttacccgaggaaaagactacggagtggtgtacagccttcccaaaacacagatagaactcgaaataaaagccaacaaagtcagctatataccgggtgaattcagtaaatacgcagatcgttatctgcgactgaccaacgtatctgccgagcccgacgaatattgggaactgaacagcgtaaaagttaaatcagtaggagtccctaacagcgaaacgacttactttgtcaaactaaaggataaaacagtagcccctctcatggaactgactgaggacggaattgtgaaatcaatcaacgtcccttacagcaagagtaacgagactaaaaaagctgctcccgtcattcccgccaccgtaaaagcgaatcctcgtgatttccttaccgaagaaatcctaatggccagctccaccgccaaaatggccgaactggtagccaaagagatctataatatccgcgaaagcaaaaatgcccttttacgcggccaagcggacaacactccttcggacggcgcccaactcaaaatcatgctcgacaatctgaacgcacaggaagacgccatgaccaagatgttctcgggcacacgtgacaaagaggaaaagacatttacgatccgacttacaccggataaggaactgaataacgaagttgctttccgtttctctaaaaagctgggggtagttgccaacaacgacctggccggcactcctttctatatcactctgaaagacttgaaaacagtcaaaataccacaagacgacgggaagaagaaaaaagaaccggaaggaattgcctacaacgtccccggacaagcgcaaatcacgctgaccgacggcaaaaagaaactgtatgaaggagaagtacctgtaacgcaattcggcattatcgaatacttggctccggtattgttcaacaagaactcaactatcaaggtgtatttcgacccgaataccggcggacttcttaaagtagaccgggaagaagggaaataatgaaactctaaaaagaaaagaatatgggcggtgaaggacacatgctcgacatgatacgtcggcttagcgaaggaagagaagcctcccgcctgcgtcgcgagcgaaacaacgagaagctaaaacatttaaaccgtagcaacgaacattacccgttgcccaataccacgtcggaagaaatggaacgtatcatccgtgattccgagaagaaaaaggaacgggacaacagctacttcgtatgggggacactgattatcatgggcgtcctgattgcaagtgccgttatactatgggctatctttattaaataatttattccccgcagagtaacacagagccttttaatcttaccgtaaagagaggattcagtgagagacactgtgttactctgtggggaaatgaaattttataaaaccgtctttctgtaactgataaagataagtagatacacgtgactcgtagcctgcttcattctgaaaatggtctgcgagtttttctatgatttcacgcaccgtccgtttcccgtcaatcagttcccatacaaccgttccgtgttcttccaaatgcacatgaagctccttcgacatccccttcggaacaagaaagcgttgcatccacgtatatttaaaacgagggaaggagagcacaatcgtctccccttccctttcaacggtaatatgttcactgcgacagggaattacatccaacagattgattttctctttcgctgccatactttgatctccttatttcaagaatattatactgagtctttaatattataccgattcttttttaatattagcttcttccagcccataaccttttttcctgttctctgccttcaacatcaaagatacaatcaacgcaagtacaccgaagacagcaaaaatagccataggtaacgtgtaatcatacgtctgtgcaccgtctaccaccggccccttgcaataagagttcagcacccaaccgatcagcaaaggcacccccatcaatccccagttctgtacccagaaaatcaatgcataagccgtacccaactgtttctcaggaataatcttcggaacggaaggccacatagctgaaggaaccaatgagaaagcgaagcctaacacaatcataatgatcgtggcaaaccaccacacattcaggataggaagtgcaaacatagtatgcacgaatatcagcatcactgcaccaatagtcatcaacgttgcacctttgccgatacggtcatacagagaaccgaacaacggagtcaggatgatcgcaccgatcggtaacaatcccggaatcgtccccgccaatttcgggtctacattatatttctgtaccattaagtccgccgcatacttgataaacgggaatacagccgaatagaataatacgcacagcaatgcaatcagccagaaccccttgttagtaacgatatatacgatatctttcatacggaaaggttcttcgggttcaagcccttgtgcgtcaagtgaagcatccaacttcttatcatagaatgtgtaaataaagaaagcaatcgtacctacacaaagcataaccaggcagaaaagaatcggcgcagggatattggtatgaaaagcacctgcctcgtcagtagatccgaagaagtcagccaaaggtacagtcagcaccattgccagagttgtaccgatacgtgccgttgccatttcaagtcccatagccaacgccatttccttgcctttaaaccatttcacaataatcttagagacggtaataccggcaatttccacaccaacaccaaagatagcatatcccaatgctgccaatgctacctgcatcttgaatccgaaaagcagggcaccttccgggaaagtggtagagatagcataatatttcagtccacaaccgaacaccattaacagacaggcgcccattccagtaaagcgtactcccattttatccagaataataccgccgaaaatcaacatcagcaagaatacattgaaccacccgtaagcgctggtaaagaatccgtaatccaaactatcccagagtagttctttctcaagcataggtttcagcggggacataacgtccgtgaggaagtagccgcataacatggtaaaagcgaccaatgctagaacgctccaacgcaacaccttggagtcattcaatttctgttttaattgttctgtcattgttatatttaaatagtagttaataattttattttttacgaccaacaaagatagttaaatctccattgtatacctcacaaagagatttgtttttagaaaaaaagttaggcgcggattacatgaattgcacggattcattaacaaatccgtgtaatccgtgtaatctgcgcccaaatatagagaaatacagaaaaccttctgccccctcttaaatggtttcacccaatccctctctgcaatccgaatggattattcagcagcaggagccggagtttcagccggtgccggagtttctgttgcaggtgcagactctgccggagcagtagcatctgtttgcggtgcagcagtaccagcaggcaagttatacgggttagtctgttgttctttctgagcctgttccaacactgcatctttaacagcagaagaatgaggaacgacataagcggtagcaatactcatgataaccatgaagatagctaagccccaagttgctttttccagaaaatcggtagttttgcgtacgcccataatagcgttggatgaagagaatccggaagcaagtccgcctccttttgagttctgaatcagcacgataaagcacatcaacagggctgcaataaccattaagataacgaataataagtacatttttagttattttgaattagcgttaataatcaatttctccaaaaatctgatttggtctgcaaagtaagcatttttttttggatatttcaaacttaattttttaattatttcaagagctttcgaatatcgttgttgtttaacatagattttggctaaagtttcggtaaaacagctatcatcttcttcctctgccgcactcacttcttccgaaggagtaacagagatttccgcttcctcttttaaaggtttcagacagagaggagcctcactttcgctcttttcaataaaatcgtctatcagttcgtatcctttcaacttcggagcgacttcttccgattcggcagcagtcgtattgtcttccaacagataagttgtatagtccattgaatagtcgaaagttgtctgaccggccacctcctccggcaccgtagacagaaaagcgtcaatcaacgccagggtgcggtctaccgaaggctcgtttttcagcacttccgtaaggggcactcctttcttacgggactggacggcaaaccggtcaccttcgatcaactgaaacagtttccggcgatcggcaatgtacagaaccgctttccgcagttccgcgccaaaattaatatcatggagaatatataggttctttagatacaacaggcgaagcgactgaaaatacggataccgcgcgagcatattgcgcagctcatacaaagtatccctatccagcgtttcagggtgctgaatccattgttgaaagttaacagaagtcattaaaattaccagtttgctacagttgcattaaatatttggtcggttatctctttagtcatttcagcaatcagtccgtcttgtacagccgtcagcaactgactggaatcataggtacggaaagctgaaaactgttgttcgaagtcttcggcgtggtttgtgttgttgacaaagcgtacattcaccgtaatggtcagtttcgtctccgaagaataaccgtcggcggatacagcctggttgtattggttgtagcctgtaatttctccgtcaatctgcaaatccgcgttctgattcggcttcagcagttggagccgtgtctgacggataaagatatctttcagatcctcattaaacttcgttgccaacggtgcatacacatactccgacttaatagggaagtcggcaatcgaaatggttttcaccttatcataattgatagacgaaccattaaacttataggaaacagtacacgcaatgactaccaacggtaatgcaaacagtagcgcaacgcgtggcgttatctttttaatccagttcatattcttttatttttctataaagcgtacgttcggaaatcttcagatcccgggcggcacctttccgttttccatgatgtttctccagtgctttacgtatcatttccttttcaacttcatccagtgccaagttttcttctacatattcttccgtatcctgaatatcatcatcgtcgtctttcggacagacagttgcctgctgcatcggatgaataatggcaggcaccgaaggctggtttgccgttgtcactaccggagtagcgacgacttgccctacttgccccatttgtgccacctgccctgcacgttcagccatcatgttgtgcaccatcttcctcagttcggccacttcctgacgcatatcgaacagaacggaataaagaatttcccgttcgctctcaaaacttttgctctcccgtgttcccagcaatgccggcagacgttgtacattctgtgcgggaagataggtttgcagaatagctgccgtaatctccctgttcgtctcgataatagatatctgctcggtgatattcttcaactggcgcacgtttccgggccacggataagcaagaagttctttcttcgcatcctccgtcaactgaatggccggcatccggtactttgccgcaaagtccgccgcaaatttacggaacaacagaagcacatcatctccccgctcacgcaaaggagggatctgaataggcaccgtattcaaacgataatataaatcttcacgaaaacgtccttccgcaatagcttgcgtaagattgacattcgtagctgcaacaatacgcacatccgtcttttgtactttcgacgaacctactttgataaactcgccactctccagcacacggagcagacgtgcctgtgtaggcaacggcaactcccctacttcatccaggaaaatcgtaccgccgtccgcttcaccgaaatatcctttccgttcaccaatcgcaccggtaaatgctcctttctcatggccgaacaattccgagtcgatcgtcccttcggggatcgctccacagttgacagcgatatactgtccgtgcttcctccggctgtattgatgaatgatttgcggaaaactttcctttccaactccgctttctccggtaatcagcacagacaaatcggtaggagctacctgaatggcaacatctatggcgcgcaacaatgcctcggtatttccgataataccgaaacgctgcttcacttgttgtatctccgtttttgtcattacttcctattaatcttcgtctactgtatccagctttagtttgtcactatcatcccgtttctcgtaatactgtttccgcaacggatttgcatgggctactttctcccgttgacgattacggaacacatcaatggcaacataaactgcctgacggaacgagtcctcgctcgccagtcccttgcctgcgatgtcataagccgtaccatgtgccggagaagtacgcactaccggcagtcctgccgtatagtttactccgtcatccatagccaacgccttgaacggagccagcccctggtcgtggtacatcgccaatattccgtcgaaatgcgtataattgcccgatcccataaagccgtcggcagcataaggtccgtaacaaagaatccccttttcctccatttccttcatggcagggataatcacttcctgttcttccgtacccagcaaaccgccgtctccggcatgaggattgagagacaacaccgcaatacgcggagcaccgatgccgaaatcctgcttcaggcaatgatgaaagatcatcagcttttcctgaatcagttccttcgtaatcgtagtcgcaatctctctgacagggatatgcgtcgtcactagagccacacgaaaatcattcttcatcagaatcatcaacgatttgtttccgttgcccaaacgctcttcgatatactccgtatgtccggggaaagaaaattcttccgactggattgtatgtttgttaatcggagctgtcacaattacgtcaatcagcccctcacgatagtcttcgatagcccgttccaaagcgcccaatgcggccttaccggcttcggggtcaggtttggaaaactcaactttcacttcatcatccgtacagttcactacgctcaagcggttgcatcccgcttcggaagccgtattgataatactgaagttagtctgcacatccaaagccttgcggtgataagcagcgactttcggtgaaccgtagataataggagtacataattccaacatggtaggatccgagaatgtctttaaaatcacctcatagcctaccccgttaatgtctccctgggtgatgccgattcttattttattatcttccatgtttttatttattagtttgttccgcttccttggctgctcctcccaatgggatctggttttgctgaacctcattcggaagtttcagtgtataaagagatgcctccatttggcgcaccaggttacgtttcattttatcaggtgaataaacaaatatttctgctgtgataattcgttggtttttctcatccagacgcgtgtgagacacatacgggccacccatgaagtcccccttcatgcgccataatccgcgtgcttccattgtgtaactgttctgtacattgatcggacgtacatcggtcagtaaagaatccgttgacatataaaccccttccttgaatcccggaatgttcgccttcatcacagagtcacgcttatgcacaaaatattctttggtgaacgtatctttatcgatataaggataagaatacatcacgaagttacggtcggcagtacctgtattggtggaagcccagaagaaatcttttccggtcttagaattagccagttcggcaggcaaccagatatcgcaaccaaataagctatccactttctgtgagataaaattgctgtgcttttcttccagcatggaaatctgacgattcatttccgcacgggtgaagaagtcaacaatagtctgcttattctcttccacaaacttttggaattcttcttcattcggagcctgaatggtcaatatcatttgcggattcgcatacacatccttcgcatatttgaaagaagctttcgtataaatgtcctttatatctacgataatgatattgcggatcaacttcaacgttgaatcataatctttcggtgaagtatacataatacggaaagaaggttccgactgcggcaaccccggcatatccgaatcgagcacatcatgcaaggcccttcctgccgcacgatcccaaacgccgtgatctactactaccaaaagttcgtatgcacgcccactagaagtgtgattccctttcagaccacaagaagcaaaaacgaaggctatcaaagccatgcttaaataagaaaagtactttttcatgatgttcgatttttatattagctcttattattttcctcctgtttcgcagtcgacaacatgccgcaggctgcaaaaatatcttctccgcgcgaagaacggattgtagtaaaaagcccgtgcgtggtcaaatagtcacggaaacgggtcattgtatccatatctgccccttcaagatcaactcctggaatggcatggaaccggatcagatttatcctgcaatccaatccacgcaacagtttcagcaactccttggcatagacttgcgaatcgttgagtcccttaaaaacaatatattcaaatgaaagtcggcgctgtttgctaaaatcatagttttttaacagttccaccatttcggtaatcgaatagcctttttccgccggcatcagttcggaacgctgcaccgccaacggcgaatggaggctgattgccaaatgacaatcactttcttcaataaaacgtttcagtcctttccgcaatccgacagtggagagggtgatacgcttcggactccatgcataaccgtaatcagccgtcattatctccaatgcctgcaatacttcatccaggttatcgagcggttcgcccatgcccatcatcacgacatttgtcaacttgtcccgttccggcaacgaatgaatctgattgataatctgactggcggtcaggttggccttataaccttgttttccggtcatgcagaacttgcagttcatcttgcagcctacttgtgaagatacacacaaagtcgcccggtcatcatccgggatatatacggattctacaaagtggttctcacctactttatacaaatacttcaccgtaccgtccacagagcgcatttcatctaccggcgcctctgctcccacctcatagttctgcttgagcaactcccgatacttcaacgacaaatttgtcatttcatcaatcgaggccaccttcttatcgtagagccacgatgcaatctgcttggcggcaaagccaggcattcccagccttttcgccagcgattgaagctccacaagagtcattcctaaaagaggatatttagacattattccttctgttcatggtttatatttgcaaatgtaaggaaataaagtcgatttccgtacagcgagaatgtaaaagttaacaaaaaaggtcgttcccgaaagaggaacgaccttttgcagttatcgtttttacgattaagtcttagaagaacaggtaacgtgtatcttttacgtttcctttcagatacaagtcattcatcaggcggcttgcgaagcgtgcgtgcatattagtcaacgtagcttcttcatcttttgcgttgaatgtatcgttcagtttgtccttgccatatacttgcagaacaaatacgccggcattacctttgatcggagcgctcaatttatttacttcagcaacagaagcataagcgccaaccaacggttcgctactacgcaaagcagatacataagccggagcagcaaacgttaccattttcaaagaatcgctgacagcgttcggcatagccttgtactggtcgagtgaggttgcgttggcagccttcatgtcagccataatcttttcagctttcttatctttcacgatctcagctctcaactgttcctgtacggctttcaatggacggtatccttccggcttgatgtttaccagaccaacgaccatcatgtgatcgctttcgccacattcatacaagcctgatacttcacccggttttgctttatcgaatgcccatctcaacgcttcttttgtacctctcacaccaccgataccatgttcggagctatacaaatcagctctgtcaagcaatttgtatccggcttcttcggcgttagccaccattttctcaacagaaggattggcagcgataaactggctgaagtcattgtaagcacggttgtatgtttccttgctgaattcaacttcacgcttcaccacagctactttatatttatccttcaccgctttcttgttagtcacctgaagaataacgttagcttggcccaacggcaagtttaccagctcgttcacacctgtgctgttaatagcagaaataaatttcaagttgtcaccgtcaatttgtgcaccttcgtactgtgcagcagtcatccagttggaatcaccggtctgaccgtatttcttagcaagatctacgaagttagcaccacctttgatagcattgtagatactgtcggccagagttttcgtcttagctgcatctgccgcatatacctgaatctgacggaactcaacagaatcggcagccgcagtcttggctacaattttgaatgagttgatcgtattatcgccaccattatagtaaggaccataaacagaaccaacagaagcagagtccaaacgtgcaactacatccgacgggaaagcagtcttgttgtagaacaagtctacataaggagcttccgaaccaaccgaacgaatgaaagaagtataatcatccgttgtagtagccaactgttcagtagcttcgtccacttccttctggatagcggcgcggtcggcagcactggcagttacctgtacgtcgatgtatttgatatcacgagtttcctggtattgcttgaactgttcttttttcttgttatacaagtctttcagttccgattccttcactacgattgtagaatctaccacagaagaataaggaacggcagccagcaacatattgtattggtttactcttgcgtcgaaagcatcctgtgcttccaccgggttagagataagcgctttggataccaatgcctgatacttttcagccagacggctctgaatcagagttttctgaatgaacgaccaatatttatacatattgttgtactgttcagcatactgtgccggcatttgcgattcgttcattttggcatattctaccaggaacttgttcaacatatccttgtcgaagtttccggtttgcggattctggaaaggagtctgtctcaacaaaggatgaacgccagctttcaggatatcctgaatttcagcagtagaaacagtcagtcccagtgcttcagcttctttttcaatcagtttattgttaacgtaggaacgccatacttcatcgcgtacctgactggtttgttcgtcattcaaggcggtcactccacgcatgagtttcaccacttcggtatattcttctaccaagttctgatactcctgagcggaaagagcgtctccgttcacctcaccaacgtcatgtgcctggtgcggctgcatcaccttccatgcgtcacccgcaatgaaagcaaacagcgccaagccgataacaatcaccaatagaggtcctttcgacctaatgttttgtaatgttgccattttgattaatacgatttatgtttattattatttcttctaattgtcgttttagcgcacgaagatacaaaaaatgctaatatgcttctatttattggctaaaaatttctcggtattcgtcattattccatgacttttaggcgaaccagttctattttcgtcgccgtcaccttgattatcttgaactgataacgtcctacccgaatcacttcatgcagtttcgggaaactctgatattgattcagaatcagtcctcccactgtcagatattcgtcggattcaggcaagtcgagaccgaacgtttcgttgactttctcaatctccagacggccggacaatacatattcatgttcgtctatctgcttgctgatataggaagtgttatcatgctcgtcttctatatcaccgaagatttcttctaccagatcttccaatgacacaataccggacgttccgccaaactcgtccaccactaccgcaattgtctttttctgttgcatgaacagtttcatcagcttattggcggacattgtttcgggaacaatcggcacttgcttcacattctcgtgccagttggtcggtgcgcgaaacatctccgaagagtggatgtaaccgaccacattgtcaatattaccgtcatatacgataatcttggagatacccgactctataaaacggcttttcagttcatccagcgaagttgtgagatcaaccgccaccacctcagtacggggaacaatacaatcgcgtattttaatattcgagaagtcaagtgcgttctggaagattttcacttccgtatccagttcctcctcattctcggcattatcaatgctgctctgtacaaaataatcaagatccacctttccgaaagctttgtcggacgcatccttgtttaccttcatgccgaaaatgcgcaggaagatgcaagacaaaccggaagacaacttggatataggatataaaacaacgtaacaaataaaaagtggaacggcgaaaacgttcaataccatattgggattgatcttgaacaatgttttcggcaggaactctccggtcaccaaaataatcagggtagaaatgacagtctgtgccaacaccattaggaagtgattgtcaataaagccggccagcagattttcaccaatgatctgagccatcaggataccatagataaccagtgcgatattgttacccaccaacatggtagagataaactcgttcgggttcttgaaaaagatagaaaggatgcgggaagtaatgccccctttgcgttccatttcaaaacgcagtttgtctaccgagacaaatgcaatctccattcccgaaaagaaagcggagaaaagcatggtgattattagagagatataaatattcatagcttatttcacagaatcttttttcacagagtccggcagggcttttgtttccggttgtggcggagcagtcgcctcgtcgtcgacgtagaatataccttcaatattatgaatcgtataaacggtcatttgctgattggaatcgaacccatgcccggtgataatccggtccggttgctggatacgaataaacttgtcggaatacactttctgcgtagcttcattccagtaaagcagttccgtattgaaacgctctcctttccggttttgtatatccacgtttcctatcagtttccagagtctttccttgtcatagtagtaggcagtatccgctttgatactggcttctatatgaaagatcgaatcgaactgttcaagatacactcctttttcaaatgcccaataagacggcttcttgcggtcgaaaaccagccactcttccgtattcacccgatagcgggtcactcccgaatcggatataagggttgtcactccggatgtctgcatcactgccatggagtcacgttctgtaatagcatcccccgttattttctttttgccaccacaggagggaaataaaagaagcataacaattgtccctaagacaattgttatgctcatgcttttatgcaacaaacggttctttcgttttcgcaacatacgtttatctaatcgttgtagactctccgatccagccaccgatagtaatacggtcgccagccttgtaacccaacataaacaggtcttttgcttgcggagtgtgtgcagaatatctgccgatcaatttgtttgcttcttcagctacactcgggtctacttgttttgcgcgttgcaatttgtcaattataacaaagtaagtacacttgttcagtgcagactcgtcactccagttaggactcattgcataaaggttggcaatcaagatatacggagcgccataattttcattgagaccgatagctttctgacagtaagttcttgcctgtgacaatttcttagcagaagccaacacagcagcagctgcgtatgctttttccgctttctttatattgtcagtttccaggttgatagcttcatcaaagaatttcactgcactgtcgatatcacctttcttgaatgcctgatatgcacatccggtagcagcctctgctgtcggttccattttataagcatagaaagatgcctgcaaataagcttcactttccgtacatttcatcattttcatgatgtcgattactttcttcaaataagcgaggtcagtctgattagcttctactttcgggccataaattccttgcagtgattcacaatcagcagtaccactgtttacaaacaaggcaaccaagttatctttgatacccagcagacctttcttctttgcttcattagtttcagcagcaatggcagcatcagcatattcggaagcagccagataatcctggataaattgttccttatgagcaggatcagctttcagtttatccaaagacatctgcaggaaatagaaaatagtagctccggcagactcgccttttacagcattaaccgattggctcagccattgataagcctgattcacatccagtttcggagccaaggcgatatagtctacagccttgatacccaaagcttcatcagcagaagataccttcgtacctttagccaggaattcatcagtgtatttgatacgcaagtcatgcgtattcatcagttcattaaaatatttctgatattccggattatttctgtccttaatctgtgccattaagcctttcagaattttatatccgtcagtaaaagtgtagaaacggagtgtcggacagttttccaacacagctttccaaggagtatacgcatctttaaagttacctgcacgcacagcttcatgcgagatactactgtttgaattacagttagtcgcatcctgtgctaccacagtagtcgcccctgccgaaaggaacaacatagctacaagcgttttaattttcattgtatctaaattttagttgttagtataatattatagtcgtctattctcttctctttttaattcttgcattactctactctacgcttgaagaaccaacgttcgttgaacgtcaatccgatacttacgcggaagatattttcgttcacaaaggtcgcttcttgtccactgatacgaacaaactgtccgctgatactgaggatagagcgtgaacggggaacaggcagaccgaaaccggctgttacaccatattcgcgggtagccttcttgccgttgatcttataatacggggtcgtataataagctcccaaacgatattttatgtgagcaagataagaacgtcccagcaagttagggatatattccgcacccacagatattttagaacggtcgcaataagcataagtttcatcaaaatcaccacgtatggattcatctgttgtccttacaccaaagtctgctttcgaccattgttgcaaactgtaatccactccaattgtcaggcgtttgtcatagttataggtaaatccgacaccatacgtattagggagtgccaatgtagcatccggcgccacgctagttgaagtttcaaccgtacctgtactattagagaccaactgtgttgtcacatcataatcattccccagttttatttttggagaatatacaacaccaagcgtcactgaatgtttcttatctatatcctttgtatactgtgctccaaagtccagcttataagatgatacagatgcagtcgcctgttgcacaaaattataagccccggatacattcggataataaatagtccgcgaacgggttatatccccccagaaataagaagcatttacacccactgaaagatctttgaataccttcacacccaatccgacatatagttggtgtaagcctccgtcgcctgtataatttctggcataagctgtcgtattactagttgcgggatctgtcgcagtctgagtatccgacaccgtatatcccacattggagaacggcagcaaaccgatactcatcgctagtctcctatgtaaccggaattgcattgccagatagtcgaaactagagtttttggcgttcagcttcacgccaccgccactaatattcatattttgaagactgacgcccccttcaaagaggaaagtcaacgagtcaatggctgtatacgaagcaggattcaacggattgatctgcgctccgtcccggagtccgaaagcaattcctcccattgccttactgtttccgaagttctggtcagacaagtcgccatagccatatcgtgtataaggagagtttgtattattttgagcgattgccattccggtaaccattgtgagcaatagcgcccaaagcgtgtgtttaaatcctaccattattatagtttaaaattctatttaatcctttcaacactaaaaatctatctgcaaagatgatactttttacgctgctatcaaaagaaaaatcatctccgcccgttaaaaaaaccaaaagttcaggatatttatgcttcatagactcaatataacctgaaatttcgtattccatacctttcaacaccccagcgcgtatagccgtttcggtatcccgccccatggggagtttgcgcccgttggagtcaataagaggcaagcgtccggtaaactggttgagtgccttgaaacgcatctgcataccgggagaaatattaccaccatgatactgtcctttcgagtctataaactcgtaagtaatgcaagttcccgcatcaattaccaatatatctctacgaggatattgctcattcgctcccaccacagcagccattcggtcgtatcccagcgtttcgggagtttcgtacaggttggtgaccggaagcggagtcttcgaatcgagccacagcaaagggaaaggcaaggcgaccaaagccgcaagcacccgttcgcttaaatcaatcacggtagctacaattccctgctcaaccgggtatttggcacaaagagcttccagacaatccaatgactgattggactcggtcagcacttccaccatttccccaccgtcaaagagggcaaccttcgcagcggtatttcctatgtcgataattaaattcaatgcattcttatcttttagcgggcgcaaaggtaaagtaaaaaaagagaaatcgaaacatctgagagaaattatattcttttttggttcttcttctgttctctctctcaaaaaagtgtgtcgggcgaactatataatatagaataatatatatttttatttatatatgcacggttggtggcacgcctccatttttcagcaggagataaatcactaattcacaatcaattatacatgcaaaaggggtagcacggttggtggcacgcttttacgtgtataattccggtaaaacagaggctctatttcacccaaatgaaggctctatttaccccaaacagaggctctattttgataaaacagagcctctgtttcacgaatccaacaattctttgtatattcgctgccaaaataaaacgaacctactgatgaaacggtcttttttatatgtaatcttctctcttttcctgttgctcctgcccattggacaaacaactgccaacagcaatgactctatccgtcttagcctgctgacttgtgctcccggagaagtgatatacaccctgttcggacacactgccattcgttacgaaaatccctcacaagggattgacgtcgtattcaattacggcttattcagctttgacatccctaacttcgctctccgcttctcactcggagaaacggactaccggctgggagtgatcgactaccctcattttgcaggagaatatgcctatttcggacgcagcgtatggcaacagacacttaacctgaacaacgaagaaaaggccgaactaatccgcttgttacaagaaaattaccgccccgaaaaccgggtgtaccgttataatttcttttacgataattgtgccacccgtccccgcgacaagatagaagaaagtatttcaggcaaagtgatttatcccgtagaaccgcaagacggttcacgtaccttccgcgagatcgtccaccaatattgcaaaggacatccgtgggcacgtttcggcattgatctatgtatcggaagcgaagccgatcggcctatcacgcagcgacagatgatgtttgccccgttctatctaatggatgcatttgccggcgcacaaattaccggtgattccattcaacgcccgcttgtaacggacagcgaactgattgtggatgccactcccgaagaagatgaaagcttttggatacccactccgctgcaatccgctcttctcctctttatacttaccgccgccgctaccatttacggcatccgccgacggacaggactctggggagtcgacctcatattgttcggtacggcaggtatcgcaggatgtatccttgcgttcctggccctcttctccgaacacccggctgtcagctccaatttcctgttatttgtctttcatccgggccagcttcttttccttccttacatcatatattgtgtccgaaaagggaagaaatgttggtatttgaccttaaatcttattattttaacactttttatagtgctttttccggtaattccgcaaagatttgactttgctgttgtacctttggcactctgtttgctgatacgttcagtgagcaatctaattgtgacatctaaaaagaaataatgaaaggactactaacttcccttatcaccgtactgaccttcaccgggctgcaagcccagtcgctacctgccgcccctaaattagtggtgggactgacgatcgaccaattacgtacggactatctggaagcattttcgtcactttacggcgagaagggcttcaaacgtctttggaaagagggaagagtgttccataacgccgaatatactttcagcggtgtagaccgcgcttccgccatagctgccatttatagcggtacgacgccctccatgaacggaattatctccaaacgctggatggacgccgccaccctccgccccgtcaacagcactgacgacacggcatttatgggatattacaccgatcagacggtcgcccccaccaaattgctgacttccaccattgccgacgagcttaaaatagctacacaaggcaagggacttgtatacgccattgcccccaactgcgacgccgccatttttgccgccggacatgccggaaacggtgctttctggctcaatcccaataccggaaaatggagcgggacaacctactacggagaatttccctggtgggcaagtcaatacaacgaccgccaggctgtcgatttccgtatcgccggcatgacatgggaaccggttttcccgcgggggatgtacactttcctgccagattggcgggatatgcttttcaaatataaatttgacgacgaccgcaacaacaagttccgacggttcatcgccagtccctttgtgaacgatgaagtcaatgcactcgccgaagaagcgctcaacaaaagttctatcggtatggacgatattactgacttattggcactgacttattatgcgggcaactacgcacataaatccgtacaggaatgtgctatggaaatacaagatacatacgtacgtctcgaccgcagtatcgccaacctgctcgatgtgctcgacaagaaggtaggactacaaaacgtgcttcttttcgtcacctcgaccggttatacggacagcgaatcgcccgattcgggattatacaaaatccccggcggagagttttatctcaaccgctgcgccgccttgctgaatatgtacctcatggctacatacggtgagggaaagtacgttgaaacccaccacaaccagcaaatctatctgaaccataaattactggaaaagaaagaactgaacttgacggaaatacagcagaagtccgccgaattcctgatgcagttcagcggagtgaacgaggcatattccgccaaccggcttctactgggttcatggactccggagatctataaaatacgcaacggttaccaccgcaaacgttcgggagacctcgtaatcgacgtcctccccgggtggacaatcgtcaacgagaatggtggcgaaaacaaagtggtacgccattcttatattccttcgccattgattttcatgggacattccgtgaaaccggccgttatccagacacctataacaatagaccatatcgcgcctacactggcacattttatgcgcatccgggctcccaacgcctgcacatctgctcctattaccggcctgcggtaaaagaaacctcacaaaaacagggcgcaaaacataaataaatcagcattttaatgtaactttgcgcaaactattttaattcgataaataataaacatacttatacaaatgggattcaatgaatttttaagctcgattttcggaaacaaatccacgcgagacatgaaagaaatcaagccctgggtggagaaaatcaaagctgcttacccggagattgagaaactggacaacgacgcactccgtgccaaaacggaagaactcaaaaaatatatccatgagtcggctaccgccgaacgtgcgaaagtggaagaactgaaagcgagtatcgaaagcctggaactggaagaccgcgaagaagtctttgcacaaatcgacaagatagaaaaagaaattctggataaatacgaaaaagcactggacgaagtactacccgttgctttctcaatcgtcaaggctactgcaaaacgtttcacggaaaatgaagaaatcgtagttaccgccactgatttcgaccgccaactggctgctacaaaagactttgtacgcatcgagggcgataaggccatttatcagaatcactggatagccggtggtaacgatacggtctggaacatggtacactacgatgtacagttgttcggtggtgtcgttctgcacaaaggcaagattgcggaaatggcaaccggtgaaggtaagacattggtggctaccctccccgtattcctgaatgcactgaccggaaacggtgtgcacgtggttaccgtgaatgattatctggcaaaacgtgactccgaatggatgggccctctttatatgttccacggtttgagcgtagattgcatcgaccgtcaccagccgaactccgacgcacgccgccaggcatatctggcagacatcacgttcggtaccaacaacgaattcggtttcgactacctgcgtgacaatatggcgatcagcccgaaagaccttgtacagcgtcagcacaactacgctatcgtcgatgaggtcgactccgtattgatcgatgacgcccgtactccgctgattatctccggtcccgtgccgaaaggtgacgaccaactgttcgagcagctccgtccgctagtagagcgtctggtagaagcacagaaagtattggcaaccaagtacttgtccgaagcaaaaaaactgatcgcatccaacgataagaaagaagtggaagaaggattcctcgccctgtaccgcagccacaaatgtttgccgaagaacaaagcattgattaagttcctgagtgaacagggcattaaagccggtatgctgaagacggaagaaatctacatggagcagaacaacaagcgtatgcacgaagtgacggaaccgttgtacttcgtcattgatgaaaagctgaacagtgtagacctgaccgataaaggtatcgacctgatcaccggtaactccgaagacccgacattgttcgttcttccggacattgccgcagaactttcggaattggagaatatgaacctgaccaacgaacagttgttggagaaaaaggacgaactgcttacaaactacgctattaaatcggaacgtgtacatactatcaaccaattgttgaaggcttacaccatgttcgagaaagacgacgaatacgtagtgatcgacggacaggtgaagattgtagacgaacagaccggacgtatcatggaaggccgccgttactctgacggattgcaccaggctatcgaagccaaagaaggcgtgaaagtggaagctgccacacagacttttgctacgattactctgcagaactacttccgtatgtatcacaagctatccggtatgaccggtacagccgaaacggaagccggcgaactctgggacatctacaaactggatgtggtagtgatcccgaccaaccgcccgattgcccgtaaagatatgaacgaccgcgtctacaagacgaaacgtgaaaaatataaagccgtaatcgaagaaatcgaacaactggtgaacgccggacgcccggtattggtaggtactacttcggtagaaatctccgaaatgctgagcaagatgttgaccatgcgcaagatcgaacacaaggtgctgaatgcgaagttacaccagaaagaagctgatattgttgctactgccggtttgagcggaacagttaccattgccaccaacatggcaggtcgtggtaccgacatcaagctaagcccggaagtgaaagccgcaggcggtttggcaatcatcggtacggagcgccacgaatcccgccgtgtagaccgccagttgcgtggtcgtgcaggacgtcagggtgacccgggttcttctgtattcttcgtgtcactggaagacgacttgatgcgtctgttctcctccgaccgtatcgccagcgtaatggacaggctcggtttccaggaaggtgaaatgattgagcacaagatgatttccaactctatcgaacgtgcacagaagaaggtagaagaaaacaacttcggtatccgtaaacgcctgttggaatatgacgacgtgatgaacaagcaacgtacggttgtctatacgaaacgccgccatgctttaatgggcgaacgtatcggtatggatattgtgaacatgatttgggaccgttgcgccaacgctatcgagaacaacgactacgaaggttgccaaatggaactgcttcagacgttggctatggaaactccgttcaccgaagaagaattccgcaacgagaagaaagagaaactggctgaaaagacattcggcattgccatggagaacttcaaacgtaagactgaacgcctggcacagattgccaatccggttatcaaacaggtatatgagaaccagggacacatgtacgagaacatcctgattcctatcacggacggtaaacgtatgtacaatatctcctgtaacctgaaagctgcttacgaatccgaatccaaagaggtagtaaaagcatttgaaaagtcaatcctgctgcacgttatcgacgaagcatggaaagagaacctgcgcgaactggatgaactgaaacactctgtacagaatgcaagctacgagcagaaagacccgttgttgatttacaaactggaatctgtaacgttgtttgactcaatggtgaataagattaacaatcagactgtttctatcttgatgcgcggacaaattcctgtacaggaagctccggatgaacaggctgcccgtcgtgtagaagtacgccaggctgcaccggaacagcgtcaggacatgagcaagtatcgtgagaacaagcaggacctgagtgatccgaatcagcaggctgctgccagtcaggatacgcgcgagcaacagagacgtgaaccgattcgtgccgaaaagaccgtaggacgtaatgatccctgtccatgcggaagcggcaagaagtataaaaactgtcacggaaagaacgtttgataaagaagagttcaagtagttaattagtcctaactactttactaaataataaaggctgcctgacaagtcagtagtatccgcaattccccttcttcgggaagaaggggtggctgaaagccggggtggtaggtggatacacaatgctgataataatagacttatatattcacctaccacctccccctacggggactcctccttcccgaaggaggagagttttagatactatcgacttgtcaggcggcctctttcttttattcgtgtaaaatagtacttttgttcaaactactaaatgaatcaaactatggcaaaatcttattcactggcattcatctctctgttcctgttgctattcaacagttgccagagcatcgaacagatttccattgattatctgcaacccgccgacttgagttttccaccccagctccgcaaagtagctgttgtgaataacaccagcgatgcaccggataacaaattgattacagaagtacagaaaacgaaggaaaacgttccggaagtaagtcgcgccacagcctatgccaacggtgatcccaagattgctgccgaatcattggctgaagaaatagcccaccagaattactttgatgaagttgtcatttgtgactccgccttacgtgccaatgacaagttagcgcgtgaaaatatgctaagtcaagaggaagtcagccagttagcttccgatttaggagttgattttattattgcattagagaatctgcaattcaaagcaaccaagaccattcgttatctacccgatttcaattgttatcagggagctatggatgtaaaagtatatcccacagtacgggtttatgtgccgggacgaagcaagcccatgaccacccttcaccctaatgacagtatcttttgggaagatttcggaggttcggtcacagaagcggctgcccgtatcatccccgaaagggaaatgttgaaagaagctgcggaatttgcaggaacagttccggtaaagcatctggttccgatatggaaaacgggaaaacggtatttatacaccggcggttcggttcagatgcgcgatgcagctatctacgtccgcgaaaattcatgggataatgcattcgaactttggcatcaggctttcgaaggaaccaagaacacaaagaagcagatgagggccgccttcaatattgccgtgtattatgagacgaaagatagtctgtctcaagctgtgaaatgggcggaaaaggcacagcaactagccaagaagatagagaaaaagaatgttgtcaacaatgtcaaagcgagtattgacgatgtgccgaattattacctcaccagcctctatttggccgaattgaaggagagaaatgctcaaatatccaaattaaagatgcaaatgagccgatttaatgatgatttttaaggaaatcatgtatcaaatcttattttttttatacctttgaactgacaaaaagaaggaacctatgaaactgagccaacaatcattatctatcatcgaatcggctatccaaaaggcagtcggcaaatatgtatgcaattgtgaacagacagtcgtaaccgatattcatctgcaacctgaccagacgtcagggcaactgaatatttacaacgatgatgatgaagaactagcaaacgtcatggtggaagaatgggcaacatacgacggcgatgatttcctcgaaaatattgagcccggcttacgtagtatcctttgcagaatgaaagatgcgggtgacttcgacaaggtgactatcctgaaaccttattcgtttgtactggtggatgaggacaaagaaacggtaactgaactattgttggtagacgatgatacgatgctggtgaatgacgagctactgaaaggattggataaagagttggatgattttctgaaagagttgctggaaaagtaaaatctaatatatggcaataaaaaagattctgttagtagcttcttttttacttctgcttatacagacctatgcgaacacggcttattttaaacacttaagtgtacaggatggcttgtcgcaggtcaatataatatccatttatcaagatgagacgggagcattatggtttggttcttttgaaggaatcaatcgatataatggccagtccgtcactgtatttcacccttcccaagacaacataggtctgaccgaaaatgaaattatggccatttgcggcaataaaaaagggaatgtatacatacaggcactgcatgacttggtgtgctacaatacccgcacacaacggtttcataaattacgcgcaaataatgtctccaacatatactacaacaacgatacgctttggattgccgggcgcaacaaactggagttccgggtggaaggagactctactatccgcctgctcaccactttcaaagaaaacataagagtttcttcacctatctgctgcactgatgacggatatatatacataggtatgaacaagggacttctacgaatcgaccgtgcacaacccgaacgccaacactctctcctgcccgacatcaaagtgcaaagtctttatcaggattctcaaaagaacttatggatatgtacctcccaccagggagtgtatcggctggctcccgacggttctatcctcaacttccgcaaccttcccgataataccaactcattatcgaacaacgatgtgcgctgtgctatcgaagatgacttaggaaatctgtggttcggcacattttatggactgaataaatacaacccgtcaacacaagtatgggagaatcatgttcatcaaaataatatatcccatagtttgagccactcatccattttcgctctctacaaagatacgcaaggaggaatctggatagggacttatttcggaggtgtcaactactacaaccccactgatgatcataccagctactacgaagccaatcccgatattcctcatgcactcagtttccccgttgtaggtaaaatgcaggaagattccgaacataatttatggatatgtaccgaaggaggaggactgaatttcttagaccggcaaacccggcaattcacccgatatgtccacaacaagggaggcttgtccggaatcgggcacaataatctgaaatgtatctggctgcgcaaagaaaccggacaactgtatatcggtacgcatacagggggactcacgatctttgatactcgaaggaaaacggcacatacactcaaaaatatccccgacaaagccaactctttacccagcaatgtgataaatgacttacaaccctataaaggaaaactcgtcctgtctacccaagcaggaatcgtagccatgaatccggaaacggaaactttcgagccgttatccgccctgacggacgtccggagtcttatagaggactatatttatgtaacatttcatatcgaccggaatgacaatatctggttagccaacggcaacggtggaatgacccgggtgaacctgttgacaggaaaaagacagaattaccggcatgacctcaaaaaagaacataacatcggacgcttcaaggtgttacatatcttcgagaaccacttgggcgaattattcttcagtacggcaggatccggattattcaagtatgaaccggaaacagattctttcttccgcttcgccatggaggacaatcttctaatgagtaattattgctattatgtcgccgaatcgccttcacacgaattgttcgtactccacaaccgggggatctcctgcctgaattctgaaaaaaaggaactcacatatacatacgttattccatatatgagtttcggacaaggctcatgtatctattttactcaaagcggagaattattcctcggaggaaccaacggcttggtttctctgccgggaatacagaatctccccacatcgaatgatcatcaattctacttcgaccaactgattatcaacaataaagtgatacaacccggagatgagtcacacatcttgtcacaaacgatgccttatacggaatctatcaagttggcacacaatcagaacagtcttattctggaaatagccacctccaattatacacaaaacaagtataaatatgaataccaattggaaggtttcgaccggacatggcttccgctacattccccgaaaatagtatatacaaatctcgacccgggacattataaactgactgtacgcgagaaaaacgattcgcaaacgatctgtggtgaacgttcgcttcatatctatatccgcccccctttctatgccaatctctatgcctacttattatatatcctgattctctgccttgtactgtatgctatcatccgttttaacacccggcaggctaaactgaaagcatcgctggaatttgagaagaaagaaaaagaaagaatcaaagaaatgaaccaggtcaagctgcgtttcttcacaaatatctcacacgaattccgcactccactaacgcttatcatcggacaaatagagaacttattacaattaaacaagctctctccctccatgtacaaccgtctgctgcgtatttataagaacgccaaccacatgcgcacgctcatctccgagctgttggatttccgtaaacaagaacagggttatctgaaactgaaagtggaatgccgtgatattgtcgccttcaccaaggaagtttatatgtcattctatgaatacgcactcaagcatcacatcgcatatcgtttcgagacttccgaaccaagtattaatctatggttcgacccggtgcagatgcagaaagttattatcaacctgctatccaacgctttcaaatatactcccgcagaaggaaatatcacagtcagtatccgtatgcactcccaacaggtattgctccaaatcaaggatagcggaaccggtatcccacaggagtcaatccataaaatattcgaccaattctatcagatagacggacaaagatccaatttatctttaggaacgggtatcggactgaccttgagcaaaaatatcgtggaattggatcaaggaaatatccgtgtagaaagtaaagtggatgaaggaagctgttttaccgtaatcctgaaaacaggcaacagccattttaaagcggaccagctacaaacggaaaatacatcggcatgcatgattagcacggagctgattccactggaggaactgccattggaagaagaaacagcagaacatacactcacagaaaagccggtcatactaatcgtagaggacaacgacgatattctggaaatgctgaaggaaatatttcatcccatttatgaagtacataccgccggaaacggaaaagagggatttgaacaggcgttgacaatacagccggatattgtactaagcgatgtcatgatgcccgaaatgtccggaaaggaaatgtgttataagataaagaacacagttaacctgtcacatatacctgtcgtactattgactgcgcagacatctgtggaatatacgatagaaggatatatgtatgaagcggacgactatatcacgaagccgtttaacgtaaaactgctcgtctcacgctgcaacaatctggtgaaaagccgaagaaagctgattgagaagttcagaaatcaacagccggccactgtgacggatattgccgtcaaccaagccgaccgggaacttatcaagaaggcgacagaaatcatttccaacaactttgaaaacccggagttcaatatgaatgtgcttgccgccgaactaggattgggacgcaacaagctatatacacgtatgaaagagatcaccggtctgactcctaacgaatttacgcttaaaatgaaactcgacgaaagtatgcgcctgctcaaaaacaacccggaactaaatatctccgaaatatccgaccgattaggattctcaacgacccaatatttcagcaaatgtttcaaatccgtcttcggaatggcaccgcttacattccgaaagtccaattccgccgcaacagatacatctgactaatccaataaaacatgatttatctttcccgaggacaataacactggacattcgggacaattttgtatgtcctctaagcaataaatacgcaatctttgcaccattaactaacaaaaacctaaaaatatatgaaactagtatccattctatctttttacttattgtcaacattttcgactctgtatggcaaaggtgataataaaataatcacccattctttcgaccgggcagaacaacaatatactgccatgctgaaggccttgcccgagccagtcgcttatccgcgtactaccgataacaacggaaagttgcgtaccactccactcaatgactggacggaaggcttttatcccggcagcctttggtatatttacgaaaacaacgggcagaatacatggaaacaggaagcaatccgctggacagaagccttggagccgctaaagaaacagaaggagcaccatgacatcggcttccttatttattgcagcttcggcaatgcataccgccttaccaaaaaggaagaatacaaacagatcatcatagaagcagcaaactcactctgcacgcgtttcagcccgaagacagggtgtatcaaatcatggaattaccggaaatcatggaatggtaaagacgagtggttctaccccgttatcatcgacaatatgatgaatctggaattactttatttcgccagcaaagtgaccggtgacccgcattatgcagaaatagccaactcgcacgctatcaccaccgcacgggaacaattccgtgaagattacagtaattatcatgtagtcaactacgacccggaaaccgggaaagtactccacaaacaaacctgtcagggattctccgacaattccgcctgggcacgcggacaagcatgggccatttacggatacacaatggcttatagagaaacaaagaaacccgagtttctggaaatggcacagcacaccgccgaattctggctcaaccactccaatctgcccgaagacatggtgccctactgggatttcaatgccggacaggaaggctatgtccccgaatgggagtatgacgcaaacgacttcaaagagataccgagagacgcctcagccgcagctatcacagcttccgccctacttgaactttatcaatatgtagataagaaaacaggaaaaagatattaccaggcagcagtgaaaacgttaaaatcattggcttcgccaagttatctggctacccaaggaaccaacggtaactttctcttaaaacattgcgtaggaagtatcccgcacaaaaacgaaattgacgtgccgttagtatatgccgattactacttcctggaagcactacacagatataagaattcaaaaggtataaagtaagctttttgacagaatattagaataagaacttaacacagaaagaaggtggtccccctatccacccttctcccacaaaagaggccggaaatgttatcacatccggtctcttttacgtttatccccatagaattaagcatatacaattgtaccccatgacgattttaccctactttcggtacaatcttcctaggcaatctaccttcaaatacacaatctttgcactatcattaatcatctgaaaagaatcataattataaaacatcttataactaatttttaaattataaacttatgaagaacagcactcaacgaacgtcatgcgttcacaactcaaaaaagagtgatgcattatccggaataatgcaactctcaatggcgatactatttgcttttagtatcacgacacaggcggaagccatagaatatccgtctgcaaaagtacagactgcaatcaaccagcaaagtaaaatcaagattacaggcacagttgttgatcaggcaggaattcccattatcggtgctaatataaccattaaaaaccaaaccggtaccggaacgatcaccgatatcgacggccggttcacattggaagtccccgccaattctaccctttcgatatcctatatcggatacaagaatcaggaaataagagtcacaagcagcaaaccacttaccataaaactccaagatgatgccgaagtcttagatgaagttgtagtaacagctttgggtatcaaaagagaggaaaaagcattggggtatgccgtacagaaagttagcggcgaccaactgaccaccataaaaagcgtagatgtgacttccggactgaacggtaaaattgccggattgaaggtagaaaacagtacggaattcaatgaagcccccaatctaaagctgcgcggcgaaaacccgctgattgttattgacggggttccttacaaaaatatgtcgctacgggatatcgcttcggatgatatagaatctattgatgtactgaaaggggctacggcttccgccttatatggtgcgcggggtggttcgggtgccgtcatgattaccaccaaaagaggaaaagaagaagggttgcaggtaaccgtaaacagcagtacgatgttcaatgccggatatttaaaattgccggaagtacaaacatcttacagttcgggaaaaaatggtatatacaatgataactccagttatgtatggggagccaaactggacatcggcaatgaagccatgcaatacaacccgtatactcaagaacgggaaatgacagaactgacttccagagggaaaaataacctgaaaaacttccaggaactgagtttcatcaccaacaacaacgtaagcgtcactcagaaaggcaaatatggaagtatccgtacctcattgacacacgtctacaacaaaggccaatggcccaacgagaaattaaacaaaataacctataccgtatcaggagacatgaaatataagaaattcagttccgaggccggaatcacttacaacaagagattctatcccaatatgggcggatcggcctatcacggtacaggctatatttacaatcttctagtatggtcgggcagtgaatacgatatacgggattataagaattactggaaaataaaagacgaacaatccaattggtgggaccggggcggttggtatgacaacccttattatatagccaacgagttaacgagttcggacaattacgatgtagtcaatgcctttgtcaatgcttcttatgatattacttcctggttgaaactatccctgcgttcgggtgctgatatgtatacggaaaaaagcgaaactaaagctccggtaggttccgtgaccggcaagggagagaaaaaaggatattattctatctatcaaaaaagaggattcagtaccaataatgatattatgctgactgccgaacataaattcggtgatatcagtgtggacggattcatcggaggaaatatttactattaccagaatgacaatttaagctcaaacactgccggcggattaatcattccggggtattattcgctaaaagcatcggtagaccctgccgaaaccagtaaaacttataacagcaaacaaacgaattccatttacggaaaaataggtttagcttataaaagtgcggtctttgtagaagcaacgggacgtaacgactggtcgtcaaccttaccggaagagactcgttcttatttctatccggctgtttccggtagcgtagtgctctccgaattcatcaaaatgcccaaagttatcgacttctggaaaataagaggttcgtggacaaccaccaaacatgatatggatgtatatgctatcaatgatgtttattctatcaataccgatgtatgggacaacatgagtgccgcctactctcctacaacaattcgaaacagcctgctttctccttcccaaacacgttcatacgaactgggtacagccattcatttatttgggaaccgcctgcgtctggattatacctattataatacactcaaatttaacaatacccggaacgccggactcagttctgtaagcggatacagcaatacacaagtcaacatggacgaagaacaagtaagaaaaggaatggaactctccatttccggtgatatcataaagaatcgggaattgacatggtctgccatgttcaactggtcacgcgaccgctactattaccataaaatagacccggtatactctactcaaaaaccttgggtagccgaaggagagcgttgggactgggtagcaatttacgactaccaaagggatccggcaggaaatatcgtacacggaagtgacggattccctctcgtcaataagtttacgacactcaaaggatatagcgaacctgattggatatggggactcagcacatcggtcaactggaagggaatcaccctgagtatcaccattgacggacgtgtaggaggtgtcggttattctatgacagaccaggccatgtggaactccggcgcacatatagacagtgacaatcaatatcgttacgaagaagtagtcaacaacaataagacattcacaggccaaggggtcaaagtggtatcaggcaaagccgaatgggatgcaaacggaaatgtaattatggacaaccgtgtatttgctcccaatgataaagtcgtttcgtatcaagactatatgatgaatactaatccatacgcatcgggtgataataaaagagcgcaaaactggttcgacaagacgtttatcaagcttcgcgacttatctatcagttacgaaataccacaatccgtttgccagaaaataggaatgaaaggtgcttcagtcggctttgtcggacagaacctgctgatgtgggcaaaagagtttcgcttcagtgaccccgataaagtgcaggatgcactaacctcaccttctatccgttacatgggatttaacgttaagtttgacttctaaaagaatgaataatatgaaagcaataaaatatatcgcgagcctgctcgccggaattaccctattttcatgcgataactttgaggatatcaatacgaatccggactctgtgaccaaagtatcacccaagcttctggcaacgggtgccattgtagggcttatgaaaccttccaaaggcaaaaacttcatttataatcaaatgacctgcaaatatatcggctggtcggaagcattggaaggaacgcagtataacaacttcggacgcgaaagtttcagcggctacacctcgctgaccaactataagctcatggcggaactgacagacaaagacgagacaatgaatgaagataaaaggaacgcatacaaaggtctggcacttttcctgaaggcttaccggctattcgaatacactctcaatgtaggtgatattccctatgaaggaatcctcgagggcaaggaaggaaatctgactgtagcctacaacacacaagaggatgttttcaaattcctgctcaatgatctggataaggcacacgaatacttccggaacgccaaccagacaacatttgacggtgatcctatctttggcggaaaggtagaacagtggcacagagtatcgaatgctttagaattaagagttctaatcaacttatccaagaagattaattccactgacatcaatattaaatccaaatttaatgagatactcgaccgtaacttgttgttacgttccaacgctgataatttacaaatcactttctccacgaaagaaggacagctatatccatttaatgaatcattgcattcctacaaacaatacgtaatgatatccggtctggttattgacgcactgaaagccaatgaggactatcgtctcttttattacgcaaatccttccgaagggaaattaaattccagtagccaggaaaatgactgggatgcttacataggaatcgacccgtcggatccgatagacgaattaaagctaatagccgataagacgaaagaattctgccagttcaacaacaggtatacttcttacgaacccggagaaccttatatccgtataggctatgccgaacagaattttattcttgccgaagcggcattacgcacatggatcaccggagatgcagccgaatattataaaaaaggaattgaagcaagcatgaaattcgttgctgacaatacgccggatgcacagaagtatcatcacggacgcaaaatgactagtgacatcattacccaaacattagcaaaacccggtatccagctaaatggaactttcgaggaggatctcaaaaagatcataactcagaaatatctggccaatttcatgcagtcaccctatcaagcctattatgactacagaagaaccggttatccggaattcccgatcaatccgctgactaaccagaatcctaacgaacctaccaaaatgccggtgcgttggttatatcccagtgcagaatatgattataacaaggcaaatgtagaagcggctgtacaaaggcaattcaacggttcggacgaagtaaacaagttgatgtggattctacaagaataaaaaagaacggtatgaaactaaatttttatatactactcttatgccttagcagcataggaataacaagttggggtcgcaatgcgaccccaacctctcatctcaccgtcctgcaactcaacatctggcatgaaggaagcatcgtagaaggaggatttgaagccatagccgatgaagtggcacaagttgatgccgatatcgtttttttcagtgaagtccgcaactacaatggcacctgctttatatcccgcatcattgaggcacttaagaaacgtggaaaaacttactatggagaacataaccctctggatgtaggcattttatccaaatacaatataagtcagcaggagattatctatccaaaggacagcggttgcggctctatcctgaaagcaactatcggcatagccggacatactattgccgtttattccgcccacttagattataagaattatgcttgttacttacctcgtggttacaatggaagtacttggaagaaaatgacacaacctgttcataatgcggattccattttagcggccaaccggatcgcctttcgcgaagaagccattgaagtattcatcgaaaacgcacggcaagacattgccgaaggagccattgttctattaggaggagatttcaacgaaccttctcacctcgactggcaagaagatacaaaagacctatgggaccataatggggtagttatcaattgggactgttcaagtatactctgcaaagaaggattcaaggacacatatcgaacgctatatccgaacccgatcacccacccgggattcactttcccttccgacaacgacaagatgcctgtcagcaaattaacctgggcaccagatgcggacgaaagagaccggattgattttatttacttttatcctaatcaggacattacaccgatatcctctatgattctcggtccgtcccgttccattgtcaaaagtcagcgcatagaagagaatacagaagacaacttcatcacccccaaaggcatatggccttctgaccataaaggagtaatagccactttcaggatatctccccaatagaacagacttttccagcttagagccgtattatggggagatactgctgatctgtcggacagctcctctttttattacttctatattactagtttatcggacatatagatccaatgtgttggacatatatagccagcgcgttgggcatatagatccaatacgctggacatatagattcagcatctcatccataacagcctgattacccgcccgttaaacccggtagacaaattgctgttactttatttattttcgtccatagttgaaacaaattcttcgacttttgaaaagcagcgctttaggtaggctaaagctatgctttacacactctaaagcgccgctttagagttcaaaaaaggacactacatggaagtaaaacgtacagggtgaagaagtgaaggacgctttcaatcgtttctccttctctccttcaccctgtatctatttattcatcggcagtccaacacgaagatgaacctgatgaaccctcaataagagtataaaaataaaattgctattatcccatacttttgaatcaatactcatgagccttttccgcccaagctttctccataccatagaaattaatcacttcaccgctagctttgccttccaactcctgttgtttctgctcaaagaaagttttccaacgcagataatacaaatctttcaaaagaccactccattcacgatgagaataatcatgcaaacctccctgattggaagcgatactatcaccccagactgtgattaatgcagatgcattccattcatagagtttcttttccgcgtccgtattgcccaaagaacgtgcggcagtcagccaagaagatacggagaattctttccgggtagacaataaactgtcttgcgacaaaatgagttcaaggaactgctgcgtctgcttccggaaattctctttgtctttacgatcataactttgggatatttcatcgagcaatgcattgcctttatcagcattactctgacgtacgatatccaccaagtcatattcaaaattattgttgcctttatattgttcagccacagagagcattaagtccgcagctttcgaagtagaatcaggcgaatagaacagtttggaatatccccatgtagacgttctgtccaaatggaaacccggacgggcacacaaaagagattctaacgttccctctcccggagagttcttgggagcattataaaccgtatgttccaacgctctccatgcttccataacttccggtgacaattcactaccataacgggctttcagatatcctcgcaaccatgtatccggcgagaaacgttccgcacgccacggcaactcatacaacaattcaaacatcaccggattattctcaataccttcgggagtagcacctactccacgcaatgttttcccatttgcatgtgtacacgcatcgtaatatccgttcaccaactgattcattcgtccatgcaaaccgacatttcctccgaagttcaacaacatacaataaagccagtcatgcttgccaaagcctttctcacgataccacatcgaatccgagtctccccattgcggacgtttctcgctatacaaatccagcaccaacatatctccggcattcaacacatcgatcatagccggacgcggatttacttgccatgcctgaatgacccagacagcttccggattggctttcttcatggctttcattatagaagttccggccttcgccaagtctaccccttctgtgttgcctccctcatggaatgggtccatactataatatttagcttttccgtaaagtttctccaattcttcgtagtacatagccgcaaaagaatcgaaatgctcgtcttccgaagaaaggaaggccggacgagggaaaccacaccatgtgccggggtcggcaatctgataacctagtttctcaccgatattacggggaaccattcctgcataacccggaaatacgggttcaattcccagttcccgcatacgggatacgatcttcttttgaagtgcttcttgttgctgataccaactgtcaggattgggtccgccccacccttccagattgttcatctgccaccaggccataaatgccggaccggagataaattcattgatttcttccgttgtgtatccgacacgtttcagcagattataccagactacttccattccggttatgctcaaaggcatattaatgccatgcaatgccatccagtcaatctccttctcccaacgttcccaatcccagaaagccattgagtaggaataagtacaataattcagataataacggttttgcatagctgtctcctgacggattttccccgtgggaagagggagcacttccggcaacttctgtgacgggttattccaggaaagatgaataccggctacatacttcagataccagttcagtcctgttgccaatgacagatcggaatttccgactatcaggactttaccgtcttcggcagttatttcaaagtaatccttagacacatcgtctttttccggtgtcatccgaaaaaggattcgatctttcgaggttccttccgttacacgttctgccaaagaatttaccggtaactgcttcggttggcagctacaaaacaaagtcactccaaataataaggttatcaaaatacgtatgttcataatcgtgttttttagatttgccaaagatagtaaatagaaatcaaatttcttactacctgtacactttaatcaatgaaacaagaagaattgcgggcgaccgtatacgtttatctcttttaccttccctgacaaaaaagcacctttacgtactttgaagcgaagggctgatattttatagatttcctttatgtccacaatgatacggtgcggctgtccgggttccgttgccggatctgtatgccagaatgaagaaatatctccgtcgaacaagttctccgctacacccagattcttatctgcctgctcgctgcttacgtaaacaacttcccatttggtcttatcaatcggttgtcccttatcgtccaacaaatcaacctctgaaatacacgcctgattgtcttccgtataagaagaaagcgtttcgatgcaaaaatgacgcagagtgcgcacaaccggtaaatcaacttgctgccaatcgtttgtctccgccaaagtggtgttcagaagaatatctccttcttcgagaatcggactgcctgtttgattgcgttgctgtttctccggcttgtttttatcaatacccaaactgtcgagaatcggcttgtccaatccctgcaagttcctctttcccgtatcctccatttcgaaaacaacaatctcattctcaccttttttcaaccagggagcaggtatataaagagtttgttgcggaccgatattccagaaacgtcccaacgatttaccgtttacccagacagctcctttaccccattggctcatatcgacaaagcaatcgccttgctgttcgataatgaatgtccctctatgaaatgccggaacgcctttgatttcttgtccgaaagacaaggaagatacttcttccttataaagaggaagcggtgtgattgaccaccctgtcaatttctcattcccccaaagcacctgacttgtaattcctttacggttaaaaagaatatcgggaccataattgacccgtccggtattttcaaccagaatctcaagtgtggcgggaactttatgaatatccaatgtcgtgctattctgattataacgacggtcaaggctggctacttgtttaccgtccaccagaataacggcataatcacgcaaatcctgaataatcaatttctgttttcccggtgtcttaatggtagtctgatagtggatatatccgaaatcggctcctacatcttccatggataaaacatcttccgattgtatagtctgatgaaatgccgtagttaacggagcactttctttcagctcgaccgtcgcaaaggttgtggtcggattatcggcaggcacttccggcaactgtgttccctccggcaggtatttctgaatgatctcccggaaagcatgatatttcggatagcagttgccccattctccaagcggagcgtcataatcgtagctggtaggttggggacggaatcctccgctagtattggcaccgttcatataccagaaatttgttcctccgtggaacatatacatactgacagatacgccatgtcccaacatccaatccagttgttcggcaggacgctcgtaggcaacagaagaatgacgtttcccccattcatcaaaccaagccggatagaactccgccacaaagtacggaccgcccggatgatatttatccacgattttaaatatatcttcgccgaacacgccgttcaaagtaggcaatgcaccggcaatatgtccggcttccacctgcccaccgccgtcgcaagtaaacaacggaacattgaatccggcttcttgaagcatatcacggatagcagcaaggtattctttgtcggccgcatacgaaccgtattcgttttccacctgtaccatgataatattaccgccgttgttgatagtcagaggggccagttgcttgccaagttccttgatatatcgttcgcaataagacatgaaacgcgggtccttactgcgataagtcaagtccttttctttcaggagccacgaaggataacctccgaaatcccattccgcacacacgtatggcccgggacgaagaatgacatacagcccttcttcctgtgcaatacgtacaaactcggcaatatccgcttgtccgctgaaatcaaatactccgggttgccgttcatggaagttccagaatacataagcagacacggtgttcaaccccattgcacgcgctcggtgcagacggtcacgccaatactcgtgcggaatacggggataatgcatttctccgcatatcaattgcacatctttcccgttaatattaaaagtaccattttctattttaacctgttccctgggggaggaacaggctgaaataaaaaatgatacaattaagttaagcataataaatacgttgcttctacttttattcatctttattcaaattatatcataagtattgaatgttccgggggcttcttcaaatttggtggttatttagcaagtcggtggtatctccattcccctccttcgggaaggagaatggaggatactatcgactataaactagcaaatcattattttacaaattcaccttaccgacaaatttaaagagtaatctgctccgacttgcccacaagatatcggtttgtcccggccgaagtattcatcaatccgtatcagaatgtaacttcaccgaaaatattcactgcatattttcctgcgtcatcataccaatgagtgagtttctccgtcggagcaaacttgatggcgtaagccggattgtatttcaaatcggccactttctccggcatccagattccaactttgtatgtcccgctcaatccggcagctgcacttccttttataacatacttcgctacctgattcggttcttcatttgtagaaggaatccatgttttaggatcaacatccagctttatttctttagctacctgaccgtctccggaaaccagcacaagatatacttctttcggattaatcaccgtagcaaaaccggtattagttatcgtcagattatattccaagtttccgtttttcgcctccactgtcgattcgctttgcagattcaaccggtatcccaaatggtcacgtacaaattcatagaatgaacggacaacctcatttccttcagcgtctttaaaataactctcatcaaagagaatgttattatcattcagcaaagaaggatatacttttacttgtttccaactcatgatattcaaatcaaaattctgcgttatatcaaaagccgaataacggtgttcacgcaaaatacgcaatgacttcatcggagtaattagtgcagccaaaccccattcggtatcttcattataaggaatctcaccactcatatagaaattattcgcttttacctccccggttatttgtttataatcatccgtattgggaacaaagtcattgcccggcgcatgagaatgttcaccggctgtaaagtaatcgttcgcatatccgatacgtccgcggtattcttcctgctccaatgtcaatgctttcttatgactcgggtaacgcatttctacacaatatggaacaggcaaagctcttaacagtgcactgacaattgcattcttcgcatcctgatcatttgccaacggcgacgtatgccactctccccaagcaccaataaaaccaacttgcaccgtagcaatctgaccgatatattcattcaacaaaggtgtcaattgttcaatatgcctaagaatccattgtttagattcaccgccggacgtattaagccccgcatgattgtatgcaaaacgaagaatggctttatatccctgcgctttcatcaactcaaacaccttgcggatattattcaaagcctcatcatcaagatctttactcacccatttggtcagatagatatattgctgcacaagagtcagattatcgtctttcgcatcaaactgctctattttctttttatacaaatcctcaccatatacttcataatcattatatggacttttcatctcatcagccagcaaattacattcaagatgaaagcctctatcaggatttctcaacgactcgatatgaacaattttacctacaacttccggagtttccggttcattcgtaccttcttcctctccatactgtcctgcatacacatctatcgtatcagaacaaaagctacacataatacctaataataaggtagataatatggtcatagttttctttatattgattaacatgattgatctatttttaattttcacctgattaattttcattgaagataaaacgtgcaggagcccctgttgtccaaggagtccacaatgttgctccgccatcatgaagcatacatccatgctctgtattatcagtcaccaacaaatagcaatactgtccggtgtgattattaatattcggttctacccattgaccggaagcacacaaattaaatttccagtcattcaaatgagtctgtcctttcactgactcataataatcagggtctttcaaaacattccattgaccttcagctgttcccgcttcggcaaacaggttcttatattcctgcatagtcggtaagcgccaacccgtaggagctattttgtcacgaatgtcataatgataatgaactccgtatgctttcactctgccttctccaaaagattccggcgtattcttataattatttgactcaatatcagttccgtcaggatacttggtcgtcctcaaattatctgccagccaaaccagtgaagttccgtcgctataagaaatacgggcaacccgataggttatcttctcatcaccgcgaacatcaatgaaacgcatcatttccgtcatatttagtactccggaagaacgtgacaccagttgcccgtcatcagtcttcacattccaatatatagcgttggatgtccaacgtttaatagaaagttggtcgagcaaggtctgaagttgctcgtgtgtcagagaagacttaccttttacaatccctacactttgctcggctacagtctgtttcatttcaggatcaagtgacagacagagtgaatatgaggttgattcaggccttccttccgtatcccattcaaactgtacggcagtttccggtttatcttcagccaaagcaatcttagtcatatcctcaggttgtaataacttggtagacatacgtttcacatgaatcgtatgcacatccgacgcagcagccgtagtattgccagtctctttaacagtccaatacaacagcgcttcttgaccggcctttattcccaactgagagaaatactgatcggctgccaatacagacaaagtaaaagaggtcgatttaccagcgtcaatcttcaccggctttttgaaatctctggtagcacaaagaatcagtttggcacctttctccaatgccttatcccatgagaaactatattcatcgattgacaaatcattcaagtcaattttcgttccatcctgaggcgcactcaggtaaatatccgacataggaataattacattatacttgtcctctttacatccggcaagtaataaaatacctaatagagtatataataaatgtttcataatactatccatttttagtaaccggggttttgaattataagaccttgtccttcagtaatcaaatgagtaggtaacggaaacttctcatatttatattgcccgtctaccttcgtttcgattttaccagtcggctgacctgcaaatcttgctttagcaagtgccgcttctatgaattttccgtgacgaatcaaatcctgtcgacgtacaccttcaaaatagaactcatgtccacgttcttccaacaatttatcaaggaaatcttccactgaagcgaaatcactcaattgataagctttcagtccgccatgggtaacacgtacttgattcaataacccgacagcttcctgagttatgctatttccattgcggacaatagcttctgaaagtaaagtcaatacgtctgcataacggtagattggcatatctatttcacacagttctcctatcaccccttcgattttatacttaaccggaattgcaccataaaagagtacacctgttgtacctccgtcacggtcaagagcacgactgtgatgcacgccttccgtaccagtatattcacctataattctttcccgtcttttgtctttaggatcaaaagattcataggcaggccaggatattttataccctccccatgcagtcaccgccattcctgccggaataggatagtcggatgttaatacatgtgcaaaccacttctgctccatcacaccagcttccgctacacaagagaatattacttccgaattcttttctcctgataaagaaaacaaagaatgataatcatctaccagtttataaccgtattcggatttagtcaattcacgtcctattttctctgcttcatcccactgtttagtcatcatatagaattttaacaacaatgtgttggccaatccttttgtaaaacgtccgtaatccgtatcttcatatttataaggcagtatgtcggccgcttccttcaggttagtaacaatgtattcacgcatcgcttcttcagacaagcggggaatcacaatctcagcttccggtttctgcaaagtttccaaatctgcaataggtatcggaccatacatatcatacatcagaaaagccagaaaaccacgtccacattttaattcggccatataacgggccttcaatgtttcatccatatccacgttcttgatacgttccattgtcaaagtcatggaagccagatattgggaatagtcatacacgcggcgataatctccgtcgatatgccagtcattagcttcatacgaattatatacggtagtccacccccatgtattttccacataatcggtcaccatttccgaagtcgtcacataacctgccgccacctcaaaaatcccccacggagaaaaaacgtaataagcacttgagttgaccaacgcatttacatcttcagcattctgcggaaacattcccggatttattttattataaacttcctgttccagcgtgcaagacgatatgaggaacaaaagagttgctattacagtataaattgtctttttcatattcataacttattagaaagatattgatacaccaaaattataagaggtcacattcggatatgcataagttccgttatccgtttcaggatccagccctgtccaattggtaatcacaaacggattgttcacatctacatatacacgaagattattcacgatcttttggctgatcggtactttatatcccaatgttatacttccgcaacgaacgtaatagatagattttacgtaatagtctccccaaccgtttccccctctcacgtaggtaggatcagtagctgtcaagttattactactgaacgctttcaatgcgtaagtggaaacgttgataccattatccatgcgtgtccaaccttcataatagctggctccccgctttctacccgcttctccgtaaaaatagatattcaaatcaaaattcttatagcggaatgaattgttcaaaccgtagattattttcggatcaccattccccatatagaccttatcttcatctcctaacacaccatttccatcccgatctttcaacttcatcattcccggaaccaaatctttctgggcatccggtgccttctctcccggttgcaggataccgattgcttcatattcccaccatgcccgtatcgggtcatcttctttttcataggctcttggcttccagttcggatcacgtttcaaccaacggtcattataatgcgataaagtcaatgtggtatcccattcaaagtcttttgtaacaatattcactgtattcaatgtgatttccacaccctggctttgcgttgatcctatatttcctgcaattttatttacctcattataaaatggcaagggcttgtttgtcactaacaaatctgttattttacgcttaaagtactcggcagccaacttaaaccggttattaaatattccaaagtctactccaagattaaattccgtagttgtttcccaagtgatactcttgtttcccaaatccgaagcatatactcctgttgactccgcgcctccaataatggcatttcttcctacctcataataatcataaatacgataaccgacattagaattaccggtctgtccataagaagctctcaatttcaacatggataaccatttagaagcccctttcatgaaattttcttcactaatcatccaacctgctgatacagaagggaaatatccccaacgattttccggtgcaaaattagatgcagcatcagcacgtaccgtggcttccaacaaatattttcctttgtaagaataattagcacgggcaaacaaagaagcaatactatttatagaagcccatgaactgacagaaggctttttataattacccgaccccaaactgttatacccaaatccatccaccagaaaatctgaatttccggcactgaatccgtcattcttgaacttttggaatgaataaccaccaatagctttcagattatgatcaccaaaacttttagaatattgagcggtcaattccattagataagtagtgcttgtctcttgtgaaatatctgcccttccattcttatttgccccttgcaaagttgtcttaggcaaataactggaacgtttctggaaactgcggtcagctcccaactgtaatttcacttctaattctttcaatggttttactgaaacaaatgctgaaccgatcaaccgatcttttaccgtattatcttttatttccaacaaagaaaccggattcgcaacaaaaggacgtttcgggtcaataaaataattcccttcagaatcataaataggaatagtaggattggactgaatagcaccggtcaacacacctgaatattcattaaccttatctcctaaaggaacgttatcatacttattctgtgagtaagtagcggttaatccgaaagatacatatttacttaattcttgatccagatttaaacgggcagaaaaacggctgacaccattattcttgacaataccttcttgatccatatagttgacggaagccaaataacgggttttctccgtaccaccattaacagaaagattgtgttgttgcgtatatccgttacgcattaccgcatcaagccaatcagtaccacttgccaacaatatctcatcattattgaaagctggtttatattgagtgggcggagtatccggtttctccacatatcctttataaatccccattccattcaacttcagccactcctcgtgctgctgcttattatacatatccatatacatacgagtatcaagcatcttataattcgaacgggctacctgcacagatcccataccggaataagtcactctgggcttctgactcttaccgcgttttgttgtaatcagaacaactccatgaccggcacgtgctccataaatagccgtagaagcggcatctttcaaaactgaaattgattcaatatcatccggattcaaagactccagcacattatcaatattaccggattcataatagccgttccccgaacttaaattaccggaagacgataccggaaaaccatcaataacaaacaaagggtcgttacctgctcctgtagaagcctcaccacgaatacggaatttagcctcaccgccaggttgcgcagagatctgatttacacgaaatccggcagccttacctgccaatgcacgagatacattcggaacagtattcatttctacatcacccatatttaccatagaaacagcacctgtcaatgtctttttactctgtgtaccataacctaccactactacttcttccaattgtttggaatcttcctgtaaaatgatttttagatttttaccgacttgcaccgcaacagtctgtgactgatagccgatataggaaatatccaattgtgctttcgatgaagatacggaaagtttgaagataccgtcaatgtctgtaatcgttccatttccctgtacgcctttctccaatacactagctccgattaccggttcaccatgagtgtccagtaccgtacccgatactgttactttcttttcctgctgtggtgattgcgcttcaacagacaatattattttcttatctaacaccgaatacttcacattcgtaccggcaaagatttccttcaacacactgaaaatattacttttatcagcagacacagaaacacgacgattcaaatctacatgtttgttattgaagaagaagtcaaaatccgactgcgcttcaatctctttcaaaatatcctccacacgctggttatgaacatcgatactgatcatagctttctgagcgtaactatcggctgcataacttagtccgatagaacatactaagaacaaaactaatagtctcatagataatgggattttttttgaggttagccaaagcgactttatcacccataaaaattggatgctaaaataattttgcataaatttgtaatgacttaaagttaataaaaagtttatctaagcttgtcgccaaacaagcattaaaaagatttactggtttccatacgggaagatacgccaatatcatcccgtatgtttttcatttaagggggtctgtctttcatacaattacttttcgttttaaggtaaatcaattaatatatttctatcttactcttttcatcttttatattcggagaatcaagataccgccaacgaatctgggaggaaagttggaaatactctaagatacgttccagacgttgattcgtgaatgttcctgtaaacgagtctcctttcaagcggtcattcttaattataaattctacattatatcgtttctccaacattcgtaagccttcttctaaaggagtgttcctgaatataattttcccttctttccatgctgtttccgattcaccggaagtggcataaagctgcactttacaatctctcgaatcataaacaagtttttgtcccggatccattaatacctttttcgacacattatcctgtgtaaagatgaatcctatctttccttccaccagtgttgccagcactttatcatctttctcataggcttctatattaaaatgtgtacccagcacttctatctgcgactgatgagaagtggaaacgataaatctcttttcgggattcttggcaacttcaaaataggcttctccctgcaaggttacgtttcgtgtatctccgttgaaatgtgaaggataagtcaggcgtgattctgaattaaggaagactaccgttccatccgataaagttaatgaagtggtcattcccggattggtctttacttccaacatttgtgccagttcctgttcgtctcctccccaatagtgcaccaactgaacaacgagaagtggaatgaacagaactgcggccgcacgttgtgcccattcccaccacatcgttttctttctacctgttatcctgccttttaccctcgacaacgctttttccgtatcgactttcttcattacatgaatggtatccgtagccagataaagcgaatgaatctgtttggctacccgccggttctcctccgattcgttcatccaagcctcaaccagcagacgttcttcttctgtcacttgtccctcacaatagcggggaagtaattcgtctattttatttttatcaagtttgtccatatcctctttttcttgtcttttattataagacaggagactccggatagattcctaaactaaaatccattttttttcagaaaatctttgttttcttataaaaaagctatatttgcagtgaatttacaaaactaatacatgaaagaaacctaccgctcagaaaacgatttcttattatcagccgtccgacacggagatcaaaaagctttcgacacgctgtttcgaaagtattatccgatgctttgtgcatacggtcatcggtttgttgatctggaggatgcggaagaaattgtagaagactctcttttatggatttgggaaaaccgggaaactcttgtcattgaatcttcactgagttcctaccttttcaaaatggtgtaccgcagggctttaaacaaactcgcgcatatcgacgccacccaacgggctgatacccgtttttatgaagaaatgcaggaaatgctgcaagatacggactactatcagatggaagaactgaccaaacgaattgaggaggctatcgcagcgctacccgaaagctatcgggagtcttttgtgatgcaccgtttccgggacatgagttacaaagagatcgccgaaacactgggagtatcacccaaaacaatagattaccgtatccagcaagctttgaagcaactgcgcacggacttgaaagattatcttccgttactactgccgattctatttccttaatacaaaatttacccttttcggtaaggcaacgtaaaccagaaagtagaaccttttccttcttctgagttaacgcctatttcccctttcaaatgctcgacaatcatgtgacaaatggaaagtcccagtcctgtcccctgaataaacgggttatatttcacaaaacgttcaaatacgtgccggcattgttcgggcgacataccgcaccccgtatccgaaacataaaaatagatcgtattaatatctttcatacggtatcctatacggatactgccggatttggtaaactttatggcattaactataaaattagaaagtagctgcatcaggcggttcttatctatataaagcatacattccggcagacgttcgcaaaaagtgaaagttaccgcatcattcttcaagcgcagctgcatactttgctctatttcctccattgtctgattcacatcaatcagcgccggacagaaatcgaatgtcccggcttcaatcttcgacatatccagaatgtcattaatcagttgaagcaacaagttagtgtttgtttcaataatatctgtgtattcccgcatttcctcacgatcatcaacttccggtaacatatttgaaaagccaacaatagcattcaacggggtacgtatctcatgactcatgttagccaaaaaagcagacttcaattggttggcttgctccgccttttccatagcttcacttgaacggctgtacgctttccgaagaatacggatataataggtaatagccgttaccaaaatcaccaatatagctatgcagacaaggatttcgactttatgttgctgaaagaaactttggggctgattgatataaacagctgctttcggataacgataagaaggtatattatgttcctccaacaccggatagcacagataggcattctcctttccaccagtagtttccggaatattccgggcttgttctccgtccagaatccggtaaagtatctccagcaaagactgcccgaaagactccgccgagacataatatccgcctgcgaaagtattgttagacaaatcttcggacgacagcaggaataaaggagatggagtaaaattggatatcacatcttgaatatgatcaaaaagataattattatcatctttattgtgtgattcaaaccaggaataataaataattccggtattcgatttatagctgtgcagagtatccagcaacgcttccgttgacagttgagtggtagaaagcagttccaatggcaaatccgggaaatacttggttacgacttctttcatatcacaacgagtctcctcgctaatatatcggtcgtctgaaataaatgccagacgtttcatatcaggaatcaactgacaaatcagctctatcgtttcttttatgtaataatgctgctttagagtggtaatgttatatccccgcctccattctttagccggaacactgtttgcttctgtcaacggagcgtgagacagcaatatttccaccgaagccggcaaacggtcacgggcattcgtcactaccacgggaacatctttccagacatcatcaaacaactcacggcagacaatccaacccggatcaccaatcagtactattgcggcaggcggaactggatacttctcgcgcagacgggtaatcaccgcatttacttccattgtatccaacaaagcgggaacagacaatgattccgccttaacagaaacacccctctgctgaagttcatcatgtacgcaccagtaaaaatgtttcgaccaaggtaaattgaaattgatggaattcaagaccaatacttctttatccgcctttccggtatctgccaacatggaaaaaagaagcccctcaaaaagaatgaaggagtagcaaagtataataatccgtagtgtttgcttcatttgtcggtgatattaaaagagagaacaaagatagtattaaaattcaatctaaaaaagaaaggcatcccaaatctagcgggatgcctttgtattgcataaaattaagtatcaagtgattatcttttcaacaaaatggtaagactttctttcaaagatttgataatactttccgcatctgcctgttttttgcgttcaagttcgattacggctgccggagcattgttcacgaatttctcgttgctcaacttcttcacaattccctgcaagaaactttccttatgtttcagttctgccagcaaacgattgatttccgcatctatatcaagcatatcaatcaacggcacggcaaattctgttgttcctatcatgaaagaggcagcaccttccgccttgttatacactaccataatagatgacaggttacacatcttcatgataactggatttagtttctctaccggatgattacctatcacctgcaatctgagttgttccttcatggcaatattcttctgcaaacggatactgcgaatattactgatgatttccttggcaacttcaaactcctggaggaatttctcattcacttcgaatgtctcactcagtcgggtaaccattaagctcgcacccggttcacgttgacgcagttgctgccacaattcttccgtgataaacggcatgaaaggatgaagcagttcaagcagacgttcgaagcaattgataaccattgaataaataaatccattgataggttgaccgtaagccggcttcacaatctccagcaagtaggaagaaaattcgtcccagaacagtttgtaaaccaacatcaacgcttcactcaaacgatattttgagaataagtcggccatttcaactgaagcagcgtccagtcgctgttcgaaccactgaacagccagatgagcatcttcaggtaccggaatcgaaccttcggcattggtccagcctttaatcagacggaaagcattccatatcttattacagaagttacgtccctgttcgcaaagtgcatcatcgaaaaggatgtcgtttccggcaggagccgaaagcatcatacccatacgtaccccgtcggcaccgtacttatcaatcagttccaacggatcgggagagttaccgagcgacttggacatcttacgtcccagcttgtcacgaacgatacctgtgaaataaacgttcttgaacggcatttgtccttcgtattcgtatccggccataatcatgcgggctacccagaagaagatgatatccggtcctgtcaccaggtcgcttgtcggataataatatttgatttcttcattacccggattgttgataccgtcgaacaaagaaataggccacaaccaggaagagaaccacgtatccagacagtcttcgtcctgacggagatcttccattgtcaaagctgcgttgcctgttttttcctttgctttcgccaaggcttcttcgggagtggctgccactacgtaaccgccttccggcaggaagtaagcaggaatacggtgtccccaccacaactgacggctgatacaccagtccttgatgttttccatccagtgacggtaggtattcttatatttcgccggatagaatttcaattcatcattcattacaggaggcaacgccatatctgcaaaatgctgcattttgaggaaccactgcatagacagtttcggttcgatcaccacgttcgtgcgttccgaatatcctaccttatttgtataagcctctgtcttttccaacaaaccggcagcttcgaggtctttctcaatctgcttacgaacatcgaaacggtccataccgatatacataccggcagcttcactcagtgtaccgttgtcgttgaaaatgtcaatgctgggcagattgtacttttcacccaacatatagtcattcacgtcatgagccggagtcactttcagacaacctgtaccgaactcaatgtctacataatcgtcttcgataacaggaatcacacggtttaccaacggaacgatcactttctttcctttcaaccacgcattcttcgggtcattcggattgatacacatagcagtatcgcccatgattgtttccggacgggtagttgccactactgcataacgaccttccgcatcaccctccactttgtaacgaaggtaatacagtttgccatgttcttccttgtagataacttcttcgtcagaaagggcagtcaatgctttcgggtcccagtttaccatgcggacaccgcgataaatcaatcctttattatataggtcgacaaatactttgattacactttcactgcgtttctcatccattgtgaaggcagtacgatcccagtcgcacgatgcaccaagcttgcgaagctgtttcaggatgattcctccatgttcgtcggtccactcccatgcgtgtttcaggaactcgtcacgggtcaggtcagttttcttgatcccctgagcagcgagtttatttactacttttgcttcggtagcgatagaagcatggtcagttcccggtacccaacaggcattcttgccttccatacgggcacgacgaaccaaaatatcctgaatggtattattaagcatgtgtcccatgtgcaacacaccggtgacgttaggaggaggaatgacgatagtgtaaggttcacgactatcgggttttgaactgaataaatgattgtccagccaatactggtaccactttccttccacgtcggcgggattgtacttacttgctaattccatattgttttatgtatatgataatgtatattcaaaaataacgggtgcaaaattaataattaaaattcaaatcttaccaccctcgggctgattctgtgcacggaatgagaatttatatccctcataaacagcaaatccataaaataagatagtcatggaagccagattctcggtcatcaaagagaagatttcagcatagtctgctccaaacaatacatccgtatagggcatatcataatccttggcaatatatccgatgatagaaaagaaatcacccaacacacaactaagtaaagccagcgttgcgccgattattccaaaaacaggacgtatcccttttccctgccgcatggcgaaacccaccagaaaaccgataccgatagccatatatcctatctgatagccggtagaaacagatattaatccccatgccgccgcacccactatacaagcgataactgcatataacacacccttcggcagattttcttcggcaagcatttcttctcttgtcaacgttacagggaagtcatccggtttgggcggagccattttctccagttcttcgtctttctgaaaactttcgcactcctctttaaatgcaggaaggtctctggtgcgagaacatacaaggccttttccattcacaaaatcacgcgacacgcaattccggcaatacttctcaatttcttcggtcgtagccattttttatccggtttatgttcaacaatcgcctctatcacacggggaataaagtcactgttaacagattttttgcaaatatagaggtattttttcgcgcgacgtttatttaatgcatatttttgttgaccaatagtagacaaatgatgaaaatgaagccaaatgttagatatttagttctgggagtattattgggcctggtgtggctgactcaattaattcctgctctggcgacgttttattcgcaaacagtctacccctgcttttcctatattctatcctctttttcgaacctgtttcctttcgccataggagatctatttatatttctcagcattgccggaatcattatttatccgatctacacccgcctgcgcaagaagacaccttggaaaaagattttgctgcgcgacggcgaatacctgttgtgggtgtatgtatggttctatcttgcctggggattgaattattctcaaaagaacttttaccaacggaccgaaattccgtataccgcctacacacccgagaattttcagaagttcgtgaacgaatatattacccgactgaaccgttcgtacactcccataaacagtattaaccgggatttgattcgggaagaaaccgtacggctatacaaacagttaagcgacagtctgggcgttcaccgtccgccacatgatgccccgagagtaaaaacaatgatgtttactccgtttatttcaatggtgggagtcaccggcagcatgggacctttcttttgtgagtttacactcaacggagatttacttccggccaattatccggctacttacgcccacgaactagcccacctacttggtatcaccagcgaagcggaagcaaatttctatgcatatcaggtttgtacccgctcgcaagccatgggcattcgcttctccggatatttctccgtgctcaatcatgtactgggaaatgcgcaaagattgctgccgaaagaagaatacgcgaaactcctgaaacgtatccgcccggagattatcgaactagcgaaggccaatcagacatattgggccgccaaatacagcccgatcgtcggtgctgtgcaggactggatatacgacctttacctgaaagggaacaagatagagagcggtcgccgaaactattcggaggtgataggattactgatttcctatcaagagtggaagaaccgataattaataagaaatttttcttttgtgtagcaggattaaactaactttgcagcattctaaaaaaataaactgattatgtcacataccagacaagaacaaatggaagccttcggacgcttcctggacatacttgacgaattgcgggtcaaatgtccgtgggaccgcaagcagacaaatgaaagccttcgtcccaatacgatagaagaaacttacgaactttgcgatgccctgatgagagatgacaagaaggatatctgtaaagagttgggagatgtcctgttgcacgtcgctttctatgccaagatcggctcggaaacaggagatttcgacatcaaggatgtttgcgacaagctctgcgacaaactgattttccgtcacccccacgtattcggagaagtcaaggcggaaacggcaggacaggtttccgaaaactgggaacagttgaaactgaaggagaaagacggaaacaaaagtgtgttaagcggagtccctgccgccctcccttcgttaatcaaggcataccgcattcaggataaagcacgcaatgtcggtttcgactgggaagaacgggaacaagtatgggataaagtgaaagaagaaatcggtgaatttcaggaggaagtagccaacatggacaaggacaaggcggaagctgaattcggagatgtcatgttcagtctcatcaatgcggcacgcctctataaaatcaatcccgacaatgccttggaacgtaccaaccagaaattcatccgccgctttaactatctggaggaacataccattaaagaagggaaaaacctgaaagatatgtctcttgaagaaatggacgcgatctggaatgaagcaaaaaagaaaggattataaacctcccttataaacaaaaaaacagaggctctgtttcagtgaaacggagcctctattttacctgaacagagcgtctgtttgcacgaaacagagcctctgtttttcatcattatttccttttcgaatcgtttccgccacccttgcggttcatgccttttatcatttcccggtggaaacgcatttccgcccgctgtacaagaaatattttcttactggaaagaatcttcttgaacttgctcaggtaggttttatcgagttggtcggcagcgatacggttattggcaactttctcgtttatttcttcgtattggctttccgttgtcttatcatctttacctttacgcatcaaatcccatgactcgtcattcagctttttctttttatcctgaagttcgaaataaacgggaaagaacttggcagcttcttgtttactcaagcctgcctgttctattataaatgctttttgtttcgccctgaactcttcacgggacagatgttggtcacacccgtcggcagcccaaagaacaggcataaagccacacaacaaaacgactaatgcgattacttttttcattttctgtattcaatcggttttaataaatcattctacactcgcgtcactcaaataaacatataacgaataatcatccagcatggcacggtccagtgccacatcaatcatctcatcagatattacttcagtatccaccacttctgtcactgccacatcatctgtcgcaacagatttatggtctgtcgatgccacccgtataataagagccgcacctataaacatagctgccatataaagcaatggtttcagtcttgtccatgtgctgacaggctcttccttcaaagttactttttctttttcgggaagtttattcatcacctctgaagtcaggttttcaaagtaaccttcgggaactttgaaggaattttcctttcccagcttcttcaatagggtatcttcttctttcatacgtttttctcctctcttttctttagacattgtccggtttaaaaggtttaatctacttcttctaaaaacttctctattttcttcaccgcatgatgatacgatgctttcagcgctccgaccgatgttccgaagatctccgacatatcttcgtacttcatctcctgatagtatttcaggttgaacaccatgcgctgtttttccggtaaagtcagcaatgccttttgcaagagcaactgcacttggtctcctgaataataggagtcactttccagtttctgcacaatcatcgcttcgggatcgtcaatagctatggtcgttgtagcacgctgcttgttcagaaaagtaagacattcattcagcgcaatacgatagagccaggtagacaacttcgcctcggcacggaagtagtcgatattcgtccatgccttgatgaaagtattttgcaggaggtcgttcgcatcctcgtgcgagagcaccattcggcggatttgccagtataattgttcgctgtattgcgccacaattatttcgaagcctttccgctgcgtactctcctcctggagaagtttcagaacctcgggttcattgtaaggtgtcatagtctctcgttttctgtatgtttttatttatggtttcaaattcaggcttttcatcgcctctaataaagacggatcataattgtaaatgtcctcacaataccgcatattattatcggccgacagatagacggtttgataatctataaataaaggtatgtattgttcgaggctgtaatgcttcagttcacggtaagccgcgctgataggcaatttctttccttcctcgcttaccggtttgatatccatggcaatgcggatacggtcttccaacaattcatccggctctttcagcaggaagaatgcaaagtcgagcgctttttgcagacggacacaaccatgactcactgcgcggttcttccgactgaaagcccacttggaaggcgtatcatgcaaataaacggaataagggttcgggaaacggaaaataatacgccccaacgaattaccggctttattatcctgtttcaccgtataaggaacgccttttcctgcatacttcgcccatttaatgctatgcggatctacctgcgtgccatttttatcgtataccttcatccggttacgggtaaagtatgtcgtatccctgcggtaagtagggataatctctttcctgataatactttggggaacattccaatatgggttcaattccatatagtagattttactcgacaacagcggagtcctattcttcacacttcccacacaaatacgcatttccaaaatggaatccgtttcttcgttgacagcttgcagcataaaggcggccgtattggcaaccacgtatttctttcccttctccaatgcatattgccaacgcgcacgttccatattcaccagcaggcagtttcggtaataatctgtcgtatccgtttcgccccaagagttcacgcgttccagttcttcctgcatctttttataaaaccgagaggaaggttgcgcccgtcggaaagccgcatttgcatctatccgcagagaatcgagagctgccaatgcaaactctttgtcgcagcgttttaaaggaatccgatcgatcgaatcgttccacctccgttcgggaggcagaaagccgaacttcagtcggcaaacataggacaggtaagcagatgtcaaccgatattccacgtcggccagcaagcgattcattgtctttttcccttgcagttgcaaggtacgtatttgctccaaatcgttacgaatactatctgtaaggtaaagccccggatgaatgccatgtttcgagatatttcctaaccagtataacagagagtctgctggctgtgtagccggtttatcggataccagagaatcattcagccagaagaattcatctttctcctgataataagctactagagccgagtcccaaggagtaacttgtttattctcgtccagatatgagcgaatcatccggtgtatgctgtccgtactgatttgataagcgggattgaacaacttctgcaaggaagccggagaatcgggtatcggagattgaggctgctcttttttacaggctgccagacaagctatcaatcctatcaccataccccatagaagtcttttacttttcatgcgcagttcctccgtcaacgtcaatgcatagattttctttcgctaatatcgtttgcgggaagatagccgccgcttcattgagcaataccgattcatcttcataacgagctgagaaatgtccgataaccaattgtttcacctctgcgtccaaagccagttgggcagcttgcgcagccgttgtatggtaagtctccttagcacgtgcctgttccgtctgtgcaaaggttgattcgtggaaaagtaaatctactccttttatctgtccggcaatcttaggcagatacattgtatcggaacaataagcgtattttctcgccggagccgaaggacgtgtcaggcgggagtttgcaatcacttctccctcgggagtgacaaaatccgccccgttcttaatccggttcaactcgtagacaggaactttgtaaaagtccaccatgtctctgattatatgattcgggcgttgcttctcttcaaacaggaatccgcaacaagggatacgatgtttcagggggatcgtagttaccgtcaccgaacggtcgtcatagataagtgccggttctttcgtttcaaattcgtgaaagagtactttatacgtcagcgtcttacaaaagaaggcaagcatcggggcaaacagttcttcaagtccttccggggaatggatatgcaaatcggcagtcctgcccaacagcccgaatgtagaaattaaccccagcaagccaaagcaatggtcgccatgcaaatgggagatgaagatatgattcaaacgggaaaacttcagccgggagcggcgcaactgcatctgcgcaccctctccacagtcgatcataaacaacttttcacgcaagttcacgacttgagacgtcgcgaaatggcgcgtggtaggcaaagcggaaccgcatcctaatatatgtagctcaaatttttccatttcatgcaaagatagagtatttcagattcaatcttgcaaagaataaagaaaaaagttacaatagactgtctctatcatccctgttatccatataaaattcagttcctctttcatacgacatcatatccgtaaacacaaaaaggcgtcccgaataaccggaacgcctttttatttatctggaaatacttcttattatttctttccttccaactgttctttcaatgcagcaagagcgtcgatgtcgcccagtgtagttgaagcagcttggttttggatcatcggagaatcttctctcttgttagatgtcttcttagcaccggaagcagccttcttttcagctctttcttcagctttagctacatcttcgaagatacggctgtgagacaggatgattctcttagcgtccttgttgaattcgatcactttgaattcaagtttctcatccagctgagcttgtgaaccgtcttcttttacaaggtgtttcggagttgcgaaaccttctacaccgtaaggaagagctacaacagcacccttatccaacatttcgatgatcgtaccttcgtgtacagaacctactgtaaatacagtttcgaatacatcccaaggattttcttcgagttgtttgtgaccaaggctcaagcgacggttttctttgtcgatttccaatacctgaacttcaatgtcagcaccaatctgagtaaattctgacgggtgtttcactttcttagtccaagaaaggtcagagatgtggatcaagccgtctacaccctcttcgatttctacgaatacaccgaagttagtgaagttgcgtactttagcagtatgcttagaaccaacaggatacttttcttcaatagtttcccatggatcttgtttcagttgtttgatacccaaagacatcttacgttcttcgcggtcaagtgtaagcacaacagcttctacttcgtcgcctaccttcatgaagtcctgtgcagaacgcaggtgttggctccaagacatttctgaaacgtggatcaaaccttctacgccggcagcgatttcgatgaatgcaccgtagtcagccataacaacaactttacctttcaccttgtcaccaactttcaagtcaggatcaagagcatcccatggatgcggagtaagttgtttcagacccaaagcgatacgtttcttttcgtcatcgaagtcaaggataacaacgttgagtttctgatccagttcaacaacttctttcggatcgctaacgcgtccccaagaaaggtctgtaatgtggatcaaaccgtctacgccgccaaggtcgatgaacacaccgtaagatgtgatatttttaacagttccttcaagaacttgtcctttttcgagtttaccgatgatttctttcttctgttgttccaattcggcttcgataagagctttgtgagaaacaacaacgtttttgaattcctggttgatcttaacaactttgaattccattgttttgccaacgaatacatcatagtcacggatcggtttaacgtcgatctgagaacccggcaagaatgcttcgattccgaatacgtcaacgatcataccacccttagtgcggcacttgatgtaacccttgataatttcttcattttccagagcagcgttcacgcggtcccaagaacgagtagcgcgggcttttctgtgtgacagaacgagctgtccttttttgtcttcctgattttcgatgtatacttctactgtatcacctactttcaggtcaggattataacggaattcattcaaagggatgataccgtctgatttgtaaccgatgttcacaactacttcacgcttgttcattgcgattacggttccgtcaacaacctcacggtcgttaactttgttaagcgtaccgtcgtaagctttttcaagttcttcgtggcttgcgtttgttaccgcttcaccgttttcataagcatcccagttgaaatcttcaataggagctacgttctttaagttttccattaataaataaattgtttaatactttaattaaataagacattatattatctataaatcgggcgcaaaggtagaaatattttcttgattgccaaaagaatgccaaaagaaaagatgcttatatccttattttttgtaatattgcaagtcttaatttatatagctctagccatggacgagagattggacaaagtcaaggtgcaatgcgactatttgccgcttattaatttcgcgatgcagcagaacggcgcatctattattcatcagatttcaattgagaacacgacacatgctccactgaaagatgtacaagtgcaaatcaccaccgaaccggcctttggtaattctgttccaacagttatagaagcaattccggctaacgaccgggtctgtctgcaaactttcaatctcaccttgtccaccaattatttcacccaactgaccgaaagattatcaggcagcctgaaagtagaaatcacgtcagaaacgaaagctatattctcgcaaacgtatccgattgacattctcgcttatgaccaatggggcggactcaatgtcctgcccgaaatgctggctgcgttcatcactcccaatcatgctgttatttcgcccgtcatcaaacgagccgctaccattctggagcagtggacaggaaatccgtcactggacgaataccagagccgtaacccggacagggtaagaaagcaaatggccgccgtctatactgctatcaccgagcaacagattatttacagcactatcccggctagctttgaggagtacgggcaacgcatccggctcaccgattccgtcctggctcagaagctggggacttgcctggatatggcgttgctttacgcctcctgcctggaagctatcggactgaatgctctcctcatcatcgcccggggacacgcctttgcaggtgcttggctggtgcccgaaacttttccggacgctacaattgatgatgtttcgctattaaccaaaaggactgccgaggggatttatgacatcacgctggttgaaacgacctgcatgaacatgggacagcattccgatttcgatgacgcagtgaaaagcgcaaacggtaaactgaccgattcaagcaagttcatccttgcgatagatgtcaagcgggcaaggcattcgggaatccgtcccgtaccgcaacgggtactgaacggacagatctgggaaatagaagaagataccgctttatataataaagatacggcttatgccaccccgcaaagtatcaatccatacgatttatccggcaacgaaacgcagacggtcataaccaaacaactattgtgggaacgacggctattagacctaagcctgcgcaacaacctgctgaatatccggattaccaaaaacacgcttcaacttattcccgccaatctctcctgcctggaagacgctttagcagacggggaagagttccgcatcctgcaccgtccttccgactgggagaatccggacatggagttcgggatctattcttcaataccggcttccgacccgattacagattttgtaaattcggagctttcccagaaaagattacgtttttatctgccggaaaatgatttgagcaaagcgcttacccacttgtaccgttcttcccgtacttctattgaagaaaacggggcgaatacgctttatctcgctctcggactgctaaaatggtacgagtcaccttccagcgaacgtccccgctatgctcctatcctgctgttaccggtagaaatcatccgtaagtcagcggccaaaggatacgtcatccgttcacgtgaggaggaaacgatgatgaatatcaccttattggaaatgctccgccaaaacttcgggatctccgtccccggactggacccgttgccgactgatgaaagcggtgtaaacgtcaagcttatctactccattatccgaaacagcattaagaaccagcgcaaatgggacgtggaagaacaggctatcctgggaatattctcctttaacaagtttatcatgtggaatgatatccacaacaatgccaataaactgactcagaataaaattgtttcgagcctcatcaacggaaagatagaatggaatgccacaactgaagaaatagatgccacctacatggataaggaactgtctccggcagatatcgtattgcctattattgccgattcatcccaactggaggctatctatgaagcggtacacgacaagactttcatcctgcacggccctccgggcacgggaaagtcgcaaaccattaccaacattatcgccaatgctttatacaacggcaaacgtgtattatttgtagcagaaaaaatggctgccctctctgttgttcaaaacaggttggcagcgatcggacttgctcccttctgcctggaaattcactccaacaagactaagaaatccgccgttatctcacaacttagagaaacgactgaaatcatcaaacagacttctcccgaagaatttaaaaaggaagcggaacgcttgttgcaactgcgggcggaattaaacggatacacagaagccttacataaggaatatcctttcggcatttctttatacgatgccattatccactatcaatcaacagacggagagccttgttttgatattccgcaaagctatctggatacattgaacaaagaaacattctccgaatggaaagaagctgtcgaaactctggtaagaactgccaatgcttgcggacatccttatcaacatccgctatcgggaatctctattgcggaatattcgtctgccataaaggaagaagctgcccaattactgagcactttcatcgacttgctgagcacaattcagccgaagttatccgtatttcccacactactgaaagatacggatatgcaccccacacgcatggatttccaaacgacagcggacattgtccgaaaagtactcgacattcccgaactcactcccggattgctgacagcatcttcattgagcgagactctcgacgaatatcgcgaagtgtccgctcgtggcaggaaacgtgatgagataaaagcaactgtagaaaccggattcaccaaagagattctcgaaataaatgcaacacaaatgctcgcagaatggaacagggtgagcgcccaatggtttcttcccagatatttcggacagaaaaaaatcaaaaaggcaatcaatctatatgctttgaagtctgtcaaaccggaagccgtcaagcccctgctccaccaaatcatccattatcaggaagaagcggaattcgtccggaaacacgctgacaggctgccttccctgtttggaggcttcggaaaaagtgaagactggagcacaattgaacagatcattaatgatatgggagtcctccattcccttctactgaattattcgaagaatattgccaaggcaacgcaaatcaagcaaaacctgtccgtgcagctaacggaagggctccggtcattcagagatatgcacgcccattccctaaatgaattataccaacttgccgaaagattggtaaacattgagaaccggctttcttccacgctgggcatatctgccgaaacgctttacatgaactctgccgactggataaacaccgctctggcaaaagcccgcctccacaaagaaaatctggacaagctcaaagactggtaccagtggctccaagcataccgccaactggataaactgggtataggattcattgccctggaatataaagagaagaatatcccgaccgaccagcttatcgacagcttccacaagagtttttatcaggcagctatccgctatattatctcaaaagagccgacactggaattattcaacggcaagatattcaacgatatcatagcgaaatacaaacaaatatcgacgaattttgagacaatcacccaaagagagttgttcgccagattagcttcaaacattccgtcttttactcatgcagcaatccagagttccgaagtcggcatactccagaagaatatccgcaacaatgcacgtggcatatctatccgtaagttgttcgaccagatccccactctactgtcgcgtatgtgcccgtgtatgttgatgagtccgctttccgtagcccaatacattgacgcagatgcggataaattcgatctgatcgtttttgacgaagcctcacaaatgccgacttacgaagccgtaggtgctattgcacgcggcaagaacgtagtgatcgtaggtgacccgaaacaaatgcctcccaccagcttcttctccgtcaacaccgttgacgaggataatatagaactggaagacctcgaaagcattctcgatgattgcctggcactgtctattccttccaaatatctgttatggcactaccgaagcaaacatgagagccttatcgccttcagcaattcggaatattacgacaataaactaatgaccttcccgtctccggacaacattgaatccaaagtgagaatggtagcaatcgacggttactatgacaaaggaaagtcccgccaaaaccgagcggaagcacaagccgtagtagacgaaatagcaagaagattaagaagtgaagaattaaggcggaagagtatcggtgttgttactttcagcgtcgtccaacaagcattgatagaagatttgctatccgacctcttcatctttcaccccgaactggaaacacttgcactggaaagtgaagaacctttgttcatcaagaacctggagaatgtgcagggagacgagcgggatgtcattcttttctctgtcggctatggtcccgattccgaagggcgcgtcagcatgaatttcggtccgttaaaccggatcggcggagaaaggcgactgaatgtagccgtatcccgtgcccggtatgagatgataatcttctctactttaagatcggatatgatagacctcaaccggacttcgtctatcggagtggccggattgaaacggtttctcgaatatgcggaaaaaggtacaaggaacacactcggcagctcccttccctctttaccggaagaaacggtatctatcgaaaatatcatagcggacaaactacgctctttaggatataccgtacatacggacatcggatgttctggctataaaattgatattggaattgtggatcctcaaaacacatccaattatcaactaggtatcatctgtgacggaaagaactacaaacgtacgaaaaccgcacgcgaccgtgagattgtccaaaacaatgtattgaaagcactcggttggaacatctgccgcatttggacaatggactggtgggagaagccggatgaagtcattgcatccatacaggaagcaatcagcaaaggaacctccgtttccaaacaagaagaacctcggcaggaagaaccaacctggaaagaaacacgcagcgaagaacccataaaaggtgggcaaataaaagaagtaacactaaacgaggcaccgataaaggaagtatcgctaaagacaacaccggttttcgcaaaaccggaaataatctccgccgatattccccaacgaaagtataacagcacgaaagtgaacccgaacaaatattcttcgaaagatttcttcgctacggagaacatccctattcttatctttcaaatccggaaactcatagaaagcgaagcacccatcagcaaatcattactctgcaaaaaggttctggtcgaatggggaatcagccggttgggacaacggatagaagcgcatctggaaaagatcttcgacagccttcacctctaccgtaccacatacgatggtctcgtcttcttctggaaagatgaagtacaatgctgtctctattccggttaccgccccgagtccgatcgggatgcaacagatttgccacccgaagagatagccaacgcagtacggcaactattggctgattctatcagtcttcctttggcggatttggtgaaagcgtgcgcacaagaattcggtttcacacgtatgggatcaaacatagacactgtcatgcagagaggaatcaataaagccataaaaaagaattatgccaaaatagacaatgaaaaagtaacgattgcggactaataccctttctccaaacgtttcaaagcagcaatggaatcggatgcataggtattgtccggttctatcgcccgccaatagcaaagcattccgataagccgtttcagataagcaggatcatgagagccgatcctgcgctggtgttctgccagacctttcgtcaggatgaaataaacattcttgcgaatctccctctttttgcttttaggaatagtcagcttcacaccggaagcgacagacacccccgtaataatcttcctactactctgattcataaaatgagtctttttatggttcggctcgaacttctcatcacggataatccgtttgacttgagggatgatctgctctttcggaaacacatctcccgaaaaggttaggtcgtcggcataacgggtataagtcaccccgtattccgcagccaacgctgcgagtttcctgtccatttcgtatcccacaatattacttaaagccggacttgtaggcgctccttgcggcaaatgcctgtgcaggcaacacaaagcccccagtactttcgacacattctccggataacctattttcttaaatgtctgcctcactctcgggcttcgtatagagccgaagaaatcatgaatatccattttcaacacatatcgcttacccaaatgaggagcagcattgtccaccacagaccgaccgcagcgaaaaccgacggctgccggatgaactatcgtcaccgatgataaaatacgcgaataaatagtagattggatagcctgcaaatccttgtccggagcagaaatcatacgataccctccgcttctctttctcatccaaaactcctgataatgcccggaaacattgttcaatatttcttccaagcggttcacttccactcctaacagagcagcacaccagattacagcctctttttcaaatctcggagtatagggggccaccggagtagtaacacccattgcatgacgaagccaggatcctcgctccctttttgttttatcaaccttttcttctttaccaccgcctgttgctttccaccttttatacccttcttgtctcctgctcgaggaaatcattttataaatcaaaaagccggtgataataagtatcgttattagaattttgttcattgtgcatctgtataaaactaaggagaagaggatgagttatttactaaaataaatttaggtatgtatacctagtaatttattttctaggaaaatacctgtgcttatgaggcgactacacctctcttgtgctaaattctgccctcatcctcttctacacaaaggtagaaaataattcccggatatccaaccggaacgcagaaaactatcggttaaacaactcgaatgtaaacttacagcctatcccgccaaacttccagttctcgctgctcacaaaaactccgagatcaaagatatgcgtgccaatgccgtatcccacttccaaataaggttgaagatgtggcatggaaagggcgctgacatagatccgttcattttgtacataacgagtatacttcatcaaatgccgcaggacaaggaacggagcctcatacgtgaaatgtccgcgtacataacggcgggaggagttgtaccaacgtccgtcaagcacctgaaacacaccaccgatttcatcattccaccctacgggaagattgtgacgtgaaaagttgacaaagtccacaaaatacagttcgtcctgattggtgaatgcgccgaatccgaagcggtaatagatattacgcatcagtcccaaacggatttgatgttgaaggtcgaactctatcctttcatattcccccgtacttttgaacacatcctttataccccgttcgtaatcgaccgagaaagtcgggtagaaagaacggaggtttatcttacgctttccgttcatgtagtaataaagtcccggcgtccattccacacggatacgaggggcaaaactgatataggtattcttgaacttatccataaactcgggaggcggcatcggatagtcaccggtaataacaaagcgggaacgctccactgcagttctcttgtgcgccgagaaaccgacacttatatccagcccgttagtaacttcaacgctatggaagaaattgaaatataaatccttaaaataatccaggtgaatcaggtcgaaattaaagatactgtccggcatggctttcagttcatccaacactttactgctataaatacggttaccgttacccacattcagccggaagaatccccgcttttgaggccaatactcaaagtcggcattcagtccccaatagaactctttccgggtgaagttataccccagtcgagggacaatgcggagcaacttatcgcccctgaaaaggcggttataccggaagtcctgccgataggacaacccattgctaccgctataactgaacaaaagcggattgataaacggagagaaacggacacttccgatattggataaattgaatttataatcttccaacatcaagtcacccattgttccccaaaaagcctggcttttcgttttcttctgactgaccacagtatcgcgtcttaactggtagtcctgatacagtttcttctcatcgtccgccaacggaataggacgaagtatggcaaaagtcgaagcgtctgttttgtaggcattcgtatcgcactgcaacgagaaagattctgacaggttatatttcttcttttctttcttacgtgttttcttctctttcagttcgatcgacttataatccaaagaagccgtataggagccgtcaaccttgtttcccaaaaacttaaagagggcctccacgtcataccgaaccggcagaaactcgtctttcttgcccacttctcccattttaatccagcaagtaaaggtaatcagttccgaccgtcccgagaaacgtatctcccgtacgctccacacattactgctgacaatcatataacctcctaccaactgatcgcttttcgttttggggataaagcgtatccggtagtcaaggttattggggtcgcccattacactatctatccggtatttataaaatttctgtccgttcttggcaagaggtgacatcaggcgttcatcgttcaaaagcgaagccgagtagatatttacactaaaatattcgagcaaccccggcaatcccctgtttcctctcactgtaccttgcgaggcttttactttctggtcgtagatattgggagccgtataatgaaggtcactgtatgtttcgagcatatattcacgcacccctttctgcaaacggaacatggaaggtacgtagcggagaataaaattcttcttctggatatccattctaccctttatatatagattcgcgcgataatcgcttactattgtctcatacaaaggggcaaaagtcatgacacgttcgataatggagtcagccgagatctccgtactggtatagggattcattatataattgttggctgttccctttgatataaaagaaaacaggcatactatgcatcctatcaatattttaactctcaatcgtcgtatctccttcattaacgtaggcaaatatagaaaagaatatcgaaaagcaaaggcaatgtgtcactaaaaagagttatcaattaatagttgttatctactaacaacaaacttcctgttgcccaataataaacttgctttgaaccaacagcaaacttataaaactaaagtttcaattggtatcatctccttctatattttataaaatacaagaaaaaagcctaccttccccacaaaaagcaggggtatttctcaaaaaacacacttattttcaaaaatacccctacaaaaacaggggtactttcagaaaaaacatataattttgcgcccagcaaccaataaaagtagactatttatgtcaaaaatgcgtttttttgctctgcaagagctttccaaccggaaacctttggaagtgaccgctccttccaacaaactctctgattattatggcagccatgtgttcgaccgcaagaagatgcaggagtatcttcccaaagaagcttataaagcggtaatcgacgctatcgaaaaaggtacacctatcaaccgtgaaatagccgacctgattgccaacggcatgaaaagctgggcgaagtcgctcaacgttactcactacacacattggttccaacccctgacggacggaacagccgaaaagcatgacggctttatcgagttcggtgaagacggtgaagtcatcgaacgcttctccggcaaactgcttatccagcaggaaccggatgcttcttcttttcccaacggtggcatccgcaatactttcgaagctcgcggctatacggcatgggatgtttcttctccggcattcgttgtagacacaactctctgtattcccacgatctttatttcttacacaggcgaagcactggattacaaaactccattgctgaaagcactcgctgccgtagacaaagctgctacggaagtttgccagctattcgacaaaaacatcactcgtgtatatacaaacctgggctgggaacaggaatatttccttgttgactcctccttatataatgcacgtcccgacctctgcctgacaggacggacacttatgggacattcttccgctaaagatcaacagttggaagaccactatttcggctctatccctccacgcgtcacggcatttatgaaagaactcgaaatcgaatgccacaaactgggtattcccgccaagacacgtcataacgaggtagcacccaaccagttcgaactggctcctatcttcgaaaactgtaatctggcaaacgaccacaaccagcttgtcatggacttgatgaaacgtattgctcgcaagcatcacttcaacgtgcttctgcacgagaaaccttatagtggcgtgaacggttcgggcaagcacaacaactggtcgctttgcaccgacacaggcgtcaacctgtttgcaccgggcaagaatccgaaaggaaatatgctattccttactttcctggtgaatgtgctgatgatggtttataagaaccagaatctattgcgtgcttctattatgagtgccagcaacagtcaccgcctgggagccaacgaagctcctcccgctattctttcctgctttctgggttcacaactttcggcaactcttgacgaaattgtacgccaggtgggaaacgagaaaatgaccccagaagaaaagacaacgctgaaactgggtatcggacgtatacccgaaattctgctcgacacaaccgaccgtaaccgtacctcccctttcgccttcaccggaaaccggtttgagttccgtgccgcaggttcttcttccaactgtgccgccgccatgattgctatcaacgctgccatggcaaaccagttgaacgaattccgcgcatcggtggaaaagcttatggaggaaggagtaggcaaagacgaagctatcttccgtctgctgaaagagacaatcatcgcttccgaaccgatccgtttcgaaggcgacggctattccgaagaatggaaacaggaagctgcacgccgcggactgaccaacatccgccacgtcccggaagctctgatgcactacgttgacaatcaatccaaatccgtacttatcggcgaacgcattttcaacgaaacggagttgaacagccgtttggaagtggaattggagaaatacaccatgaaggttcagattgaaggccgtgtattgggcgacctcgctatcaaccacatcgtgccgactgccgtggcttatcagaatcgcctgctcgaaaatcttcgcggaatgaaggaaatcttctctgccgaagaatacgaagtgttgagcgccgaccgtaaagagttgattcgtgagatctcccaccgggtgacctccattaaaatactggtccgtgaaatgaccgaagcgcgaaaagtagccaaccaccttgaaaactacaaggaaagagcatttgcatacgaagataaagtgcgtccgtatctcgaccagatacgagatcacatcgaccatttagaaatggaagtagacgatgaaatatggcctctaccgaagtatagggaactgttatttactaaataaaatgttttcaagattgcacgaaagctaccgcttttgtgcaatctttttatagattcgttcattttctcattttttatttttacttttgtgctgtataacacagttttgtagcacccatggtaaaaatgaatatgtcagacatagatatttcggaaccgttatccgacatgttagctcctttaaacaatgagcaaaaggagtttctgatgaataattatacgatacagacctacaaaaagaatgaaaccatttattgtgaaggagaaaccccctctcatttgatgtgtctcatcagtggcaaagtaaaaatcttcaaagatggtgtaggaggaagaagtcagattattcgcatgatcaaaccgcgggaatattttgcgtaccgcgcctactttgcgaaacaggacttcgttaccgctgcagctgcttttgaaccttccgttgtctgtctgattcctatgagtgctatcaccaccttggttgcccagaataacgatctggccatgttctttatccgccaactttctattgacctcggtatctccgacgaacgtaccgtcaacctgacacagaaacatatccgcggacgtctggctgaatcgttgatgttcctgaaagagagctacgggctggaagaagacggttctaccctaagcatttatctttcacgcgaagatttggctaatttatcgaatatgacgacttcaaatgccattcgtactttatctcaattcgccgcagaacgattaatcacaatcgacggaagaaagataaaaatcatcgaagaagaaaagctgaagaaaataagcaaaattggataaaaaactcttttatgccaattgcgccgctttaaacagtgaacacacatatagaaaatataattgcagacatcaagcgtggtaacaaacaagctttcaaaaagctatttgatgactactaccctattctttgcgttttctcatttcactatgttgaagataaagaagtctgcaaagatattgttcaagacgcattgttggcttattgggaacgaaaagaagacttcaacgatatcctaaaagtaaaaagtttcctttatactgtcactcgaaataaatgtttgaattacctcaaacacgcacaactagatattcctttttttcacggaaaagaagaatatgacaatggatttgaagctgagattattgagcaagaaacatttcgcattgttcgcaaagcggtagaagaattacctactcaaatgcggaatatcatcttatattcaatgaaagggttaaaaaacaatgaaattgctgacaaattgcaaatctcagaaggaactgtccataagttaaaaaaaatagcttatcgcaaactccgagaaagcctaaaaggaattaattacatcttatgtctttttctatgcaaataaagtaactttttgattaccccattttttcatttggattgttttatatacgaaccaattgaaaaaatgatggaatcatttaaagaaaaatttaagattgctaaagtattagcctccatattcactcattcgtcaaccttggaagagaatgagagttaccataaatggattaatgagaatccggaacatcaaaagatagccgaccggatattaaatcagaggacatatgaagaacactcactgttgataaagagcttttcctcacaaaaagcatgggaaaagatttatcctctgttaaatggagaaaaagcacctaacctttttctgtggaaaagaagtatgagatatgcagcccttatcttactactcatgataccggcttcctatcctatatataaatggatatctgaagaaccgattagcgaaatcaatcccggcacacatggcggagaagttacattaagtaacggcactacattcaaaattccggaaggagctttaccagaagggacaagcaagatgtttatcattgattccaaaggtatcaattatcaaatgcctaccaataaacctcaaataaaagaaatcaaaaacaccctgcaaacactacatggaatggaatgtcacataaccttgtcagatggaacgaaagtacatttaaacgcagaatcccaattgatatatcctgtatgcttcagtaacgaacaacgtattgtccaaatcaaaggagaagcatatttcgatgttgctccagacagtgaacatccatttattgtccaaacaccatatacctctattcaagtgacaggaacaactttcaatgtcagagcctatccagacgagaatattgaaagcactacacttattaatggatctataaaaattaaaagtaaaaacgaagatttcgaattaactcccaaccaacatttcatttttgacaagaattccaaaagaaatactgtaaccaatgtaaatacagaattatacacatcttgggaatccggttcattcatattcaaaaatatccctcttgagagtgtcatgtcatatctttctaaatggtatggattcaaatacacatttgaagatgatgctgtcaaacaagtaaaaattggagcctatcttaatcgatatgcaaatatgaatccgattattgacatgataaaagaactgaacctggtagatataaaacaaagagaaggcgttctgcatatctcttataaataattactaatacattataactaacgcttatgaaaagacgagcacattccttattcagagggatatcgcgtacgagcagaaatattatcaagctctgctttttatgcgtattctctctatcttcacttatgattcaggcacaagacaaccagagaatatcggttgatcttagagaagagactttagaatcagtactctggtacctgcaaaatcgaacaaaatttatctttatgtatgcaactgaagatatcgctaacattactgatatcagtgtaagagcaaaagacaaaacaattaccgaaattttggacgaatgcctggaaggaactaatctcacttacgaaatttcaggtagtgctatcgttatcaagaaaagaaaaactgacaaaatcactattagcggttggatacgtgacacaagcggtgaagcacttccgggagctacggtcagtgttcgaggatcaaagcaaggagctattgccggattggacggacactacacctttagcattccggcacaggaaggactaatattgacctattcgttcatcggaatggaaaagaaaacagtcaaatatataggaaagagaaccatcaacgtcactctaaacaattcctcaaatacagaaatagacgaagtagtggtaaccggttatcagaacatccagcgacgtgacctggtaggttcgatcactaccgtcaaagccaaggatatcataatgccttcgtataccactattgaccaaatgttacaaggacgtgtggcaggtatggtagtgaccaataccagtagccgcgtaggtactgctcccaagattcagattcgtggtacaagtacactattaggtaatcaggacccgttatgggtagtagacggaattattcaggaggacccattagaattggatgcgacctctctaatgaccaatgacttaaaaaatatcatcggtaaccagatatcttggctgaatccggccgatattgaaagcatcagtattctaaaagatgcttctgcaactgctatttacggttcaaaggcatctaatggtgtcattgaaattaccactaaaaaaaatactactgatcgtttaagcgttaattacacatccaattttataataggaacacgacctaattacgatcagttcaattatatgaattcaaaagaaagggtactgttctcacaagaagctttcaactggggaactccttacagtgctgaacctatcaaacaaatgtacacgtacgaaggattattgaatatgtatttatcacatgatatatcctctgaagagttccttgcccaacggaatgttttggaaacacaaaacacagattggttcaaactactaacccgccgcgctttcagccataatcacaatctaagtgtttccggcggaacaaacaaatacagttattcggcttctatgggatattccaaaagcgaaggacaagaaattggaaatgatagtgaacgcatgaccggccgtcttgctattactatacgtccggtacagaaactaaccataaatgcagctatcaatggaagtgtaaacacgaataaaggatttgcgggaggagtcaatcctttaggatatgccactaccactaaccgttcaatagaccctgatgtctattatcagatgaaagcctcctatccatataatgaaggagtaagatcgttatcatacaatttcattaatgaacgggagaatagcggctcaaaatcagcatccagctatctgtccgcctcacttgacttaaaatggaacattctagactggctgacttatcaattcaccggaggatattcggataataatagtacaaacgaggcatgggaatcggaacggacattttacattgccgagaattatcgcggatatgactttaactcggtttcaccagccagtaaagaattcaaagccgccttacttccttttggtggtgaattgtttactaacaacacacatcaatactcttacaacatacagaacaagttgcaattcagtaaggcttttaatgatgagaaccgattgaatgcactagtaggtatggaattgcgttctactaccaacaaaggaatcaacaatacggtatggggatatgttcccgatagaggagaagtcatcacaagcccgaccaccttacaagctttcgaaccgattaccggttctcaaaacagcggttggggcattctacaaagaatatatgacggtggttggagaaaagttaatactacggataatttcttctctgtatttgccacactggcctattcattcaaaaatcgctatgtaataaatgccaatgtacgtaatgacgcatccaaccgcttcggacaagataccaatcatcgtattgacccaacctactcatttggtttctcatggagggcttcagaagaaaggtttatgagaaaatatgtgggctggataactaacttaaacttccgcggcacttatggtattcagggaaatgcactcacacgtcttagtccggatctaattctgaatcaaggaacagtagctgatctatacaatagatatcaatctactatttcccagattccgaacccgactctgtcttgggaacgtaccaaatcatggaatttcggaatcgatctggaattatttaatctgttcaacatgaatctggaatattacacaagacgctctaatgcgattgtcgaattagacctgccttatgaatatggaatttcttctatgaaacgtaacggaggtattatccacaacagaggtatcgaatatacattgacttttactccgatacaaaaacgtgactatgcattaagtgtcagcctgaatgcatctaaaaactggaacgagggcgggcatacggatatcgaagtcaaggctagtgattttctgaacggacgctcggatatcatactcaaacaaggttatccccttagtagtttctggtcatactcatttgccggtctgaatggacaaaccggagaacctcaattcaaccttctggatattccggatgaccaacgaagccgattgatagacccgaccacctacctggtttattcagggcaaagagatccctattttacaggtggattaagtttaagtttccggtataaatcactgactctgaacagcagtttctcactcttgcttggcaacaaaaaacgtctgccctcgccctactcgcagtttagcagttcctactatatgccagacccatatacgaatataaaccgtgatttgttaaaccgttggaaagagccgggagacgaagcacatactatcataccttcactgcctaagggcaatatgtctctcatacaattacctaatggagagagtactttcaaaatcccggtatgggagcagtctgatgctatggttgtaagtggttcattcctacgctgccgtaatatcggtttatcttggcaaatgaaacgcgaatggtgcgaaaagatatacatgaagaacttgtcactcaacttcaacatggataatatcttcgttatcgccagcaaacgtttcaacgggttcgacccggaaatcagcaatagtgtacttccgcgcaattactcactaggtattaacattggtttctaaaaaaataaaagatgaaaaaatttatatatacaattataggaatcgttttattatcactgtcctcctgctccgactttctggaaccgaaatcccaaagcgaatatgttcctaaagacgctaacgccctccaagagatgctaatcggcagtgcttacccccaacataagtcaggcaacaatttactaggttttttaagtttcctcgatgatgatgtccagttccacaaaaccgggtatgagttcgattccaactcattaggatatgtagaatccaagaaagcagttttcacatggcaaccggatatgttcttcataatggaaaagaacagtcccgttgtttacaatatctgggaaggttactataaatttattttaggggcaaatgccgcacttgattatattggtgatgtaaacggaacagaagctgaaaagaactatgtgattgcccaagctttaggtctaagagcattctactacttcatgttagtcaatcacttcggtgcaccttataattatgacaagcaagcagcgggagtacctcttaaattgacaagtaacctactgcccgaagaagatttattaatgacacgtaatagtgtagaagaagtttataaccagattatagaagatttgagcgaagcggaacggttgtttctcactttatcgaaagataagcaatacgaaccgaactatttaatcagccttcctatgatacaattattgaaatcccgtgttttcctttacatggaaaattggaaggatgcagcgatatatgccgacaaggtaatcaatgagtggtctttctctttaatcaatttgaataatctgccttctacgtcaacagcagaaccttattacaatttcacgtctttgaaatcatcagaagtaatctggctatatggaaatgtatctgatctcacagaatttaataacgaaacagtatctcgtgaagaggaagaccccgattatcccggttggggaataaatattacctactatcggaaagccttcacagcttccgatgatctgttggaaagttttaaagatggagacttaagaaaagaaaaatacatagctaaagaatataacagaataaataacagtttttatccggactattacagttctttcgggaaataccaactatctgcaatgggcgagcctaatggttcagagaattttgcactctcttttagactgagtgaagcatatctgaatcttgcagaagctgctgcctacaataacgaagaaagtaaggcgctttcagctatgagaactttattggagaatcgatacgaaccagaaaagttagttgtccctgccggattgaccggtgagacgttgaaaaacttcatcaaggcagaaagaagaaaagaactctgttttgagggacaacgctggttcgacctgagacgctacggaatgcctcaaatcacacacgaatgggaaggtaaaacatatacgctaaaatccaacgacccttcttataccatgccgattccggatgaagtattgattaaaaataaaagactggaacaaaatcctttggctcctaaacgagaaaactaatgctaataatttcagtaacttaaaaaagaaacaaatatgagaaatatatatttattatggggactcctcacttgcatagcattcacctcatgctatgaagaagatgcacttacccccacagaaggaggcattgaattacgtttcaaagttccccaaggaacgaatagctgggatgatgacatctcacaaatacaaaaagatttcggcgtctatctgatttataaagatctgcaagatgaagatttcaatcgtagctggacaggaggtgcatccacaaattataaaggggaagggtgtatcaacgatgaaatggcgaagttctatacggaatttatgaagaaacatgtattctcctacctcaataacgaaaagtgtaaaaaggttacaagcaaattattaccgttatattggtatatggcttataatgtgcatatagcaacggaaatagatttgggagcagtcgttatcaaacaaaataatgccatgcacgaaatcattaatggtctggattactggagcacctgtttattcggacctcaggcagaaatgaccgacaaatatattatgccggacgaccaagtaacgttcagccaacgtcggaaaatgattctcggtaatatcataaaggctgctgtagaaaaaaggctaattaccattcccgaagaattcaaccgtggtttggattacgtgactcctatatcattctatttttgggaaacagatagtcctgattttcacttgaacaggggatttccaggtactgtaaatacaaataaattcacactgaatgaagaatatgacggcagcaacccgacccgggaagcaacatttgccggatatgccttactatcattatattatacggaagccgaaagtaccgaaagatacagtcaattcccgcttattattgagaaattcgctttcgtacgcaaatacatgaaggagaattatggaattgatttggaagccatagctaaaggtccgaatgactgggatattcagcctcatccagaaataccgggtaacaacgatgaagacggtggagacgatgacgatccctggccaggatttgactggtaactattctcctgtgacgattattatttaaatacaattctatgatatcaacaaagaaacttttcattttatttttttcgtccttcttatgcgccacgacaagttcgtggtgcaaagatggactacaaattaaaggcaagttaagaatactgaaaccaaccactttgcaagtgaatgacctgaacggaacacttattcttagctgtgaactccaacccaataaagagttcgccacagaacagaagctgattcaacccgatatctacacattgcgaatcggaaaaacggaagaaaaaatatatttcgagaaccatgaagtgaacatcatcggctactatgatgagacaaatcccgaacaaagttccctgtcgtttaaaggtatcgactcgtttctcactctgcaagaatatttacccgcagataaagacccggacacagcaactgtttctcttccagctaacgcgcaactgtcacctaatatggtatccgcgcttgcttatctggccaatgtaaatgactattactctaataagaaattattggatatgatttccgatgatgagcgaaactctttatctgcccgctggctggtagaaagagtcaaaatcctttcccaccaaattattggtgcagaatgtccggactttactttcacgaatgtcaatgatcagaaggtcaatttaaaagactttcgcggtaaaattgtcgttttggatttctgtgcttcctggtgcggcccttgtcgtaaggagatgcgtagtatgctaaaaatatataatgaactgaaagctgacgatttggagttcatcagcgtatcactagacgatagccaagctaagtggaaaaagatgctggacgaagaaaaacttccctgggtaatgctgtgggataaaacaggctttccgaaaagtaatgaagctccaagtgctatccagacagcttatggcttttatgccatccctttccttgtagtcattgacaaagaaggaaaactaatagcacgtaatgtccgcggagaacaagtacgtgaagccatattaaaagctagaaattaatctgactatataaatatcataactcatcctacaatgaaaaaacttatatcccttatcttatgctgccttatttgtggaattacatcagctcaattaataaaacaaaaagttgaaaaacaaaaaaaacaatccgaactggactggtacaattgttctttcgacagagacagtgtatatggcgctgaagttaacaaagcctatgaatatttgaatgctaacaaaaagaaactcaagaaaaggccgattgtcgcattaatcggaaccggaatggacgtggaacacgaagatctgagacaggctatatggatcaatcccaaagaaaaattaaatcaaaaagatgatgatagaaatggtctcattgatgatattaatggttggaacttcctcgggggcaaagatgctcaagttgtggagtctttgacgagagaaggagaacgtgaattcttccgcttgaaagataaatatgcagactatatttttgatgggaaaaagtattataaaattattaatggaacacgtcaggaagtagctgcaccggaaaacatggaagaatataactattatcgatataaagtaatgcccgaatccagaataggaagtacttacagtggtctgcaacttgcttatgtcatcgaagaatacgttgaaaaatttaatagagacatgaagcagcgcttccctggaaaagaattaaccgtcgaggagtttcaaagttgttatgaccctaaagcggaaagggacagcctctctgaagtagcctttgtatgtacagcctattatttcagtttatataatacagataaatgggaacctgtataccaaaatatgggtaagaaaagtgtggaaacagctaaagcctcttacgaagaagccttaagaaaatatggtacggaccaacggaaagaaattacaggtgacaacccaatggacataaatgacagcaattatggaaataatatactacttacatccgatgcagcaaccaacataatgaaggcaggaattatagctgctaaacgtgacaataaaataggaagcgatggcattgccgatcaagcagaaatcatgacgctacgtatctgtacaagagaaggggaaccttacctgaaagatatggcattagccattcattatgcagtcagccacggagcagatgtgattgtattgcctgaacagaatatgttataccccgaggaacaaaaacaatggataatccatgaattgaaagaagcggaaaagaaaggagccatagtgatagttcccgcgtggaatacatctatcgatatggacaaagtagaattcttcccgaaccggaaaatgagtaaagacaaagaactcaccaatcttatgatagtcgcctcttctgataaaaaaggaaatccggttatggatacaaattatggagcaaatacactagatatctatgctccgggaacagatatatattctgcatacatgggagacacttaccgaacaggaacaggagaaggactagcggccgctaccgtagccggagtagccacactcataaaatcttattttccaaagcttaccggctcacaaatccgtgatattctattaaaaagtgtaacctcacgcaaaggagtagaagtagaaaaaggcattcgagtagacgacagaccttcacaagatttattcctttttgatgatttatgtatctccggaggtattgttaacgcctatcaagctattctagaagcagaaaaaatgaattcgcaaaagaaatgatatgaaaagagcagagatactcaccggtttatggctgttaatgtttctaatctatggaaaggaatgtatgtcgcaaatccaaaataaggtttgcgacactattccctatgaattggtacacaacaaaatcattattcctgtcacaatcaacggcgttaaaacgaaatatatcgtcgacaccggtggcaaaaccggaacgatgtacgatatagcccttgaaatgcaggcaaacgctgcaggatatacacgcatttctgatgtgaacggacagggacaaaactatcaagaagcatatgtctccaatgtatccatcggcaatagttaccaaatcaagctattaaaaacaatggtgctgcccaaagatccttttttcactgatttaggagtcgccggcattctcggtggagacgcattctcacaatctgtagtaacattcgactctcgctatagaatcatggtcatcaactatccctatcgccccgagaaactgaaactaacagacggagttcctcttctggatgaaacggaatatcactcatttgtcactgtcaagcaagaagaacagacaatgaaaatattgtttgacactggtgcagaaggttttctactatattcgatacaagattataacaggctggctgatatatccgatataaaagaaacaaatcatgcacatgggattgtatctgccggattagccggactgggaagtcctgtagaaatcaaaaaactgaacataccttctattcgtatcatggataaggaattcacaaacataggctgcacgacaagcgtaatgaatgaaacaatcataggagtagacttgctgaaatatggaaaagtgattatagactatatgcgtaaacgcttcttcttcctcccattcgaaaaagggaaaactgatatgggaggtgctcccgttctttggaatgtgagtatattgccacgcaacgaacgatttgaaatcacaacgatatgggatagtatgaaagaccaagtatctttcggtgatcaggtaatcaatatcaacggaacctcattaagcaactgtccgatgagccagattgctatagaagagataatgaacgctattcccggagatacaggatatattattattaaaaaggacaatcaggagagaaaaatagaaatcaaaaaagaaagatagactttaaaacaatatgaatttgagaaatatgataataaaaatacatatatgtttgattgctttttgttttatttcaggcataaaagcacaaacacagaacagtatgacggaaatcattccatttaaaacaatcgatggaaaaattatcatagaagccaatataaatggagaaacagcaaattttgtacttgatttagccggacataatgcattacttccggaagctgtcaaccaactgaaaatcaacacgaaaaacgccagtagttttggaagttaccagaatttcaaattcaaacaggttcccgtaaagaaaatctatgaaataggaaccttaactattggtaataatacattcagcaatagtctgccaacattcatattagaagatgaaccttatctacgcaaactgggagtaatgggagtattgaattctgcagtattccgaacttccgtcttgaccattgacatgcgacgaaaaaagatcactatcactcagccgtaccgaccttcgtacatgaaactaaactatagagaaaattttgaattgataacaggtttaggtatagtatgttcgatatcgattcaagataaaacaatttttcctattttagatacatggagcgacggattaatcaacctcactgaaaaagactttaacgagtggagcacactttatccgaagggaactccgcaaaaagtttcaatcggctataaagagacggcacaagaagaagaaagcctgaccttaccggaaacaatattcgtgaaaacaaagatagacgatgcctttgccgtgaggaatccatctctgaaacattctgttttaggaaagaaactattggactacggcattttgtccattgattatgttcatcaaaaaatatacttccagcctttcgacttggttcctattcccgaatcggaagctaaagtaacggaagtcaaagcggaagacggcaagatgaatccgattacccgccaattctttctggaacatatttttgattaccggacaggaaatgatttcgtttataatggagacaaacctgtggttgttgacttttgggcaacttggtgcggcccttgtatgagactgcttccgaaaatggaagaattggctgaaaagtataagggaaaagtcatgttttataaagtgaatgcggataaagagaaagacttgtgcaaacatttcggagtacaggcgctgccgactcttttctttattccggtaggcggcaaacctatcgtcgaagtcggagctactccggagaagtacgtgcaaatcattgaggaacagcttctcaaataatagcaatggagaaagaggtattgatgccagccaccattgcctatgtattcagcttcaaaacggaaacagggtattgacttttccttttttattttgtatatttgcagaaacaaatcagaaacaacaggtatgaaacatacaaaaataaagacataaatcatcagattgcatacacgcaagtgtactgtaagaactaacaatggggtgaagtctgcaaggatttcgccccattttgtttaaattcttcacccatttttcaagagttcagccaataatcgtttataataaacttaagacccgtttataataaacgttctcactttttattataaacacaaggtctgttctttaaacaacttgtataagaaagagaaacaagattcattcttttatacgcataaagcaataggcacaaataattttgtacaaacagaaattacaaatttgtcgtgtcaaatctatttataacttaacacacattttaggatcatgaaggaaagtatttctcttcttcttttatctttatcaatggtccggaagtgattcctgccgaattatggctggacgagattgaagcgtattaaccaagtgtaaatcatcttagagtaaacccaatataaaaagaacggtggacactagtttctaaccgatgtccaccgtttttattttaagagttaccacaccggaattgtgtgattactatccttcggttttatactgaacattatatttatcagataagtccttttgcagaaaggtaacgttctgcctcaatagcagccttacatccgcttcccgccgctgtaatagcctgacggtaatgagggtcggccacatctccggcagcaaacactccgggaactttcgtacgcggactggcaccatctgtaatgatataacccacttcatccgtatccagataatccttgaatatatcagaattcggttgatgaccgatagccagaaagaaaccgtcgataggcaggctgtaacgttcctcatccggttcaccccaacgtttcacaaggtttacaccttccactccattgtcaccgtacaaaccgacagcattgtgttcaaaaagaacttcaatcttctcgtgattcatcacgcgctcctgcataatcttcgatgcacgcaggaaaggcttacggacaatcagatatactttcgatgcaagtccggcaagataaaccgcttcttcacaagccgtatcaccgccaccgactacggcaaccactttcttacgatagaagaaaccatcgcaggtagcacaagcgctgacacccattcccgcatatttcttttcgtcttccaggcccaaatacttagctgttgccccggtagagataatcaacgtctccgcttcgatttctttttctccgtcaatcgttattttataaggagccttgctcaaatccgctgcagtagcaataccgaaacgtacatctgtcccaaagcggctcgcctgtgcacgcaaatcttccatcaactgcggtccgctgataccttccggataaccggggaagttttcaacatccgtagttgtcgtcaactgaccgccgggctgcaatccttcataaagcaccggacacaagtttgcacgtcccgcataaatcgctgccgtatatccggcaggtcctgaaccaataatcaggcacttaactttttctatttctgccattttaattatacctttatcgttttgttattcaaaaacattttatctcaaatcaataatctctgcattcggatattgttttttatcaaaagaaaaaatactatccgcataattcagccgtgtctgataacctgtcacggtaatctcattacgcgtctgctgatcacgctgctgaagcagaatatatagaggctcatacgtattcttcgtcacataaagagtgatacgctccaaatcctgtttcttatccttcgctgtgagaattacttcccagacagcctttcccccgtaagtctttactgttcccagtttataggaaaatcctttctgatacatatacaggaatgtatacggattaatctgttgtagttcttcctgtgtcggattgctgacgttcacttcatcattcctgactacatagctccattgcgttttcccatcaaaccaggttatcacttcggacgccttcaatacgaacttctctcctttcaactgaatcgtaccgctttccgacccttccaccaaaccgttagtcacagatttaataatgaaatcagccttcactccgcctgccttacgaaatgcttcggctgtcttatcaagaacagctttagcctgcgactgctgttgttgagcaatcacaggcaatgacagtaaagctattaaaacactaaaaatgtatttcctcatttgattaataaacgattgattactgcaaattgttcaaacgcatttcaagatcattatcatcgatgcaaagtacgtcacgcgctttgcttccctgcgtaggaccgacgattccagccttttcaagttgatccatgatacggccggcacgattataaccgatagcaaacttacgttgaattaacgacgtggaaccttgctgatgaataaccaccaaccgggcagcgtcttcaaacaacgggtcaagacgccccatatcaatatcccctacttcgctaccgctgtcttcactcacatactcgggcaggaagaaaggagtaggatatccttgctgacgggcaataaacttcgtgatttcctctacttccggcgtatcgataaaggcacattgcacacgcaccggatcagctccctgtaagaaaagcatatctcccttaccaattagacggttggcacccggacggtcaagaatcgttcgggaatccatcatggcggatacacggaaagcgatacgggccgggaagttggctttaatcgtacccgtgatgatattcgtcgtcggacgctgtgtagcgataatcatgtggataccgacagcacgcgccaactgggcgatacgggcaatcggaagttccacctccttacctgccgtcataatcaggtcaccgaactcgtcgataacaacgacaatatacggcatgaacttatgtcctttctccggattcagacgacggttgataaacttctcattatactccttgacattacgtacatgagccattttcaacaggtcataacgggtatccatttccacacagacggaattcagagtttgcactactttcgtcacgtccgtaataatcggttcaccgccatcgggaagtttggcaaggaaatggttttcaatgaccgagtagatgctgaactctaccttcttcgggtcgaccaggacaaacttcagttcagccggatgtttcttatataataaggaagtaataattgcattcagaccgacagacttaccctgaccggttgcacctgccaccaatacgtgcggcatcttgcaaaggtcgaacataaagacttcattcgtaatagtctttcccaacacaataggcaggtcaaacttggattcctggaatttcttgcttccgataacactttgcccggaaacaatcttcggattcttgttcggtacctcaataccgatggttcccttgcccggtatcggggcaatgatacggataccgtcagcagacaggctcaacgcaatatcatcctccaatccgcgaattttggagatacgcacgccttgttcgggagttatctcatacagagtaaccgtaggaccgaccgttgccttaatcgtgctgatttcaatgccgaagctgcgcaacgtattgatgatacggtctttattggcattctgttcatccatatcaattgtcggatcgtcgttttcaaaatgcttcatcaggtcgatcgtggggaaacgataattctccaaatcttttgtcgggttataaggttccatttccggtccctgatattcttcttccgaagcggcagactccacttcaaaaccgggttcttcatcctccgaagactctccccccaaaggaggaacaacattggaaacggttggttcgaacaccatggttaccccttcactctcatcggatgaagcggaggatatatcgtccgtttccggttcactcaccggaaattcttcttggggttcttccgcctgtatatccattacaggtgccggaggcggtgtctgtttgtatgtccgtttcaagttaaattctacttcctgcggttgggaggtcgtaaattcctgcggttcttctccggtagtggcaagctcttcttcctccttcttctttcgtttcaggaaactcaatgcaaagagtttgcgcaaccaaatcactgtacgcgcacttatatatataaagaagcaaatagccgttatcaacagaatcatccacaccccgggtacaccgacctgagagatcagccaacggctgacattgtatccatgcataccgcccagataaatgaaagaatcctgataatgatccataaacacaaatccgaagaatatagagaaccataccagtaacaatgtgcaacctataaaccacttccacagacggacaacacgcacacgcatcaacttcaatcctgccaccgccaaaaagacaagaataaagaaggaagagacaccgaagcaatcattaatcaagtaatgagccaactgcgccccacgcgaaccggcatagttcttcacatgattgttgactgccgacaggtctgccggatttccactgtcgataatactctggtcggcagctcccgtgaaaaagaaagaggaaaaagccaacaataaataaacggaaaaaatgaccaacattaatccgataacaaagtggacagtctcattctttaaaattgctgcgattttacccggagaagaggaagtacgttcggcctccttatctaattttttttttgccatgagtcttttattctttttataaaattggaatcgtaatctaagccgcaaaaataataaaaaaataacgagcgctacgctcattcaatcctttttcttacctttgcgtttcaaatcaacgctgattatggaaaaagaaagccaaacgatatttgataagaatgtaattgagttcgtaacggtagccgccgaattttgtgcattcctcgaacgtgccgaaagcatgaagcgcagcactttcgttgatacatcattgaaaatactgcctttactctatctcaaagcctccatgctgccgaagtgtgagacgatcggggatgaggcgcccgagacgtatgtgactgaagaaatttatgaaattcttcgtatcaaccttgcaggattaatgggagacaaggatgattatctggacgtatttgtgcaggatatggtatacagcgaccagcctatcaagaagtccatatctgaagatttggctgatatttatcaagatatcaaagactttatttttgttttccaactgggattgaacgaaacgatgaacgattcgctggccatttgtcaggaaaacttcggaatgttgtggggacaaaagctggttaatacactgcgcgccctccacgacgtgaagtataatctgcaggacaacgaagaagaggaagaaaacaacgaagaaggattttacgaaccaagcgaagacgacagttgttgtgaagaaggcggttgtcattgccatgacgacgaatgtcactgccacgaaggcagttgccattgtcacgatgatgaaaaataaaaatgattgtaagaagaaccattgataaagacgaattaaaggaactcccgaaagtagtttttccgggaagaatccatgttatccaatcggaatcggaaacggaaaaggcggtagcctacctgttgtcgcagccgatattgggtatcgacagcgaaacgcggccctctttcacaaaagggcaatcacacaaagtagcgcttctccagatttcttccgaagaatgttgttttctgttccggctcaatatgacgggacttacacagccattggttgacttgcttgagaacccgggaattattaaggtggggctttcgctgaaagacgactttatgatgttgcataaacgtgctcctttcaaccaacagagttgtatcgaattgcaggactatgtacgtcagttcggcatacaggacaaaagcctccaaaagatttatgccattttatttaaggaaaaaatttccaaatcgcaacgactgtccaattgggaagcggatgtgttgagtgatggacaaaaacaatacgccgccaccgacgcctgggcatgcctcaacatctacaacctgctgcaagaactaaagcggacaggtaattatgaaatagctcccgaagaaaagaaagaagaacatttaatagaatcagataaataaaacactatgcataaagtatacctcaaacccggtaaagaagagtcgctgaaaagatttcacccctggattttctccggtgctatctcccgtttcgacggagaacccgaagaaggtgaagttgtagaagtatacacctccaagaaagaatttatcgccgaaggacacttccagatcggaagtatcgccgtacgtgtgctttctttccggcaagaaccgatcaaccatgatttctggaaacgcaaactggaaattgcatacgacatgcgttgtgccattggaatcgctatcaatccggtcaacgacacctatcgtctcgtacacggtgaaggtgacaatctccccggactggtgattgatatttatgccaaaactgccgtcatgcaagctcactcggcaggaatgcacgtagaccgcatggtgatcgccgaggctttgtccgaagtcatgggtgacaagattgaaaatatctattataaatcagaaacaacgctccccttcaaagccgaccttttccccgaaaatggtttcctgaaaggaggaagcaatgataatattgcacaagagtacggtctgaagtttcatgtagactggctgaaaggccagaaaacgggattctttgtagaccaacgcgaaaaccgctcgttattggaacggtatgccaaagatcgctcggtactgaatatgttctgctacaccggaggcttttctttctacgccatgcgcggaggtgcaaagctcgtccactcggtagacagctctgcgaaagcaatcgatctgaccaacaagaatgtggaactgaacttccctggtgatccccgccatgaagcattcgctgaagacgccttcaaatatctcgaccgtatgggcgaccagtacgacctgattatcctcgacccacccgcatttgccaaacacaaggatgcgttgcggaatgcattgcagggttatcggaaactgaacgccaaagcattcgagaaaatcaagccgggtggtatcttgtttactttctcctgctcacaggtagtaaccaaagataatttccgcacagcagtattcaccgcagccgccatgtcgggacgcagcgtgcgtatcttgcaccagctcacccaacctgccgatcatccggtgaatatctatcatccagaaggcgaatatctgaaaggacttgtactctacgtagaataagtccggcaagatgtcggaaccagatttctactcgaaggataaaaaagaatattataagaggaaatcaggaggcagtaacagaaaaaaggagtattcaaagttaattagagttaacaatatgcagtttttcaatgagacattatgttgtataacataaaccacttatctttgcactgtgtttttcatggtattagatttaaggttaacaaagattggctgtctgggatagatagccttcttttttttatataccctttccattcttattttttatcatagatattcttccttctttgcatttatgccttttttatcgcctttttatcaattaacttgctcacccaatcaacgaaaatattatatttgcatctattattagcaaaagagaaacacaaatttaaaaaagtcatgagcataaaagttcgtttgattattatgaacttcctgcaattttttgtctgggggtcatggttaatttcactaggtggctatatgggcagagaactccatttcgaaggaggacaaatcggagccattttcgccactatgggaattgcctctttggtgatgcccggcattatcggtatcattgccgataaatggtttaatgcagagcgtttatacggactttgccacattgtaggtgcagcctgtcttttctacgcttccaccgctacgggatacgaccagatgtattgggccatgttactcaatctattggtatatatgcctactttgtcattagccaataccgtttcatacaatgcattggagcaatataaatgtgatttaatcaaagatttcccccctatccgcgtatggggaacgatcggttttatctgtgccatgtgggcggtagaccttaccggattcaaaaactcaagcgcccaactttatgtcggcgccatatccgcactgttactgggagtttattctttcacccttccggcttgtaaacccgccaaaacagaaaacaaatcactgctttcggctttcgggctggatgcattggtgttatttaaaagaaagaaaatggcaattttcttccttttctccatgcttttgggggcggctttacagataaccaatacatacggtgacctgtttctaggcagttttgccggtattccggagtttgcagattctttcggggtgaaacattcggttatcctgctatccatatcacagatgtccgagacactgtttattcttgctataccgtttttcctgaagcatttcggcatcaagcaagtgatgttaatcagtatgtttgcatgggtattccggttcggtttgttcggcttcggagatccgggaggcggattgtggatgttgattctttccatgattgtttatggcatggcgtttgatttcttcaacatttccggttccttgtttgttgaacaagagactaattcctccattcgtgccagtgctcaagggttgttctttatgatgactaacggtctgggagctatcatcggaggatatgccagcggagctgtggtagatgctttctcggtatatgccgacggcaaattggtgagtcgggaatggacggatatctggctgatttttgctgcgtatgcgttggttatcggaattctgtttgccttggtattcaagtataagcaccgacgggagagtaaaacaaattaagtaaaaaacaatggataaaaaggtagaattacaagttttaaatatcacaaatagccaagcgcaggtaggtgcattcgcaatgctattgggtgaagtggacggtgaacggcaactgcctatcatcatcggtcccgccgaagcccaggctaccgcgttgtatctgaaaggaattaaaactccacgcccgttaacacacgatttattcaccacaagccttaccgtattgggggtaagcctgatacgtgtgctgatttacaaagctaaagacggtattttctactcttatgtttacctgaaaagagacgaagatattatacgtattgacgcacgtacatcggacgccattgcattggcggtacgtgccgactgcccgattctgatttatgaatctatcctcgaccgggaatgcctgcgcataccggatgaagaaaggaaccgttctgaagaaacagttggtgacaaggaatctatggaagaagaacatgaatcgtcatcgcgcagtgccacttccaaaacacttgaacaagcattggagcaggctattaaagacgagaactatgaattggccgctaaaatacgcgaccagatcaatcaaagaaataaaaatcaataattactatatgcacgttttttatactcccgatatacagaaaaccaatgagcttccggaagaagaagcacagcactgtacccgtgtcttgcggttaagtatcggagacgaaatcacccttaccgatggaaagggtagtttctacaaggcagaaattacggcagcaaccaacaaacgttgtctggtagctatcaaagagacaattttccaaaaaccactatggccgtgccacctgcacatcgccatggcaccaactaaaaatatggaccgtaatgaatggtttgccgagaaagccactgaaataggattcgacgaactgacatttctcaactgccggttctcggaacgtaaagttatcaagaacgaacggatcgaaaagattcttatctcggcaatcaaacaatcactcaaagcccgtctgccgaaactgaatgagatgacagatttcaataaattcatcaatcaggagtttaagggacagaagtttatcgctcactgctacgaaggtgagaaacctctgctgaaggacgtactaaaagccggagaagacgccttggtgctgatcggcccggaaggagatttcagtgagggcgaagtagaaaaagctattgaacggggattcacgccgatcagcctgggtaaatcacgacttcggacagaaacagcggcattggtggcttgccacacgttgaatctgctaaatcaacaataaaagaacagttaaattgaaatttatacaccattaaaaaatatgagtatggcaaagaaaatgatttcacgactctcggtacttgcagtactgattgttttcctggcagcatgttccaaaacagtggaatataccaatataataccggctgatgctacggttgttacctctataaatctaaaatccttggctagtaaggccggattgaatgataaagagaatgaagctgccaagcaaaaagtattggaagcattaaaaagtggaatgaacgctgccactttccaacaattagaaaaagtgatgaataaccccagtgaatcgggaattgacgtagaagctcctgtctacgtatttacttcgccctcttttccatactctaccgcagttgcgaaaatcaaaagcgaagatgacctgcacgcttccttggaaataatggtaaaagagcaaatctgccaaccaatcaacgaagcagctggatatagctttacaaccatgaacggaggtttagtcgctttcaacaattctgccgtaatgctcatttccgtaaaaggaacatctcaaatagaaaaagccaaagaaggcatcaccaatctgttgaaacaaaccgcagataacagcattgcgaaatccggcgctttccagaaaatggaaaaacaaaaaagtgacatcaatttcttcgcttccatggcagctattcctgcaccttatcaagagcaagtcagtatgggacttcccgctgaagtgaaagcagaagacataaccataatagccggattaaactttgaaaaaggaagaattgccttgaaaacagaaaattacacggagaacgaggctgtaaaagctttgatgaaaaaacagttggaagcatttggaaaagcaaacaatacgttcgtaaaatacttcccggcttctaccctgatgtttgtcaatctgggtataaaaggagaaggtctttataatctcctaagtgaaaataaggaattccgtaacacagtatctatctccaaagcagatgaagttaaagaattgttcagttccttcaacggtgatatctccgcagggttaatcaacgtaaccatgaacagcgctcctacctttatagtgtatgcagacgtaaaaaacggcaatgcactcgaagccctttataagaacaagcaggcattgggactgaaaaaaggagaagatattctggaactgggcaaaaacgaatatgtctataagagtaaaggaatgaacgtattctttggtatcaaagacaaacaaatgtatgccaccaatgacgagttactctacaaaaatatagaaaaagcggcagacaagtctatcaaagacgctccgtatgcatcggaaatgaagggaaaaaacgtattcatggctatcaacgcagaagctatacttgaacttcccgttgttaaaatgctgatcggatttggtggtgaaaagttccggaccggttctgagatgttatcaaaagtttcctatctgtccgttagttcagaaggagaaacaagcgaaatcgacctttgcctgaaagataaagacgtcaatgcgctcaaattaatcgttgacttcggcaaacaatttaccggtatgtaattcgtaaacaaacggcatgaatagcattcatttacagcaaacacttccccaagtgtttgctgaccgtaattcggtgacttcggatatatggcatcaggatcttatcttccggaaaggggaaatgtgtctgatagaagcggcttccggcaccggaaaatcttcattgtgcagctatatttatggctatcgcaacgactatcaggggattatcaatttcgatgagactaatatcaaagcatattctgtgaagcaatgggtagacctgagaaagcattcactgagtatgctttttcaagatttacgtatcttcaccgagctgactgctcttgaaaatgtacaactgaaaaataatcttaccggatacaaaaagaagaaagaaatcctagccttcttcgagaaactgggactttcggacaagctgaatgtaaaggccggtaaactctcgttcgggcagcaacaacgggttgcctttatccgagcactctgccagcctttcgatttcctttttctggatgaacctatcagtcatctggatgatgacaacagccgcatcatgggagaacttattattggcgaagctgaaaagcaacaagccggagtaatcgccacttccataggaaaacatattgagttgccttatcaacgcatactccagctatgataagtggcgagtaatgagttattgtaaattataatttgtaaatcataaataaaatgtcagcccttgtctggaaacttctccgccaacatatcagtatcggccagttagccggtttctttttagccaatctattcggtatgatgattgtattgcttagtgtacagttttataaagatatcattccggtattcaccgaaggagacagctttatgaagaaagatttcatcatagccacaaagaagattagcacgctcggctcttttgcaggaaaaaacaacacattctctgccgaagacatcgccgacctgaagaaacaatcgtttaccaagacaatcggagcttttaccccctcccaattcaaagtttcggcgggactgggtatgcaggaagctggtattcatctttccaccgatatgtttttcgaatcggttcccgatgaatttgttgatattaaactcgataaatggcactttgatgaagccacacacaccattcctatcattattccccgcaattacctgaatctttataacttcggctttgcccaaagccgtagcctgcccaagctatcggaaggcttaatgagtctgatccaaatggacatcatgatgcgcggaaatggccgggtagagcagtataaaggaaatatcgtcggtttctccaatcgactgaacaccattttggtcccccagtcttttatggaatgggccaacaagaactttgccccgaatgcggaagcacaaccggcacgactgattattgaagtcagcaatcctgcggattcctccattgccggttattttcaaaagaaaggatatgaaacggaagacggaaagttggatgcaggcaagacgacctatttccttcgcctgattgtaggtattgtgctgggagtcggcctatttatcagtatcctttcattctatatcctgatgttaagcatcttcttactgctacaaaaaaatacgaccaagctggaaagtcttttattaataggatacagccccaatagagtagcattgccttatcagatactcacagtagggttgaacatcgttgtattactgctatctatcggattagtaacctggctgcgtagctattacatagaaagtatccgcctgctattcccccaattggaaacaggttcactatgggcagctatcggcatgggtattcttctgttccttatcgtatcaatcattaatatactcgcagtcaaacgaaaagtactttctatctggatgcacaaaagttaacactctaacattatatatcgtatgaaaagcaaaactaccttactgacacaaatatgtcaaatagctctgataacaggaatgttattatcaacttcaatgctatcagcacaaagtatgcaagatacggttattgccaattttagcctgttagagaaaataccccatgagaaggtttatctccacctggacaaaccattttacggtgccggagagaaaatctggttcaaaggctacctgataaatgccattacccaccaagatgatagccagagtaactttatcattacagaattaatcaatcgttccgactcgatcgtagaacgaaaaaaaatccgtagagactctttaggtttccacaatgcttttaccctgcctcctaccctccccgccggtgattactacctgcgaggatacagtaactggatgttgaatgaaggaccggaattcttctattcacgtaatctgaaaatcggaaactccatagataacaccatcctttcaaacatcaaatatcaacaagaggacgatacccattatacagcaaaagtcaagtttaccagcaatacccaagaggtttttaagaacacagcaatccggtatcggtttatcgtaaacggaaaaataaaagataaagggagaaaaaagacagatgaaaacggactgatttccatttccttaccggatttgaagccaactgctgcccgcagcattgaagtggaatttgacgacccgcaatacatctataaaaagactttttatttgccgacatttacgaatgactttgacgtcacttttttcccggaaggaggcgcactacttgctgttcagcaccagaacatagcgttcaaagctcagggagcagacggattctccaaagaaatagaaggtttcttactggattcccaaggagatacactgacatcttttcattccgagcacaaaggaatggggattttcacattaaacccttccaacggcagttcctattacgtaatggctacgtccagcgatggagttaccaaacgatttgacctcccggctatcgaacaaaagggaatcacactttccataagtcactataaacaggaaatacgttatgagattcagaaaacagaggcaacagaatggcctcaaaagctatttctcattgctcacacccgtggaaaactttccatacttcaacctattaatccgacaaggactttcggaaaaatgaatgacagcctgtttacagaagggatcactcatttcatgttaatcgaccagcaagggaatgcgctcagcgaacggctagtctttgttcccgaccgcaaaactccccaatggcaaataactccggaccgaccgacatacgaaaaaagagaaaaagtatcattaaatatttcaataaaagacgacaagggaaatcctgtaaacggtagtttctccgtcagcattaccaaccggaaaagtatccaaccggattctctcgctgacaacattgtatcaaacctactgttgacttccgatctgaaaggatatgtggaagacccggggttctattttctccgccaagatgcacgaaccctacgctcgttagatttcttgatgatgacacatggctggcgcagatacaaatttgataatgtactgcgtgctccctcattgaacttcagtaattatattgagaaaggacagactatcagtgggcgtattaaaggtttcttcggagggaatgtaaaaaaaggacctatcgtattattagctcctaaacaaaacattatcgccacaacaaccacagacgagaaaggagaatttatagtcaatacctcattcagagacagtaccactttcctcatacaagcacgtacaaagagaggttttgccggagttgatattgaaatagaaaaacctgagtatccggttgccttccataaatcccctttccgtgacggagcagcaacctttatggaagactatttgctcaatacccgcgaccaatattacatggaaggcggcataagagtctacaatctgaaagaagtactgattacaggaaaccggaaaaagcccagttcaacaagtatttatacaggaggaatcaacacctatactgtcgaaggagagcaactggaaaaatacggtgcacatacagcttttgatgcagtaatgagactgccgggagttagcgtaatgaatggaaacgaaatacatatacgcaacaatccgcaacagcctgttatcgtgattgacgatgtagtgtacgaggatgacaatgagatcctgaccaccctgcaagccagtgatatgtccagtttaagtctgctccgcggagcagatgcggcaatattaggttcccgtggtgctgccggtgccattgttatcacattaaaagacggaagagatcttccggccagaccggcacaaggaatcatcacttactctccactcgggtacagtgactcggtggaattttatcacccaacctatgatactctcgaaaagaaagatgcccggcgttcagatttaaggagtactatctattggaatccggcactgcaattggatgaagaaggaaatgcaataatagaatattacactccagacagcaccgcaccggaagacattattattgagggtatagatgaaaacgggaaagtatacaggctaacgcagacaataaataaatgaaaatctattcctatatcctcaaaagacatatatttttttgatatttctaaattaaataggatatttgtatacgcaatttatttaattgcgtgaacctcataaagtctaatcaatcatgaagaaacagaaatccggcttatataaaaaaagtcttattcgtattattttgtttttgtgcataaacttcatacattttcctttatacggatattattttaaaaatataggagtaaaagacggactctcgcaaccttcaatactaagtattcatcaggatgaattgggaaggatgtggttcggaacattgcaaggtttgagtatctatgacggaaatgaaatgataaccttgaaaggaggtgaagaacgttttgacaactatattaaaaataatacaatttatcgaatcgttgaagattcaaatcacaatatatttttgcgtgctgacaattctttggtttgttataaattgactgaagaccgttttcagtgtatcagagaaggagatataaacgctgttaattctattggtggcaaaatttatatagctgctaaagattcaattttggaatggaatgaaggcgataatcgttgggatttcttcaaaaaaatagaaatctcttcaggaagaataagttctatattttgcaatagaagtagtgaatggtatatcgtcacgtcaaaaggatgttacaaagaatataaaaatggattatggaaatgtatattggacataccttccatcgaaatgctttatgaaagtaaagatggttctatttggatggcaactcgttcaaacgggctgtatcagtttgacaatgatatttgtgtaaaccatattgtcaataatcccggaacagcgaatagtctttgcagcaatgacgtaagggtggtaaccgaagaccagtccggtaatttatggatcggaactcgtgaaggactgaacaaatactctatctcaaccggtaatatagagtcctatgcctcaggaggtttttccggtgacatgaaacattcatccatattcgccctctatttggacaaggagggaggattatgggtcggcacttattatggaggagtcagtgtcttttccccagagagtagaatttttaaatactatcccgcaaacaaggaacgctctgattgtctcaattttccatttgtcagtggaattgtaaaagacaaacgggatgatttgtggatatgtacagatggcggaggacttaattatatgaatcataagactgaaatattccgtcacctcagtacgaaagactccggtcttgtagcagataatatgaaatctatctgttatgataagaataaggataaattatatattggtacctatttatcgggattgatagcttatgacataccttccggaaaattcaccaagtgttttaagtctccaaaggatagagtgttacatcacactgtgacacatgtatatatgtatggcgataaaattgtattctcttcaagtgatggtatttatgtgtttaacgaaaaaaccaacgaagttaccccgctattatgtattaagggagtacttgcgtttgttatcgatcaatcagaccagatatgggcgatatataataaaaatatagtttgtatgaaaataggtgtgccagattcaatgaaacgataccaatcgagtgattttggcataaagcacaatgtactcttatgtatatgtgaaacaagtaacggtgagatttatgtaggtacggaaggtggtggaatgttaggatataatgctaaagaagatacttttcaaatatataattccaagaattccctaatattggatgattattgctttaattgtatttctctcgatgaaagatttatggtaattatgtgtagtaacggactttcttttttcgatacaaaagaaaagagagtgaaatattctatatcggggaaaaaactgccagtttcatcgtttggtgtagataacggactttacgtttccgaaaataaggatatatatgcgggcagtttggaggggttggctgcattttctgtggataatttaaagaattcagctaacaaaaagtccttgtatctttcaaaattatttgtaaataacgcattaatgttacccaatgacagtaacaaaattctgaagcgtattatttcatatacagataaaattgtattgaaacacaatcagaacaatctggaatttactttctcggacaacgatttttattattctatatttccgacattttatgaatataaattagacggattggataaaaaatggataaaaactaatggacatcatatcacctataccaatattcctcctggcaattatacgttgcatatcagagaaaacaatatttatggtaatgaacaggacgaaggaataagtctcgatattgttgtaaaattaccttggtggaacacttggtgggcatggttgatttattttataatagttttatcaatactattcattatagcaaaggaaaagataacatctttcaaatttaaactcttattggataatgaaaaaagagaaaaagaaaatatagagaaaatcaatcggttcaaacttgacttttttacaaatgtaagccatgaacttcgtactccgcttactttaataactactcagattgaactactcttgagtaacagcaaggatatttccaaacctgtttatgataaaatattaaaattacacaaacatgcatctgatatgcggaaccagattagcgaattacttgattttcataagctagatcaaaaacaaatgcgtttatctgttcaagaaaaaaatcttattcctttcttagatgaagtgtatttgtcatttaaagaacaggcagaagcacataacatcaaatacctgtttacaacaagctgcgaatcggcgttttgctggtttgacagtgtacaattaagaaaagtgttctcgaatctgatttctaatgccttaaagtttaccaacgacaatggaagcgttgaactttctttgattaaaagcaacgaaatgtttatcatacgattaatagataatggcataggaatcgaagcaggagagattgataggatatttgaacgttattatcaatctaaaggtaaattctacacattcagttcaggcataggactagctttatgtaaggagattatcaatctgcatcatggtaaaattacagtggaaagcaaacccggctatggcagcatattcagcgtcatgctgaaaaccggtaatgaacattttataaatgacccgcttgtagacatacagcatgatataaaagaaagcaagtctattgtgcagaattcaataccggacagtgattttatgaaaacactaaaagagaataataagatagtctatcataaaaatgatcctgatgaagccgatgtcagacgaatacttattgttgaagataatgtagaactcctgaatttgcttgcggagatattttctccactttatcaggtatacaaagcaacaaatggggacgatggcttgagaattacaataaaggaacaaccggatattgtattaagcgatgtaatgatgcccggtataagtggaaatgaaatgtgtagaagaataaagaataatatacacacatgtcacattccggtagttctgctaaccgcaagaatatctcccgaacaacaagtggagggattaatgtcgggggcagatgattatattaccaaatcttttaatgctaaaattcttctgattaaaattaataacatactccgtaatagagagttgcttcatcatacaaatactgataacagccagtctacaaatgttccaggagtggttcaaaatgaaagtgacaaaaaactacttgataaaataaaagagatagtagagaaaaatatcgagaatcctgattttaatatagagcaacttgcatcagaggtatgtatgggacgtagtgctttttttgaaaagataaaagacattacaggtacaacccctgccaatttcattttggaatgtagacttaataaagctactgcattactgataaagaatccgacacttcgcatggatgatattgctgcatatttgggctttagttcaggacgctatttttgtaaatgctttaagaatcattttggaatttctccgctacaatataggaaacaagaccagggatagtctaaaacgttctaattcatagaacgttaaaataggcactcatattttttggatactttgttcggacattttggtacagttatagaaaacgctatttctatttttgccttcgcaaagaatcgttttagccattataactaaatctatatttaccaaattatgaagaataaagtacagagacattttccttatttgaaaaaaaataagctgctattattgggggctatcacagttttagtatgttcaagtaatgccttggcacagaataacggaaacaaattagtaagtgataactttgattttgccaaaaggcaaatggtacacatgcttgaaaatataccgcaaggagaagctaaaatgccgcactccataaatggtaaaggaaatacttcatgtcggagcatctattggtggacctccggattctttcctggaatattatggtatataaacgaatatacaggtgataaagcttttgaaagctttgccaaaaaatggacagaaaagcttgaaccagttaaaacattcaaaggtaatcatgatataggtttcatgatgtattgtagcttcggtaatgcttatcgccttacgcagaatgaaaaatacaaggatatacttatacaatccgcatactctttggctacacgctttaatcctcaagtaggtacaatcaagtcctgggactcatggcgttcatgggaaaacaaacacgtttttaaatatcccgttatcatagataatatgatgaacttggaattgctgttctgggcttcaaaagcaaccggtgacccttcattcagaaacatagcgatatcgcatgcggaaaagaccatgaaatatcagataagaaaagacggtagcagttatcatctggcatgctatgaccctgagaccgggaatttcattaaaggcgaaacatcacagggatactccaacgagtctacgtggtctcgcggacaaggttggggaatatatggctttacattatgttatcgtgaaacaaaggatccgcgtttcttgaaaacagcccagcgtatggcggattattacatcaatcacccgaatcttccgtctgataaaattccttggtgggattttgatacgcatagaccggggtttatccctggcaagttctctaagaccaataaatacatacaaaactatcgtgacgcctccgctgcttctgttaccgcttctgctttgttagaattatcctcttatgtaaaggatgacaagaagaaaatttatacagagacagcactacaaatactcacctcattatcgagtcctgaatatcgtgcagaagaaggtaaaaacggaaactttattttaaaacacagcacaggagctattcctcacggttcagaagtagacgtgccattaatttatgcggactattattttttagaggctcttttacgttacaatcgaatgataaacaataaaccgatattataattatgaagcgtaaaattctttttatactattttgcatttgttccttcagttctatggtagcttcaaagcgtacaggtgcgcaagaccgcgagttatgggtaaagtatttgtgtcgtatagcctcaccggttattgacaatttagccaagggaacattggaggccaacatgcccgtagagaccggaaaaaatttctatggtaatccacgtgacgttacctacttagaggctgtaggaagaacacttgccggcattgctccttggttggctttacctgatgacaatacagaagaaggtaaactaaggaaaagttttagaacttcagtacttaaaggactgaaaaatggtgtttctcccgaatctcccgattgtctgaactttacccgcaattatcagcccactgtagatgcagcttatttagcacaagcttttctacgtgcccccaaggctttatgggagccactggatacgctcaccaaacaaagatatgtgaccgcatttaagtcactccgtagaaataaacccgtgtataataatcatttgttatttgcggctatcatagaaacttttttgttgaaagtcggtgaacaagttgatcaagctaaagtattcttagcttgtaaaaaaatagaagaatggtatgtgggtgacggctggtatagtgacggaccaagtttctctatggattattataatgattatgttattcatcccatgctggtagacatttatcaggtattaaaggaaaaaaaaatagtctcggaaaggcaatataatacagctgttaaaaggatgatacgccattctgatttttctgagcgtatgataatgcctgacggagtttttccggcttttggacgttcggctacttatcgtacaggggcatttcaaagcttatcacaagtagcattgatgaaaatactgccttcttatatacatcctgcacaagtacgttgtgcgctcactgccgtatttgtgaatatgtacgacggtaatcagaatttcgacaaaaacggctggttggtactgggatttaatggtcatcaacctgaattggctgattattatactactaccggtagtttgtatatggcaacacttggttttttagcactgggacttccggcagatgattacttttggacaaatagttttgaagaatggacttcttgcaagatctggagcggtaaaccaagcagaaaagactataaagttgagtattgaagtaatatataaaacagagaaaaaactttcattccattatttaatcttaaattcaagctatatgaaacagaaaacatttattttaagtaagaaaaaatcttttacggcatctgcaatatcctgttgcatgttttcggtcagaatcagagattcgagcgcattatccgaaatcagaccttttaacctgaaaaatcggcttattctattttgaaattatcacgaactcatgtaatatttaaactttatgagaaatacattaatttttttcctaatttctttattgattattggttgtaaagatgaaactactacaactagtacaattcacgatccttcaaaaccggttcaaattacaggttttgaacctacggaaggaggagctcgcacaagattgtatatccaaggaaataactttggaagtaatacagatgatataaaggtaaaaatcggcggtttaccagccaaggttataggtagtaatggaaatattatatattgtatggttcctttcaaagcctcagaaggaactattgaagtaagcataaaagggcaagaccccattactgcggcagagaaattcaattatgtttccaaaacgattgtcggaaccgtagccggctatgtggatgaaaccggtaaagtaaaggttcaggatggttcatttaaagaggccggcttttccggtccgggatatatgactgttgacccgaaagacccaaacgtactttatgtggtcgatggaaacaggtatggcgggacaagtatcagagtactggatttaaaaaagaaggaagtctcaacattattgaccaaaggacagggtaactgggaaagtattcgtaccatagatttcactttaagcggtgacactatgttgattacaaatcagcaggatactgaaaatgccataggtatttcttatactaccagagcaaacggttttaagaaaccacaacctcttgttatcggaagaaaaatcgtttctgttgcggtacatcccaacggggagttatattatgtaaagagaaagaccggagaacttatccgttttgatatgcaaacaaaagaagaaaaggttttatatgccttaggagatggcgaaccgatgttttttatctttatgcatccgtcgggcaattacgcttatatctcattctcccaatggaagacaatattgaaaataccctatgactggaagaacaagacgcttttaaccgccagtatattatgtggtcaacaaaaacaggaaggatggcttgacggtcaaggaacaaatgccaagttaggtaatccggcacaaggcgtattcataaaaaacgaacaatatataaaagagggcaaagatgatatttacgatttttatttcacagactcttcgatacactgtattcgttatgtaactcccgaaggatttgtacacacatacgccggtcgtggcagtcagggggttaacaataaccctaatggttatgtagatggtgatttaaggcaagaggcgcgctttaattatcctttcggaatacactacgatgaagtaaataagatattttacattggtgatatcgaaaactatagaattagaaatatagcgaaagatgaataaatttttaatattaaaatgttacctcgaatgaaaaacattattattattttcttttgtatgtctatgctgatgtttcaggcaacggcacaaaatcatgcagacgtaaaagaaatagaagtatcaggtattgtactcgattcaaataaagatcctcttataggtgctaatattgtagtaaagaatgtgcctggacttggtgtgataaccaatattgacggaaaattcaagataaaggtggagttatatcaacgtcttatcgtttcatacattggttttgagagtcaggagatacttataaaagataagaaaacactgactgtgataatgcaagagtcaaaatctagtgtattggatgaagttgtaattaccggaacaggagaacagaaaaagataaccgttacaggagctgtttcttctgctaatataacacatctgaatgtttctccttcaggaaatcttgttaatgccttggcaggaaatgttcccggtgtattatccatgcagagcagtggagcaccgggccaaaatacttccgaattctggatccgtggtatttctacttttggtgccaaaacaagtgcccttgtacttgtcgatggttttgaaagagatatggatgatatcagtattgaagatattgaatcgtttcaagtattgaaagatgcttcagaaaccgccatttatggtgcccgtggtgcaaacggtgtggtattgataactaccaaacatggtaaacccagtaagattaccatatctgccaaggcggaaacttcttataataccagaaccataacaccggaatttatagatggacccacttacgcatctttgataaatgaggcaagaatcacaagaaacgaagaaccggtttatcagcctgatgaactgtatatattgaagaacggactcgaccctgatttactacctaacgtagactggatggatgagattttgaagaaaggagccatgacatacaaggcttcactcaacatcaccggtggtagtacaaacacacgttattttgtatctgccagctatgtggaagaagaaggtatgtataaaacggataaagaaattgaaaagcaatataataccaatgccaatgcccgcagatggaactatcgaatgaatgcggatatagacattactaaatctactttattaaatgtcggcatatccggaatgttgaaaaaggtaaatgataccggacgaggttcgtcgcttgtgtggaacagccttatgggacagactccggtgtccattcctaaagtttattcgaacggttatttcccggcatcagaatataacgaaaattatcgtgacaatccttggattgcgtctacacagaccggttacagacaaaactggactaaccagatacagaccaacgtgaccttaaatcagaaactcgatttcataaccgaaggattgaagtttatcggacgttttggctacgacacaaacaactctaattatataaacaagttgaaagcgccggaaagatggaaagcggaacgtttcagagacagtgaaggtaatttggtcttcaagcgactgaatgaagagcaaaagatgacacaaagtgcaggaggtagtggcgaccgtcatgaattctttgaggcagagttgcattataaccgtgttttcaacaaacatcatcatgtaggttctgtattgaagtataatcaggattcaaaaatacgtacttataatctgggtagcgacttgaagaatagtgttcccgttcgtcatcagggattctcaggacgcttcacctataactggaaatatcgttactttgttaatttcaacttcggttatacgggatccgaaaactttgctgtaggtaatcagtttggttttttcccagctttctctatggcatggaatatagcagaagaaccgtttatacagaataatttcaaatggctgaatatgtttaaggtacgttattcctggggtaaagtaggtaatgacaatgtatcggtacgtttcccttatatgtacactatcggaagtttcaagaactatcaatgggccgattttggctttaaccaaagttataacggacttacttatacaagtgtggcatcaaacggtataagctgggaaatagccaagaagcatgatattggtttggacctcgtattgttcaacgaacgtttttctcttaccgtagattatttcaatgaaaaaagaaccggcattttcatgtcaagaggttcattgcctcttactgtgggactttatgatggtgacaagccttatgctaatgtaggaagcgtaattaacagaggttgggacggtaacttttcattcaatcagaacatcggaaacgtgagccttaccatcagagctaatgctacttatagtgataatgaaattcttgaaaaagatgaaggccataagctatatccttatttgtatgaaacaggtttcagtgtaagccagtcaagaggattgattgctctcggattgttcaaggactgggacgacataagaaacagtcctacacagaatacttggggaagcgttgaaccgggagatatcaaatacaaggatgtgaacggtgatggagtgataaacaataatgaccgcgtggctgtaggaaacaccaacagaccgagtttcgtttatggtatgggtatttctgccaattggaaggggcttgacgcaagtgtccatttccaaggaaccggtaaatcttctttcttcatcaacggtgtattggtgcatcctttcagccgcggaacttggggaaatgtatctacggatgttgtcaattcaagccgctggatttcaagagatatttcgggcgacccggcaaccgaaaatccgaatgccgtatatccgagacttaaatttggaggagaaaataatgtgaacaacaaccagtattccacacattggttgagaaacggttcttatcttcgtcttaagacagtagaaataggatacactttacccaaaaatatagtaagcaagatacgttttagtaaaataagactattctttactggaacgaacttgttgactttctctaaattcaaattgtgggatccagaaccaagaagcaacgacggtagcttctatcccattactaaatctgttacatttggtctgaatattagtttataaagaaacacttacgaatatgaaacttataagaaatatattattgattgcaacaggcttgagtatggcttcgtgtaattatcttgatgtgaataccgataccaaggacagaatgtcactggaagaagtctttaccgatgaaacctatacggaacaatggcttgccaatgcatacagttacttgacaaacagcgaatttgccgatattagtatcaccggctcaaatccgtttaatttcagtgatgatatatataatcccatttacaaaagctttaaagaagtgacttatggtgaagagcaatggccgtatacatggaaatacagttatcagggaatacgtcaagccgctatctttatccagaatgtggatatgtgtaatgaactgacctcggaggaacgggcagactataaagctcaggcccgctttgtgcgtgcttattattactggaaattattacagaaatatggtcctgtgcccattgtaccagaagagggccaggattacactgacagttatgaagctctttcaatacctcgcaacacttacgatgagtgtgccgattacattgcttcagaaatggccttagcagcaaaggatcttcctttgaaacgcgaactgatgtctgtgtcacgtcccacaagaggtgctgctttggctgtacgtgctaaagcactattatatgcagccagtccgttaatgaacggtaacaccgatggatatgccgaaaagttggtggatgacaaaggcaaccgacttcttgctgctgcctatgatgaaaagaaatgggcaagggcagctgctgcggcaaaagacgtgattgaccttaaagcctataatttgtatgtagcctataaacgtactgaagggtttgacgggtatccagttacactgccaccatatgacgacggcaatttttcaacaaaatcctggcccaacggatataaagacatagacccgtttgaatcataccgttcagtctttaatggtgaactgtcaacagtagaaaatcccgaattgatatttacacgaggaaacaatcagggcagttatggagtaaactatatggtcttttatcaacttccggtcagtaaagccaaaggaaacaatacaacttgtgtgacgcagaaacaatgtgatgcctattatatgaaagatggtaaagatattccgggcaaagatattgaaataggtcgcggagacggttcttcacaaagagttaccggctttgtcaccgcaagtgatgtgagcaaaggactttataaacctctagaagaaaatgtatcgcttcaatatgccaatcgagaaccccgattctatgcatcggtagcatacaacggagtaacttggtggttgacaaatgcaacacagagcagtgatagaggtccttatagaagctggtattatcggggcgagacggaaggtatgtccaatagcctaaactggcttcaaaccggcataggattgatgaagtacgtacgtccaacagacaccaatgatgacaagaacataaatggtgaattttctcatatctcaaagaaggcggatcctttgataagatatgccgatatcttgttaatgtacgctgaagcattgaatgaacttgatggttcataccagattgagacttgggataactctggtactcatagtatttcacgtaatgaggatgaactgaagaaaggagtacagcctgtaagaatccgtgccggaatacctgattttacgccagaagagtatggtaataaggaactattccgtaagaaaatcaaacgcgaacgtcagattgaacttatggctgaagggcaacgctattttgacttgagacgttggaaagacgctaaagatgaagaatctctgcctatgtacggatgtaatgtttttatgacaaaaggagaacgcgacttgttctataaaccggttcctgtttctgatgttttgacctgttttgccgagaaaacttatttttggcctatcgaccgctccgagttggaaaaaaatgtgagattgactcaaaacccgggttggcagagtgaaaagtaattactattaaaaaaaacgattatgaagaaaaaaaatatctctttgcttttggttacgttacttgtaatgctgagttcttgcagcgaattttattcagatgagcaatatgaacactatgtttcgttcaaagctcctacatctaccgtatctcgtatccgtttgaagtatagaaagggacaaccttctccctatcgtcttcctcttatagtggccggttccacgatgaataataaagacatcgatgtacatgtaggtatagataacgatacactcgacatctataactatgaacattactatgaacgggaagatttgtactacaaacagttacccgagaatttttattctattccgaattatgacatacatattccggccggcgaatgtcaggctctgatggatatcaattttaattttaacgggcttgatttgtcggagaagtgggttttgccccttatcataaaggatgatccttcttataattacacctctcatccacgaaaaaatttcaacaatgctctactatggataactcctttcaatgatttctcgggaaactatggaaccacggctttgaatgtttttcccgaagataccaacaaaccacttgtagttgacactcgtgaagcatacgtggttgacgaaaataccatattcttctatgcgggtgctataaaagaaaaaagaaccgaccgtagaaaattcaaaatttatgcgacatttaatcaggacccggatgacaaaatgaaaggtacggtagagttgaggacagaaaatccaaacattgaatttgaatcgaagaagcaagcaacgtatgagatttctgaaatgatggatgcctcacggcctgccctgatgcgcagaaccgttacgataagagaacttaattatacatttgtagatccatgggaaactcagggatacacggcgcattacagagttgaaggaagcatgaccatgcaacgcaatatcaatacgctgattgatgacgaagaatttgccatagagtggtaaattcccatgtcttaatattattaatgcgaatcagtatttggttcgcattaataatattaagacatgggaatttaccgtttaaaagtaaaatacataaaatcacccttattccttgattgaaaaagtaaaaaacagacttttgaaagcctcacatatttttcttccttataattgaaacaaacacttagacttttataaagcactgctttagactacctaaagctatgctttacgttctctaaagcggtgctttatattccaccaagcggaaggttatataacaataatgaaggggaggtaatagacaggaagaaatagaacgatcgacacagctaccggataaagaaagtgcagtaaaggtatgaatgtagcatttcaaccaaaaaaaacaactgaataccaagcaggtgaaaattatttcgtaattttgcagatgtagaaaaaataaaactatgccgaactatgatttaatcaccatattaggacctaccgcctcaggcaaaactccgtttgccgctgctttggcctatgaattgaatacagaaattatcagtgccgactcccgtcaaatatacaggggaatggatctcggcaccggaaaagatttggccgattatacggtcaatggacataaaatcccgtatcatctgattgatatagccgctcccggatacaaatacaatgtttttgaatatcaacaagattttctggtttcttacgaaacagtcaaacaaaaaggttgtctccccgttttatgtggagggacagggatgtatttggaatcagtcttaaaaggttataaactaatgcccgtaccggaaaatccggagttgcgtacccgtttggcaagttattctcttgaagaactgacggaaattttaagccaatacaaaacgttgcataactctacggacgtagacacagtgaaacgtgccattcgtgcaatagagattgaagaatattatgccgcccacccagtccccgaacgggaatttccgaagctgaacagcctcatcattggcgtagacatcgaacgagaactacgccgcgagaagattacgctacgattaaaacagcggttggatgaaggtatggttgatgaggtacgacaactgatcagagaaggaatttcaccggaagatttaatatattatggtctggaatacaaatacctgacgttatatgtcacaggacaaatgacatacgaagagatgtttaacggattagaaactgcgattcatcaattcgccaaacggcagatgacttggtttcgcggcatggaaagacgaggatttactattcattggataagctcgaaactgccaatggaagaaaagatagcgtttgtgaaagaaaaactgcaggggaattagtatctttggcagtgaaatatagtgagatttttaatattgtaggatagaaatacggatatgagtgtagaaccgaagaaatggggtgtgatttacaacccgaaagctggtacccgaaaggtaaaaaaacgctggaaagagatcaaggaatacatggacagcaaaggcgtcgactatgactatgtgcaatccgaaggtttcggttcagtagaacgtctcgctaagattttagccaacaatggttatcgtacgattgtcgttgtgggtggtgacggtgcgttgaatgacgctatcaacggcattatgctatccgatgcagaggataaagacaatatcgcacttggcatgattccgaacggcatcgggaatgactttgccaaatattggggactcagtactgaatacaagccagctgtcgactgtatcattaatcatcgactcaagaaaatagacgtaggctattgcaacttctacgatggaaaagaacatcaacgccgttacttcctcaacgctgttaatattggactaggcgcacgaatcgtcaagattaccgaccagacaaagcgtttctggggcgtaaaattcctgtcgtatgttgccgccttgttctctctgatattcgaacgtaagttgtacagaatgcacctccgcatcaacgacgaacatatccgtggacgcatcatgacggtatgtgtgggaagtgcctggggctggggacagacaccgagtgccgttccttacaacggctggctggatgtatctgtgatctatcgcccggaattcctgcaaatcatttccggattgtggatgttgatacagggaaggattctgaatcacaaagtcgtgaagtgctatcggacaaagaaagtgaaagtactccgagcacaaagtgcttcagtagatctggacggacggatactgccgaaacactttcctctggaagtaggcgttctcccggaaaagaccacgcttattatcccgaactaagaaaacaaacacgcctcctctaaacaaggagacacctgtattacctatataatgtaacttataatttgtaattaacaatatgatcgaacttaaaaacaatcctgccggtaacttctttctgctggccggcccatgtgttatagaaggtgaagaaatggccatgcgcattgccgaacgagtagtcaaaatcaccgaaacattgcaaattccttacgtatttaaaggttcttaccgcaaagcgaaccgctcacgtctggattcattcatgggtatcggcgatgaaaaagccctcaaaatactgaaaaaggtacatgatactttcggaatccctaccgtaacggacatccatgctgccgacgaagctaacatggcagccgaatacgtagacatacttcaaattccggcattcctcagccgccaaaccgatctgctcgtagccgcagccaaaaccggaaagaccgttaatatcaagaagggacaatttctttctccaatggcaatgcaatttgccgcagacaaagtaatagaagccggcaacaagaatgttatgttgaccgaacgcggaacaactttcggttatcaagaccttgtagtggactaccgaggtattcctgaaatgcaatcattcggatatcctgtcgtgctcgatgtcactcactcactacaacaaccgaaccaaacaagcggagtgaccggcggtatgccgcaacttatagaaactattgccaaagcgggcatagccgtaggggcagacggtatctttatcgaaacacacgaaaatcccgccgtagccaaaagcgacggtgccaatatgctgaagcttgatttattggaaggattgttaacaaaattagtaaggatacgccaagccattaaataactctttttctgcctgtttgtgatttaccatagacaatcacgacagataacacagaaacttttattaaattaaatagaacatgaaacatttattacgtggattatttattgcagtccttatcatatgctgcaatttccagtccgtttttgcacaacccatgcaacaaatgcctgtggacaaaaatgtccgtatcggcaaactggataacggacttacttattacatccgacacaatgcactcccggaaaaacgcgtagaattctacatcgcacaaaaagtaggttctattctggaagaaccacagcaacgtggcttggctcactttctggaacacatggctttcaacgggaccaaacatttccccggcgatgaaaccggacttggaatcattccctggtgtgaaactaaaggtattaaattcggaacaaacctgaatgcctataccagtgtcgaccagaccgtttacaacatcagtaacgtaccgacagaaaaccagaatgtggtagattcctgcctgcttatcctacacgactggtcgagcgctatcaaccttgccgacaaagaaatcgacaaagaacgtggtgtaatccgcgaagaatggagaagtcgcaacagtggtatgctacgcatcatgactgatgcacaggctactatgtatccggattctaaatatgccgactgtatgcctatcggcagtattgacgttatcaacaacttcccttatcaggatatccgtgattactatgctaaatggtaccgtcccgatttgcagggaatcgttatcgtcggtgacatcaacgccgaagaaatggaagccaagttgaaagaggtattcaaagacgtaaaagctccggtaaaccctgccgaacgtatttactatccggtagcagacaatcaggaaccgttgatctatatcggcactgacaaagaagttgccaatccttctatcaacatcttcttcaaacaagatgcaacgccggattctttgaaaaatacgatttcttattatgctacacagtacgtactcaacatggctatcaatatgctgaatagccgtttgaacgaactccgccaaacagccaatcctccttttaccggtgccggtgcaggatatggagagtatttccttgccaagaccaaagaagcattcagccttactgcaaacagcaagattgacggtgtagacttggcgatgaaaactattctggaagaagcagaacgtgcacgtcgtttcggattcacagaaactgaatatgaacgcgcgcgtgctaactatatgcaagctatggagtctgcgtataacgaacgtgaaaaaacaaaaagtggtaactatgtcgatgaatatgtgaacaatttcctcgataaagaaccgattccgggtatcgaattcgaatatatgcttgtacagcagatggctccgaacattcctgtgacggccgtcaacgaattgatgaaacagctggttactgataataaccaagtagtactgctcgcgggtcctcaaaaagaaggtctgaaatatccgacgaaagaggaaattgcagctttattgaagcagatgagttcattcgatttgaaaccatacgaagacaaagtttccaacgaacctcttatctctgaagacattaaaggcggaaagattgtttccgaaaaggccgatgacgtttacggcagcacaaaactagtgctttctaacggtgtaacagtctatgtgaagcctacagatttcaaagctgaccagatcatgatgaaaggtgtaagccttggtggtaccagtgtattcccgaacgatgaaatcatcaatatttctcaattaaacggtgtagctctggtaggcggtatcggtaatttcagcaaagtagacttaagcaaagcccttgctggtaaacgtgcttccgtaggagccggtatcggtaatacaacagaaacaatttcaggtagctgttctccgaaagatttcgagacaatgatgcagttgacttacctgacattcacttctccgcgcaaggataatgaagcattcgaatcatacaagaaccgcctgaaagcacagcttcaaaactcagacgctaacccgatgacggcattcagcgatacagtgacacgtgctctatacggtgaccatccacgcgctatcaagctgaaagaaagcatggtagatcagatcgactatgaccgtatcctcgaaatgtacaaagaccgctataaagatgcaagcgattttactttctatctagtaggaaacgtaaacctagaacagatgaaaccgatgattgcaaaatatctgggtgctctgccttctatcaaccgcaaggaaacattcaaggataataagatgtacattcgcaaaggggaatacaagaatgaatttgcaaagaaacaggaaacgccaatggctaccatcatgttcctatacagcggaacttgcaaatacgacctgcgtagcaatacactactcagcttccttgatcaggcattagatatggtttacaccgctgaaatccgcgaaaaagaaggtggcacgtatggcgtaagctgtaacggaaacctcagcaaatatccgaaggaagaactggtacttcagattgtattccagactgacccagctaagaaagataaactgtctgctatcgttgtggaacaattagaaaaaatggctaaagaaggtccatctgccgaacacatgcagaagatcaaagaatatatgttgaagaaatacaaagacgctcagaaagaaaacggctattggctaaataatctggacgaatatttctacacaggtattgacaatacgaaagactatgaaaagttagtcaacagcattacagccaaagaagtacaagacttccttgccaagctgctgaaacagaacaacgaaattcaagtcgttatgactatgccggaagaaaacaaataaaaattcttttgtatagatgatgatactcaacgaactacgtaaacacggaagacttgccgccagaagacacccgatgtatgaaaagaacaaagttgctaaaatactcggttatgtcatggctgcattttgggccggttacctgatatttttcggtacgacattcgcgttcggtttctcaaatatggttcccaaccgagaaccatatcatgtaatgaacgccgttgttctgatctttattctggcactggatttcctgttgcgtgttccgttacaaaaaacaccgacacaggaggtaaaaccttacctcctgttgccggttaaacgaaatcgtgtcatcgactttttacttatccgctccggacttagcctattcaacctattctggttgtttatgtttgtccctttttctttcattactattactaaatattttggaattctcggtgttatcacctatcttattggtatcttactgctgattcttgctaacaattactggtacttgctgtgccgtacactcatcaacgaacgtatttggtgggttctattgcccattgttttttatggtggaatagcctgcctcctttttattcccgaggacagtcctcttttctatttctttatggacttgggagacgggtatatccaaggaaatattctctactttctcggcactatacttgtgatagtcactttgtggctggttaaccgcaagcttatgtcgggacttatctacgcagaattggccaaagtagatgatacacaaatcaaacacgtctcggaatatagattcttcgaacgctacggagaagtcggtgaatatatgagactagaactgaaaatgcttttacgtaaccgccgttgcaaaagttcgctgcgcagtgtcgctatcgtggtggtagctttttcctgtgcactcagtttctcaagtgtctacgatggacgcctgatgacttctttcatctgcgtatacaactttgctgtattcggaatgattatcctgtcacagattatgtcgttcgagggcaattatatcgacggattgatgtcacgcaaagaatctattatgagcctgttgaaagctaaatattatatatatagtattggcgaaatcattcctttcctactcatggttcccgctatcattatgaataaactgacattgctgggagcttttgcctggttcttttatacgatcggcttcatctatttctgcttcttccaactggctgtttacaataaacaaactgtgccgctaaacgaaaaagtaacgagccgccaaaccaatagtgcaatacaaatgttagtaaacttcggagcattcggtgtgccgcttatcctatatagcctgttaaactcacttttaggagaaacaattacttacacgatcctactgatcatcggtttaggattcaccctgacttctccgctatggataaagaatgtatatcatcgtttcatgaaacggcgatatgacaatatggaaggtttcagagacagccgccaatagacatacatgggtcattaattatataaacaacctgttggcggaattaatttagtgcatact

SEQ ID NO: 3010 - DNA, 4760 bp, Unknown
  gut microbiota DNA sequence
ccaatgggcttgtcgttaatgaagtttacgtattgcagaatggtaagtgcactaattttgccaatgattctggcaaacaaaccattcgttattttcgcgtagttcctgatgaccaagaactggtctgtaagttgtgagaatattgtctcaatcctctttcttgcctttgcaaacggaatgaatgtcggtttccaatccttttggttgagccgatacggacactccagtcttatgtgtgcggtttcgaacaagtcaagctgtacgtcagctccaatataccctttgtcaccatagatgctacagtcgtgataagtatgttttacatccttcatataatggaggtcagccacacttgcctttgacagatcataggaatggataactccacttaacccacagagagcgtgtaacttataaccaaaataatacgtgttctgcgaagcacagaagccgaagtcgggagcttgcgagaaattgccggcacgccccatcttgcaacgttttcctcttgcaaccctacagacctctatcggcttggagtcaacaaagaattgttcctctccgccatccatttccatggcaatccgcttgcgcagttcctcacacaggcctgacgttttcttcctgcggtcattgaactgtctccttgatatgagattgggaatgctgtccttgtattcttgcaatttatagtcgaacaaccacttctcactatcaatgctctcggtctctgccgtcagggatagcgccaccacttccaaatccgaaaacttgggaacaggaccacgacgtggaacattacccgaatcattgacgagattttcagagaattgcttgcatatctcaagtattttgacgaattttgcataaaggttgtacatacgatggtttgaacttaatgttttaatcaccactaagttactaaaaatcagcgacatgtacaactttttactcatatttatcaacttaaattaattccgccaacgggtataaacattgaaaatcatgattaccattgacaagctcaaaaagaatttcggtgaaaagattgccgtagatatagaacactacgaaatcaatcaaggcgatatgctcggattggtgggaaacaacggtgcggggaagacgactctcttccggttaatgctggatctgctgaaagcggacaatgggaaagtagttataaatgatattgatgtaagcctaaacgaggactggaaagccttcaccggtgcttttatcgacagtggttttttgattgattatctgaccccggaagaatatttctacttcatcggaaaaatgtatggattaaagaaagaggaggtagatgaacgcctcgttcctttcgaacgcttcatgaacggggaagtaatgggacaaaaaaaattaatccgtaactattctgccggaaataaacaaaagatcggtataatctccgccatgcttcattatccacaattattaatattggacgaaccgttcaatttcctcgacccgagttcgcaatccattatcaagcatctgctcaaaagatataatgaagaacatcaggctacggttatcatttccagccataacctgaaccatactgtagatgtgtgtccgcgaattgctctgctggaatacggaattatcattcgggatataattaatgaagataattctgcagaaaaagagctggaagcgtacttcaatgtagaagaataaatatcatcaacaaaaaaggaaaggcagccgatgaagattaactttaaactctttttcatattggtagggctaaccgtcattttcagctcctgccgcacatctgccccccgtctggattatcaggcactggcgcgagcttctgtcttattgggtatagacatcaacttggaagacgaccataaactctacctagaagctgccgactggataggagccccttatcgtggcggtggagattcgaaaagagggaccgactgttcaggcatggtttatcaaatctatcggaaagtatatcgtatccaagtgccacgaaacacagaagaactgaagaataagagcaacaaagtagctaaacgaaacctcaaagaaggtgacttggtattctttagcagtaatcgttctagaaagagagtagctcatgtaggcatttatctgaaaagtgggaaattcattcattccagcacaagtcgcggggtaatcgtcagtaggctaaacgaagactattatctcaggcattggatcagcggtggtagaatacgttaacaatcaaatcattcactcttattgaaataaatttatgaaatcatttatcggagcagtactatttatctgtgtagcgtttagcgcaaacgcccaacttttatggaaagtatccggcaacggactaaatcagccctcttacattataggtacacatcacttggcaccattcagcattatggacagcattgccggacttcaaaaagcaatgaaagaaacccaacaagtatatggagagctgaaaatgtcggaaatgcagtcaccggtcaccatgcagaaaatgcaacaggttatgatgatcgccaacgacagtacgctgtccaccctcctctcccctgaagactttgcaacggctaacaaattctgcaaagaaaacctgatgctagatttaagcgcagcccccaaactgaaacctgcattcctgctgaacaacgtagtagtggcagcatacgtaaaacatataggcaaatttaatcctcaagaacagctagataccttcttccaatcacaagctacccaaaacgggaaaaaagtagacggactagaaactgcggaatttcaattcaatttattattcaatggttattcgctgcaacggcaagcacaactgctaatgtgtacgatcaacaacatcaatacagaagtggaaagcctgaaaaaactcactaacgcctatatgagacaggacttaaaccaaatgcttcgtatcagcgaagagcgtaaaggcaatcaatgtgacccgactcccggtgaagaagacgcaatgatttataatcgcaacaaggcatggtctgaaaaacttccggctattatgaaaacagctcctacttttattgcagttggtgccctgcaccttcccggtgacaaaggattgctaaacttattaaaaaaacaaggatacacggtagaacctgtaaaataagaaaagattttagtacttttgcggaaaagttctccccaatgaattataaaacctatttattcgatttcgactatacactagccgattcgtcacgtggtatcgttaagtgtttccgaattgtgctcacccgccaccagtatttaaccgttaccgatgaagcaatcaaacgtactatcggcaaaacattggaagaatctttcagtattcttaccggaatcaccgacccaatacaactcgaagctttccgacaggaatacagattggaagccgatgtacacatgaatgtgaacacccagcttttccccgacacgttatctacactgaaagagctgaagaaacggagtgcccgtatcggaattatctctactaaataccgatttaggatactaagtttcctcgaagagtaccaaccggaagattttcttgatatagtggtaggtggagaagatgtcaaagctgcaaaaccttcaccggaaggagtcaaatttgccttggaacatttgagaagtaccccgaaagaaactttgtatatcggagacagcattgtagatgcggaaactgctcggaatgcaagagtcgattttgcaggcgtactcaacggaatgactaccgctgacgaacttcgcgcttatccgcaccgaataattgtgaaaaatcttagcgatttactttaaagtcccccttaatagttgacaacgaagtttgtgcatactattctataaatgagcaaagtaatagcaacacaactaaaaaaacaaaagaaatatttgttgaaaacaaataaaaacagtacttttgtgcccgattattccgcaacgggtttgataaagagttctctaagtgattaaagaccacccgccggagctaacttatacatttattatataagatgtacgcaattgtagaaattaacggtcagcaattcaaagcagaagctggtcagaagttgttcgttcaccacatcgaaggtgcagaaaacggttcaacagtagaatttgaaaaggttcttttggtagacaaagacggaaacgtaactgtaggtgctcctatcgtagaaggtgctaaagttatttgccaggttgtttcaaacttggttaaaggtgacaaagttcttgttttccacaagaaaagaagaaaaggtcacagaaaactgaacggtcaccgtcaacagttcactgaattaacaatcacagaagtagtagcttaatcaattaaaaacagtaaaaagaaatggcacataaaaaaggtgtcggtagttctaagaacggccgcgaatcagcaagtaaaagattaggcgttaagatatttggtggcgaagcttgcaaagcaggtaacatcatcgttcgtcaaagaggtactgaattccacccgggtgacaacatcggtatgggtaaagaccacactcttttcgctttagtagacggtacagtaaacttcaaagtaggtaaagaagacagaagatatgtttctgtaattcctgcaactgaagcataattgcacaactgagaatatttaaaagaaggaggtgtgtcaaaatgcgcaccttcttttttttaagcacaaagccccgactttcacaagctggggc

SEQ ID NO: 3011 - DNA, 14899 bp, Unknown
  gut microbiota DNA sequence
gtcaaagaacacttgatgcttactttttacacaacctccccgaaggaggggaatggagataccaccgactggttaaattaccaccaaatttgaagaagaatcttaaggcaaaaaataactttcatgactctcattctttttgctaatatgctggtatcctgataaataagtatgatatatcattccgaactccggtatctatcatactttcttcatgaaaaatgagcatctgtcattcctgttttactgcttttattgtttaatctttcccagtatttgcccgcacataaattatatggctaccgcttccaatggtgtcgagtaccccttctttcacccaaccgttcaactcattcagcgctttgttcttcaggagtcccgtcagttgcgtatattccttgcgtcgtatcatcggacgttcatccagaaatctctccaacctgcgacgacgttcttccaccggaatttcggcagaatgtgcaaatcccgacttcgctttttctacaaatccgcgaaccttctttcggaaagaagatgaaggacgaaaatttacattgtcgaaatagatggactgcgcatgtatctctttggcatccattaccggacgtgctttcaacttggctgaaaaatatccgaggtcgcccaattgaacgtgataaccactgattaaatattcagatattttattttcaatagccagctgaactccttcgatgtctgccggggtaaaactggaagcctgggcgatctcttttacaatgcgttgaaagtcgatagtcccgttcgatacgatgcggggatacaacggctgtttatcttcatcttcttttgaagacggctttttgcgaaaatcatactttgcgtacatctcttttcttttattggttaatgtgggtgaaatgccttttcaaaggcgctctaatgcttgttttgcagtaagataacctacctctgctgcctgaataatcagcttggagcagctgcttttttcgggcacacatttgtgggctgtacagcccgcgaatgtaaactgcacagcccgcatacatgggctgtacggcacacgtatgcgggctgaagtcttactgcctgcaaagatacattatcctggctttatttgcaaatttagtaagtattatttctgtaaaataaagccgtatgatgcggcaaataaagatacggaaatttgtttggacgaagtgcttgttgtatctttgtatagttatagtgcagctttcccttttactagaatgaataataaaaaaagatgaaaataacattagtcagagacgatggcaaggtaaataccttacggacgttgaaaatagagctccttctggagcagatgaaaacggaagtaaaggcgcaacctgtctccaaaatgagggaagctttgagatatactcttccgggaaattcgattgaaggggtgcgtaaggttcccaaagtgattcctgccgcagtttttgtccgtaaagaaggagtgatgactttgaacgaatataacggcatagtgatgatggaagtcaatcatctttcgggaaggacggaagccgacgagataaaggaattagtcaaagagtttccgcaaacgttcctcgctttcacaggctcctccggtaaatcagtcaaaatatgggtacggttcacttatccggacgatcgcttgccggtctcacgcgagcaggtagagctttttcatgcgcatgcttatcagacggccgtgaaatattatcagccgcaactgccttttgatattgaactgaaagaaccgttgctcgaacaatattgtcggttgacgtacgatcccgaactttatttcaatccggaagcgatgcccatttacatgaagcagcccgtcagccttccctccgaaacggctttcatcaggcgaacgcgggaaaccgattctcctttgcaacgaatggcgcccggatatgagaactatgaagcgttgtcggtgcttttctccgctgcattcaacagggcgcttgaggaactggacggatatcgggagggagacgatatacaaccgttgctggtgtgtctggcggagcattgcttccgggcgggtattcccgaagaagatactgtgcggtggacgaaggcgcattacaggctcccttcggacgagttgctgattcgcgaaacggtgaaaagtgtataccggactgccaaaggattcggaaagaagagcagtttgacggccgaacagcttttcgccatgcagatggatgaatttatgaagcgtcgttatgaattccgatacaatgcgttgaccacggaggtggaatatcgcgaacggcatagtttcaacttctattttcgcccggtagacaagcgggtattggcgagtattacgatgaacgccatgtgtgaaggagtgaaaatgtgggacagggatgtcatccgttatctggattccgaccatgtgcctatctatcatcctgtggaggatttcttgtaccacttgcctcgctgggatggtaaagaccggattctggaactggctaaccgcgttccctgtgataatccgcactgggcaccgttgttccggcgatggttcctgagcatgactgcccattggatggggatggataaaagacatgcgaacagtacttcgcctttgctgattggcccgcaggcataccggaagtccactttttgcagaatgcttcttcctcctgctttacaggcgtactatacggacagcattgatttcagtcggaagcgggatgcggagttgtatctgaatcgctttttgcttattaatatggatgaattcgaccagataagtcccacccagcaggcttttctgaagcatattctgcaaaaaccggtggtgaacacgcgccgtccgaatgcttcggcggtggaagaacttcgccggtatgcttcgttcatcgctacaagcaatcatcgggatttgttgacggatacttccggtagccgtcgtttcatcggcatttatatgacgggaggcatagatgtgtcgcgtcccattgattatgaacaattgtatgcacaggcgttggaactgctttatcataacgaacgttattggtttgactccgaagaagaggctatcatgacggaaagcaatcgtgagtttgaacaatcacccgctattgaacagctgtttatggtttattatcgtggggcagaagaagaggaggaaggtgaatggctgttggctatcgacatcctgcgacggattcagaaagcaagtaagatgacattctctaccagacaggcttcttatttcggacgtatcttgcaacggcttggggtgaaatccagacggaaaacgtatggtacgtattatcatgtcgtacctttggaggtaaaatagatacttcattttaatagtataagtatgatagataccggagataatagttatctatcatacttatatctttagttataagggatttatgaaaaagaatgaaagtatgatacttgtttttttattcataaagaagatatttgtttctcatcttcttgtaatcctgtaactccttttgccaactattccggatagtctcttccgaatcacctctgaggatagctttgcgtacactatccgtgcccatgagcaagtcaaaccaccgggcacgggagaagaaagcggtaccttcgccggataaacggtagaaatgcaggaaatagcggagtgtaaatccgttcacatcgtctgcgttccggaggtcttcgccgtagcagactacatttttgtgcatcggattcttgtcaaaaccggggagagagcggggagtgaaagtaaaatctccgtatttcttgttgggtgcgcccaatacttggaaaggaaatgtcgttccccgccctacgctgacgcgggtagcctcaaacgggcagagtgacgcatacaggcgaatggactgatcgtccggcaggttgggagagggctttatgggaagcgaataggggtctccgtgtatccaacccgtggctggaattacttttaatgaacaaggatttttcttgtgggcaatccagccttctccgttaatcattcgtgccagttcgccgatagtgcatccgtggagtaccgggataggaagcataccgacaaaactccggtaggccggtttgagtatcggaccctctacgtagtcgcacggattgggccggtctagtacaatcatttccttattgttttctgcacaggcttccattacgtagtacattgtgctgatataggtatagaaacgtgctcccacatcctgaatatcgaataaaataacgtcgatatctttcagttgggcggcagtcggctttttgttgtttccataaagagagacgatactgactccggtacgggagtctttgccgtctttcacagtctcccccgcgtctgcatttccacggaaaccatgttcgggggcaaataccttgactacgttgatatgctgtttcaacagagtgtcgagcaaatgagtctgccccgttcctacaacagaggtatgattgaccaccattccgacacgtttgccttgaatgaacggcagatattgttcgaagcgtccggcgcctgcgacaactttgccgctaatgcattcaggaaagactgtaacaaacagaaaaaaaagaatgagggaagttctatttctcatgtcggtgattttttgtaatattgcacaaaaatattaatttctcatcaagagaacaaaaaatagagcacatgaatccatacgaaatcattgataagtattatccggaaaatacggagcagcggcaaatcttagtaatacacagtctttctgtggccggaaaggccatgaaaatactggatgcgcatcccgaactacgtttgaaccggagtttcgtgaaagaagccgccctattacatgatatcggtatttttcagaccaatgcgcctacgattcagtgtttcggttcgcatccttatatagctcacggctatttgggagctgaaatcttgcgtgaagaaggtttcccacagcatgcactggtttgcgaacgccatacaggggccggactatccttgcaggacattgtcgaccagcagcttcctgtaccccatcgcgagatgttgcccataactctggaagaacagttaatctgctttgccgataaattcttttctaagactcacctggacgaggaaaagtcggtagagaaagcccgtcatagtattgctaaatatggtgaagaaggcctaagccgttttgacagatggtgttctctctttttatagcactaaaaaataattaaataacgaagattctaactcataattggtgaagtttatgtacttttgccacttcaagcgtaaactattagttaatggcgccattgaaagcaaaaatacttatatcatctatactgctgattgtcttactgatgcttcccgatgaggctacgtctcaacgtcgaagaagaggaatgattgcccccaatactgcacagaatgattccctccacggaaatgattcattgaaagcagatacggttacggtacgcatggactctatcgcaccggctaagaagaaacaaccgctcgacgcaccggttatttatgaatctaacgactccacagtttttactttgggcggagccgctacgttgtatggtagcggaaaagttaattaccagaatatagagttggcagcggaagttatttcaatgaatctggatagcagtacggtgcacgcctacggtatcaaagactctttgggagtggaaaaaggtaaacctgtatttaaagagggagataccgcttatgatacggaaactatccggtataacttcaaaactaaaaaagcgggaatcaccgaaatcgtaactcaacagggggaaggatacgtgaccggaagcaaagccaagaagggggccaatgatgaaatttttatggagcatgggcgctatacgacttgtgaccaccatgaccatcctcacttctatatgcagttgacaagggccaaggtgcgtcctaaaaagaatgtagtgacgggacctgcctatctggtggtggaagatgtacctttgccgttggctgttccgttctttttcttcccgttctccagcagctattcttccggtttcatcatgccgacttatatggacgactccagtcgtggtttcggtctggcagaaggcggatattattttgctatcagtgacatcatggacctgaaaatgacgggagatatctttaccaaaggttcgtggagactttccggattgaccaactataataaacgatataaatactccggtacgctgcaagcggattatcaggtcactaagacgggggacaaagggatgccggattatgcagttgccaaggactttaagattgtctggaatcatcgccaggatgccaaggcgagtccgaacagtactttctctgccagtgtaaacttctcgaccagtagctacgaacgctcaaatatcaacaacctttataattcacagttgttgactcagaataccaaaacatcaagtatcagttattcacgcagtttccctgatatcggtctgacgctttccggaacgaccaatatcgcacagaccatgcgtgactcttccattgcggtgacgttgcccgacttgaatatatcgttgagccgtctcttcccgttcaaacgcaagaaagcggccggggaagaacgctggtatgaaaagatttctcttagctatacaggacgtctgacaaacagtatccgtacgaaagacgaccgtctgttcaaagccggactgagcgaatgggaaaatgcgatgaatcataatatccctatcagcgctacttttactctgttcaaatatttgcaggttaatccttcggtgaattatacggaacgttggtatacccgtaaggtaaatcagcaatataatgaggaaacgcgtagactggaggcattgccgggcgatacgattaacggtttctaccgggtatccaactattcggcaagtttgagtctgagcaccaaattgtatggtatgtacaaacctcttttcatgaagaaaaaggaaatacagattcgtcatgtgtttacgccacaagttagcctgagcggtgctccgggatttagcaagtattgggaggagtatactgattataacggtgatacacaatattattctccttttaccggacagccttatggcgttccttcccgtgaaggttcgggaacagtcagtttctcgattgccaataacttggaaatgaagtattacgacgcaaaagaagatacggtcaagaaagtgagccttattgatgacttgagtgcaaatatgtcttataatatggcggcaaaggaacggccgtggagtgatttgagcataaatcttcgtttgaagttgaccaagagttatacctttaatatgaatgcgtcatttgctacgtatgcttatacttttgataaaagcggtaatgtagttaccggtaaccggacggagtggtcgtatggtcgcttcggacgtttccagggatatggttcttcatttaactatactttcaataatgatacttggaagaagtggttcggaccgaaagaggatgaagataaggataagaagaagccggaaggtgatgatgaagattcggaaggctcggaggaagacggaactgtcactaagaaggtcgagaatgcgcaagcggactcggacggttatcaggtattcaaaatgccttggtctttgagttttagttattcgttcaatatccgtgaagatagaacgaagcctattaaccgccactctatgagatatccttatacgtatacacataatatcaacgcgaacggaaacgtgaaaatatccaataactggtcgctttcattcaactccggttacgacttccaggcaaaggagatcacacaaacttcttgtacgatttcccgcgatttgcactgtttcaacttgtccgccagtctttcacctttcggacggtggagatattataatgttactatccgggcaaatgcaagcattcttcaggatttgaagtatgaacagagaagccagacgcaaagtaatatccagtggtactaggataagcgtagagttgaaagatatataattgcattgttgcaatattatggaaaaagaaaatggctgtgctattcattgggtaatagcgcagccattttctttttcaactctcaacctgtattcaactaccagttgatttccgtttctccatgtgcttttaaataatcatttgtccggctgaaatgcttgttgccgaagaaaccgttataggcggataggggagaagggtgtgcagaggtaagcactaaatgcttgttccggtcaatgaaagctcccttcttttgagcgtacgagccccataagataaacaccaggtgctccttgctttctgccagggcacgaatagcggcgtcggtaaatgtctcccaacctcggttttgatgagaaccggcttggtgtgcacgtacagtcagtgttgcgttgagcagcagtacaccttgttcggcccagcgggttaagtttcctgtggtaggagcatctgttcctatatctgctttgatctctttgaatatattcaccagtgagggcgggaattgtactccgtcgttaacggagaaacaaagtccgtgtgcctgacccggtccgtgatacggatcctgtccgatgattactacttttaccttatcgaaaggacaaaggttgaaagcattgaatatcaaccttccgggaggaaatatctgatattggctatattcgctttttacaaattctgtaagtgtgcggaagtagtccttgtcaaattccggttgcaaatgtgttttccaactttcttctatttgtacgttcatagcaattatataaggtgtatatcaagttcttcgcattctttgcgcatatcttcgggccagatgctggcctgtatttctccgatatgtgctttccgaaggtagaacatacacaaacgtgactgtccgatacctccaccgatagataacgggagagtgtcattcatcaggcgcttgtggaaatagagttccagtcttttttcttcgtgctcctctttcaactgacgttgcaaggcctctttgtctacacgtatacccatagacgaaagttcgatagaacgttgcagtacatcgtcccaaagcaacaggtcgccgtttagtccgggcaggccgttcaagccgtttgttgtgtagtcgtcgtagtccggagcacggccgtcatgtttcttgccgtcgctcagtttgcagcctatgccgataatgaatacggcaccgtatttctggcagatagcgtgctcacgacatttaggttccaggttcggatagagttggcgtaactcctcagagtggatgaaatgtaacttttgaggcaggcacggcttgatttgaggatacatttcgtataccatatattctgtgcgaatcatggctgcataaatgcggttaacgatttctttcaggaagtttacgtttctgtcttcgtcggtaataacacgctcccagtcccattggtctacataaagtgaatgtagattacccagttcctcgtcggagcggattgcgttcatgtcggtatagataccgtatcccggttcaatgtgataatcggctaaggtcagtcttttccatttagccagtgaatgaactacttctgcttgtgcgtcgcccaaatcttttatcgggaaagaaacaggtcgttctattccattcaaatcatcgttgatacccatgcctttcaacacaaacaggggggctgtcacacgtcgcaggcgtagttcggatgataagtttaattggaagaactcttttatttgcttgattcccagctcggtctgtttcaggtcgagaagcggtttgtagttcttaggttttatcaagtaactcataggtttgttaaatgttaattgtcggcaaagataggaataaaaatgatatatgtattgagatttctctaaaagattgtcaaattgataaagtatgtgctataaagcatttcaaaataacagagtgttaacaggtgtgggtaccttaataactataaaaaaagaagaatcattaggaagatgagaagattttttatacttttgtcctcgcgtaaaaagaatggccccgtagcttagtgaatagagcgtcagattccggttctgaaggtcgtgcgtttgaatcgcaccggggtcacatggatatcccttgataatcagtagattattgagggatttttgcatttagtggtgttgttttaagcgctgatagtgttacatattgcataaaaaataagaattagttattaaaataaggtaaagcggcaagttatttcgataattgtatgttctgtagtgaagaaatagtggaatgtgaattatagagagtggttattgtaaaattcggataaaacgttttattcggatcattcaatatctatgagtttacgtttggttatattgattttgagaaataattttgtatggcaacagtaaaagtaaaattccgtgcatcttccgtcgctacgaaagaaggtacacttttctatcaagtgattcataagcgtatagtaagacaaatacataccggatacaagttgtttcctgcggaatgggacgcggtacattcggaggttgttctgtcttcggtaaccagtgaaagtcggagagattacttgctttctttgaaaaattctctgttggaggatagtgtaaggctgaagaatattattacccgtcttgagcgttcaggcattgcttatacttcagatagtttggtggaactttattgtgcatccacagagcatagtggtttcatatcctttactcttcatcttatcaaggagttaaatcaaattggcaaacaccgtaccgctgaaacttatatgactacattaaacagcttcgtacgtttccggaaagggaaagatgtcttgctggaagaagttgattccagtttgatgatgaaatatgagagttatttgaagtctaccggtatttgtccgaataccacctcttattatatgcggaatcttcgggctatttataatcgtgctgtggagaagggcttgacggttcagcgaagtccttttaaatatgtttatacagggatagacaagacggtcaaacgtgctattccgttagaggagattcgccgtttaaaggaacttgatctgacaaagagtccttctctggcttatgcgagagatattttcatgttttcattttatacccgtggtatgtcattcattgatatggcttttttgagaaagaaagatttgcagaacggaattctgtcttatcgccggcagaagacggggcaacaattatttatcaaatgggagaagccaatgcaagaaataattgacaggtatgatactcaggggagcccttacctgctacctattatacgagatatggaggtagacggaaggaaacagtacaagaaaactgcccatttggtgaatcaaaaactgaaaaaacttgggatgcggttggggttatctatacctttaactacgtatgttgcccgccatgcctgggctagcattgccaagagtaaaaatatttccttgtctgttatcagtgaagctatgggacacgactcggagaacactacccgcatttatctcgcctcattggatacttctttggtagataaggcaaatagtcttattcttaaatcattgtagagataagataatctaccatatagccatgaaactgtaaatcggaaatatgtatcaaaggatatgtatgatttgctgttactttttttgcacattaaaactttcctaaagtaaggatataacaaagtaaaacaggatccggatacgatttaatagtcattatacatcattcttaattctataatgatatcgtgctggttattaaagagaaactacaagaagggataatattgatataaactaaatttgtttagcaaaatatagttctctctataagataaataacagggtgtaagttttaatttaacaacttagatatcaagtaattacaatcattatataattaatgataattaaacatttgttaagtaaatccttctctagaagaagcaattacccaaaattacatctgttttatgctgttatttccaataaattacgtacctttgtgcccgttagtatttctcttatagagagaaataagaagtaaggttgtaaatagaccttgaatgcatcttgtatggtgaagatgaaacagtctgataataacggggaggaatctcttatttttgtagaatttagttgtaactgcttgatatatagttctatatatgatcgggcaggactaggataattgtcttgaggttttatggcgcttctgaagaatgaacaacggatgcattggtatgtaatgcgtgacctcaaacgtcccaatgctaaattgcctgcttataagcagctcagtgatgaacatctagaagtatttactcctatgcaatggcggttaaagttgaaaaatggcaaacgaattcgtgaagaagtaccgtttatgcaggacctgctttttatccacgatacaagagaagttctagatctgtttgttcgtaaaataccgacccttcaatatcgttaccagaaaggtggcggttattgtcagcctatgatggttgccgatttggatatggagcgttttatacgtgctgtccgaggttcggaaaatcctaaatattatttacctgaagagataagcgatacaatgtatggtcgtatgatccgtattattggaggtccttttgaaggttatgaaggccgtctgcttactacccgtggctctaaagtcaaacgtcttcttgtcgaactgcctaatttcttttcggtgggtgtagaagtaaatcctgatttgatagaaataatataattatgtacgattatatactattattctagttgtttataatcagcgttgtaagaatatatgataattaattgggggatttaaattatgaaacacgcatttgaccgttttattcactatttacagaaaaactactttagctattgggttgtattgggaatcgatacattcatagctttactgtgtacttgggtgtcatttattggcattcattatattacggaaacttccaaagaaatagtttcacttttccatatcttggcggtttcagttatatcgagtgttttgggggctactctatttcatacttatcgtaatacgattcgtttttctcagttgaaggaattatggaggttggcgggaagtgtgctcataaaggctgtctgcatagccattgtcatttggtttcttctgccacagacgggattacataacagtcagaaaataatttttgtactgtttgacgctatgcttacttttattgttatggtcgggtttcgtatgcagttgattattgtttatgaattcttactgaatgtactgaataaaaagaatatgcgtattctgatttatggtattgatgataagagtgtggcattgaaagtccggttactgaacagttctcattataaagttgtaggtttttgcatttatggaacaggtaattctattcggcgtgtggctgatcttcctgtttattcttttaaagatgaagattgcttcaataaactgattcataagaaatgtatcggaggtatcttgtttgcccgctatgagaatacccgtgaagaggaaggacgtttgcttcagtattgtaaaagaaacgggttgaaaacattgatagctccgagtattagtgaggctgacgaaaacggaagtttccaccagtgggtacgtcctatcaagattgaggatttgctgggtcgctcagaaattcatattaatatggaggaggtgatgactgagttttgtggcaaggttgtgttggtgacaggagcagccggtagtattggtagcgagctttgccggcaattggctcagatgaatatcaagaaactgatcatgtttgactctgccgagtcacctctgcataatgtccgtctggaatttgagaagaattatcccggtcttgattttgttcctgtcattggagatgtccgcgtgaaagagcgtcttcgtatggtgttcgatatctatcaccctcaggtaatcttccatgctgctgcttataagcatgttccgttaatggaggaaaatccctgtgaagctgtgctggtcaatgtggtcggttcgcgtcaggttgctgatatggctgtggaatacggagctgagaaaatgatcatggtttctaccgataaggcggtgaatccgaccaatgtaatgggatgctcgaaacgtttggcagaaatctatgtacagagtctgggatgtgctattcgtgagggaaaagtgaaaggtcataccaaatttatcactacccgctttggaaatgtcttgggtagtaacggctctgtaattccccgttttaaggaacaaatcgagaatggtggtcctgtcacagtgactcatcccgatatcatccgtttctttatgactattcccgaagcttgtcggctggtaatggaggccgctactatgggtgagggtaatgagatttttgtctttgagatgggcaaggctgtgaagattgttgatttggctacccgtatgatcgaacttgccggttatcgtccgggtgaagatattgaaataaagtttacgggattacgtccgggtgagaaactttatgaggaagtcctgagtgataaggagaatacgattcctactgaaaataagaaaattatgatagctaaggtacgtcattatgaatatgctgatattcttgacacttatgcggagtttgagaagttgtcgcgtacagtaaagatcatggatacggtgaggttgatgaagaaagtggtaccggagtttaaatcgaagaactcaccgcggtttgaggttctggataaataattagaatagtctataactcttcactatacagagaac

SEQ ID NO: 3012 - DNA, 28388 bp, Unknown
  gut microbiota DNA sequence
aagtatgcactaaattaattccgccaacaggtttaaaaattaacattgcaaacgtattctatttcttttataaatgactcaggaatcgtataattcgagtcaaatcttgtctaaataggatgcttttgatgattttttttagaaaaggcctctcttttttaatggatagttgctgaaaaaatgaggtgcagatttttagtgatgagaaaaaaatgtatttttgcagaaaatgaatttataatgtaccgtaccttaatcataatattatttctgctggcaggggtaaaactgctttcttctgaacactgcgttaattactcattcacccaactctccatagagcaaggactttctcaatccactgcccaatctatcttattggaccataaaggtactttatggataggtaccaaaagcggattgaatagctatactcaggaagggataaagacttaccttcatcactcgggagatcctcattctcttccgagtaactatattaatcatttgacagaggattctttagggaatttctggatagcgacttcaaagggactagctctgtatgatgatgaacaagaccagtttaacactgttaatttctccattatttattcatctgtgggggttgaaggtggtatgtggtttggtagcgagaatgccattcattgttatgattacaaaagcaaagaactaaaaacgattcatatcgaaaaagaagaaggcaaaggcattaatccggtggattataggattcagaaaatgctttatttggaagatggcaagattctgataggtacccggaagaaaggaatctatttatatgactgtcgcatccggcaattcacccttttgattccaagcagtcagaatctgttgacatcgttatacgtaacagcagaccatcacatttataccgctttttatggagatggattttactgttatgaccggacaggaaaaatgctgaagcattacacaaaagaaaattccgggttgaaaaacaattatgtgttggatatggcggaatataatggtaatatatggctggcaacagacgggagcggaatcaatttatttactccccgaacctttcagttttcgcaattacaacacatagtgggggactattcttccttaccggtcaattccataaccttgttgtacaaggacatgaaagataatttatgggctggaagtgtgcgtggagggatattcagtattaaagaaacgtatataaagacttataaagaagctatcttgaacaataccaacggccttagcgagcaatctgtgattagcctttatgaagaaaaggacggcaaggtatggattggaacggatggcggaggaattaatctgtatgatccgtctactgacaagtttatccatttcccctctacttatggtgataaagttgtttctattgccgaagtgtctgagactgagttaatggtgtctttatataccaaaggaattttcctgttcaataagaaaacacataaataccgtccttttactatcgttgacgaagaaactaataagaaagaatgtttttacggttatcttcctctggctaatcaggtggcggacggtaagatatacataatcagttgcggcacttatgtataccacactcatgaccatacattttcgaggatgcaaactgaccgtgattatgatttttccaatgatgcactttgcctgtcatactccaatgataggttttctctgttaaagtgtgctcatcaggccttttgggtcgatcagaaaagtgatagtatccggctgttgtttgagttggagaaagatgaacttattacttccatgtcttacgataacaatcgtatgatatggaccagcactaacaaaggacttggattttttgatctggaaagtcaaaagtatcaccgtatccgtaccagacttttcaatggtatttcttaccttattgctgacggaaaaggacgtttatggatttgtgcccaaaatcatttatattcttatatcattaaagagaatagatttattctttggaacagttcggatggtttcccgcctaacgaaattttgtttgcgtaccaaaagcaatccaatagggattatatttatttaggaggttcggaagggttagttaaaattaatacggatattccttataccgaaactcaaattccggaaatatatctgtccgaaattctttttaatggtagcccttctttgaagaaggtaaaggaaaatacaataaaaataccatggaattataattctctttctgttcacttccggatcaagaacagagatgtgtttcagaaatacctattacaatatattattgaaggcagaggtaagcagtctattgaaacttatgatccggtgttgaacttgtcttctttgtcggcaggcaattattcaatatgggtttcgtgtaatacaaagaatggaaaccgaactccgtctaaacaattgatacatattatcgtcactcctccttggtataaaacagtttggtttattggtgtagctgctgtgttgtttattattatgactgcaagcataggttatattcattatcgtcggaaagaacgcaatatgaaaggtaatgtaaactatttcctgcaagccgtattaaacgatatgctcagtagtaaagaagaaaaacagcgaggtgaagaagataactttgcagaaactcctttgtctgatatctcatcaaaagaggatgatagccgactggaggaaactgggcaacaaactcaagcgaaaaacagcaaggaagatgaagaatttctcaataaactcaatatgcttatccatgagaacatggcgggtggagaactttctattaaattcctgacggacaagttggctatgagcagagcttctttatataataaggtgaagttcctgaccggtttgggagttaatgattatattaatcggttgcgtattgagaagtcggtttttctgcttacaaatactaatatgaacattaatgaaatatcctatgaggtcggtttttcttatcctcggtattttagtacttcctttaagcagatcaagggaatgacacctacccgatttaaggaagagaataagaagaactgattactgttttgtgctgtctttgtttgttggaataaagaggtgtggttgctgttttccttgttaaaatcccgttcctgcctcattttctttaaacttctgtgaacaaaatccggattagtctgttttttattatgcaaatcgcctgataaagcttcttatgggtatgtgaatatagataagtcaagcaagatatgcctccccggcataacaggaagattgcatagtagttttgtcgtgttttattttgtgtttgtgttgtgacggtgctgcgatgtgaatcgaggtaccgttttttattatggataggtataaccggagattatccggtataaaaaaatactgtgaaccggtttgatgaaaaatggcttcctttgcagagtaataaacagagtaataaacagagtaataaattcagtatcactaaaatctagtaatttatgttcaacgaaaaaagaagcagcatgttgcacggtgtcttgttgatagcactgttctcttgtgcggcgttttacattggtgagatgtctttcgtgagaagtctctctttcagtccgatgattgtaggtatcattttgggtatgctttatgctaacagcttgcggaataatcttcccgaaacttgggtgccgggcatacagttctgttcgaaaaagattctgcgtatcggtattatcctctatggtttcagattgactttccaggatgtgctggctatcggattgcctgctatgttgattgatgttattattgtggtggtgactatttgtggtggtatttatctcggtaagttattgaaaatggacaggggtattgcgttgctcacttctatcggaagtggtatttgcggggctgccgccattctcggtgcggagtctactattaaagcaaaaccttataagacggcagtgtccgtttctaccgtggtaatcttcggtactatctctatgtttttatatcctttcctctaccgtaatggaatttgtgcgctcactcccgaccaaatgggaatctatacaggttctactcttcatgaagtggctcatgtggtgggagcgggtgacgcaatgggaaacggtatttcggattcggcaataatagtgaagatgattcgggtgatgatgctggttccggtgcttttgattactacttatatggtggcaagagcgagaaagaaacaagtacagaaagggcagaaatttcagaagattgccattccctggtttgcaatcggctttatgggagttatcgcttttaactcttttgatttgctgcctgcgcagttggttgcggggatcaatacactggatactttcctgctgacaatggctatgactgcacttgggacagaaacaagcattgacaagttcagaaaagcgggggcgaaaccttttgtcctggcgtttcttctttatatttggctggtagtaggcggttatttcctggtgaagtatctcactccttatttaatgtaataaaaaaacggacttacgtagattctcagaatgacattcttcagaatttgtgtaagtccgtttttggtggtggtactttgacaagtacctatctagttgttataagggcatatttccatgctttttaggtggattcgtctgcatcttattttctgtcatttccaatgcctgaatcagacgtttacgggtttgtctcggatagatgatttcgtcgatgaatcccaactcggcagcctgatacggagtggcgaacttttccttgtaggcttccagttctttcgccttagtctctgcatccgctttgcggaacaggatatttaccgcgccttctgcccccattactgcgatttccgcgcttggataggcaaagtttacgtctgcgcctgtctgcttggagttcatcacaatgtatgcaccgccgtaagccttacgggtgataacggtcagtttgggaacggtagcttccgcgaatgcataaacgattttcgcgccgtggcggatgataccgttattttcctgcgtgtatcccggaaggaagcccggaacatcttcgaaagtaatcaacggaatgttgaaacagtcgcagaaacggatgaaacggctcgccttgtcgctggcatcaatatcgagcactccggcaaggtaggcaggctgattggcgacgatacctaccgaacgacctgccagacgtgcaaaaccaatgaggatattcttggcaaagttcggcataacttcaaagaaatagccgttgtctaccactcgctcgatgatatctttcatatcataaggaacattcgggtctgccggaacgatagtgtccaaaacagcgtcttcacggttggtttcatccgtgcagttctgctttttagtttcgtccatattattctgcggcaggaacgaaagcagttcgcggatactcatcaacaattcttcttcggtgttacacataaaatgagtcactccgcttttgctgctgtgagtcatggcaccacccagttcttccttgcttacttcctcgtggataacggtcttcactacgtcaggccccgtcacaaacatgtggctcttttctttcaccataaagataaagtccgtgagggcgggagagtagcaggcaccaccggcacagggaccgagaatggcggagatttgaggaatcacgccgcttgccattgtgttctgataaaaaatgtcggcatatcccgaaaggctttcaataccttcctgtatgcgtgcaccgcctgaatcgttcaatgcgataatcggagcaccgttctttaaagccaactgttgcaccttcacaatctttttcgcgttggaagcggacagtgaaccgccgtaaacggtgaagtcataggcgtaaacgaatacctggcgaccgtcaatctttccgtagccggatacgataccgtctcccggaatcttgttcttgtccatgccgtagttagtgcaacggtgaaccattagtttgtccagttcaacaaatgtccctttatcgagcaacatctcgatacgttcgcgtgcagtcatcttgccgctttcgtgttgtttctctatcttctcaacgcccccgccgagggaagcgatgcggtcacgttcccggagcgtggcatatgctttgtttatttcttccatgatgcaatccgttttttagtgttatgcaatcggttctaatgttattaatgtctggtcaccggtgatgttatcgccttcctgaaccagaatttctttgatacggcaatccgaagtcactttatagttgctctgcatcttcatggcttcgataacgatagcggtgtctcccgcttttacttcctgtcctgccgttacgggaatttttactacttttcccggcatgggagaagtgatgcggtcgttctgttcgtcctcaccttttttgcgcatacgcaggtacttcgcttggctgtctacgatttcaacattgaaactgctgtaatgcgtgttcactttatagcttttcccgttctccttgcggatgagctgcgcgtttgcgctgcgaccgtccataaggatgttgcaggttccgttttctgccattaccacgtccgcttcaaacggctttccgtcaatggtaagtaccactttattatcttccttgctgaccagttccacttcggccacccggtcacctatatgaatttccataattaactgctttttttaattagatacgaagtacgcctttatgcaatccgaattctttccatttgctgataggacggttgtcggtagcgtcgccgctgttctcttcaagattcatcagataatccatgtaggcggcaatcagtgcaatattctcggcacgttcgctggttcgcatgatacactgatgcaggtgttcgccgttcttggcgatgaatccggtatcataatgaccttctacgaaatcgggcgtatccataatagcacgcaggtaactgatattattcttgactccggtcagcttgtactcatgaagcacgcgacgcatccgttcgatagcatattcgcggttagttgcccacacaatcagtttgccaatcatcgggtcataatagatcggaatctcgtatccttcgtacacatagctgtcgatacgcactccgataccgttcggttctgtaatctgcttgatgattcccggactcggcatgaaattcatttctgtatcttcggcacagatacggcattcgatagcgtgtccgcgctgtttgatatcttcctgtttcagttggagaacctgtccgtcggctaccttaatctgctcttttacgaggtctacgccgattacttcttccgtaatgggatgttccacttgcaggcgggtattcatttcgaggaagtaatagttgcggtgcttgtctaccagaaactcgatcgttcccgcaccgatataattgacggctttggcggcagccaccgctttttctcccatatctttccgcaattccggagtgacgaaaaccgaaggagtttcttccacaatcttctgattgcggcgttgcacggaacattcgcgttcgcaaaggtgaattacgtttccgtgtttgtcacccagaatctgaaactcgatgtgatggggctcttccacgaacttctccagataaaccgtatcgtcgccgaaagaagaaagagattcgcttttggcagttgtataggcctcttccacttcttctgcgctgtggataaggcgcatcccttttccaccgccacccatagaggctttcagcatcaccggataaccgattttattgcaaagctccacagcttcttccacacttttcaggttttcttgtgtgccgggcacaacgggcactccggcttcaatcattttgatgcgggcggaaatcttgtcgcccattgcttccattgtttccggattgggaccgataaagataatgccttcttcctgacagcgtcgtgcaaaagccgcattctcggacaggaatccatatcccggatgaatggcgtctgcgtggttcgctttcgccacttcgatgattttttctatattcagataactctctttagatgcggcgggacctacacaatatgcttcgtctgcgtagagcacatgctttgcagtccggtctgcctcggaaaatatcgcgatactcgttatttccatctcccggcaggagcgcatcaccctcacggctatctcaccgcgattggctactaagattctttttatcatacttttctaaattaagtacatacttattttgtgtcttcccaccttgcggacatactccacctgatgaaaacacagtattttcctgatttggggcttaacaaacgatgtcctttctcctaatccacgaggcggaagaacgttttacgtgaagtggcaggtcttctgactgactcttgtcttatttgccttcccgatagaacatcagtggcatcaaattagttcatttataagacattgaactgagcttcacagcagcgggactgttcgggatttgcacccgattccctattaatcgtcgtccgttggctacggattccgaaccatttcggcggcaaagataaataaattttgaatagagtgttctctttttgcacgaaagttgcttttttgtgcaatggacgcttgttcggatatcagaaacgaaataaggtaaatgtaagtggatttaatagttaaatctgtgtgtattattgtttaccctttaaactttctttcttttcgcattgttgaagtagcaattattaatcaaacagtaatcaattatgaaagagaagaaagcagcccgtgaggaacggaatcaagagaagctggctaatgccgattgggtaatggcggaattttatgcaacatggtgtcctcattgccagcgtatgaaacctgttgttgaggaatttaagaaattaatggaaggcacgatcgaagtggtggaagtagatgtagaccaggaaactgcccttacggatttctacaccatcgaagcaacgcctacatttatccttttaagaaaaggacaacaactttggcggcaatccggcgaactgactttggaaagactggaaagagccgtgaagggattcaaatcttgaaaaagtattaataaaacaagtgctatttctcagaaagttttaaatcatgttatgaaacatacttttttatttggataatttgcagataaccggaaagtccgtatctttgcaatgtgtttttcatagtattagatttaaggttaacaaaggttggagcaaggcgttgctcctttttttatgttcgtacctcactttccactaaataatattgatttaataaaaaaacaagttaccatgaacatcgactttatcacgcttaccaaagacaatatagaaaaagaacatatctgctgcgctttctcggataagaaatgtcaggaaagttataacctgaaaaaggaatggctgaagaggcaatttgaaaacgggtatgtttttcgccgtttgaatgagcgtgcgaaagtatttatcgaatatggccctgccgaaaacggttgggttcctgtgaaggctgataattatctgttgataaactgcttttgggtagccgggcaatataaaggaaaagggtatgcgaaagctctgctccaaactgcgatagatgatgccttgcagcaaggcaaggacggtttggtgactgtggtaggaacaaagaagtttcattttatgagtgataccaaatggctgttgagacaaggatttgttgcttgcgaacagcttccgactggatttagtctgttagtgaagaaattgaatgttgatgctccgaatccgacgtttaatgaatctgcacgaacaggagagtgccctgataaaaagggtatcactgtttatttctccaaccgttgtccgtttgcagaatttcatgtgatgagttctttgaaggaaaccgccgccaaaagaaatcttcctttgacgattataaaactggagacaatggagcaggtacaggctgcacctactccggctacgatattcagcttgttttatgaaggaaagtttgtcacaacggatatcagtgcttgtatggatagccgttttgataaagcgatagcagggaaataagctaattcagtctcaattcatacagacatgcctgtacttcttccggactaccggtatgtttaccttcgtcgtcggatagcttgatacattcccgccattcctgattgacgttcatcttgcattgtgtcagtttcataacgatgtttgaaggttcgaatccggtgtcattggtgagatttgtcccgatgccgaaggaacagcggattttgttcctgcaatattcctgaatctccagtgcttttgtgaaatcgagggcattgctgaaaacgatagtcttggtagtcgcgtcaattcccagttctttgtaacgggatatcagactgtctataaacctgaattcgttgccggaatcgcagcggacaccgtcaaacagtttcgcctgtttgcggctgagattgctgaggaagataccggaagtataagtatcggataaggcaatgcccaaatcaccgtcataaacattcacccagttttcgagcgccatgtagttggcgtgtttatatccgaattgcgctccatgaaacatgaaccactcatgcgggtgagtacccatcattttcatgtcgtacttcattgcaaaatagcagttggaagtgcctgtgcaatactgcgccgtttcttttaattttctgataaccgtttcctgtacatggacagaaaatctccgccgcgtaccgaactccgagaaacgtaaccgatgttgattggacagttccactttctccgataatttgcataagatttcgtccatatcggctacattgccgaagaactggttctttatttcggatacaatggcaagtaaaggtacttcatacagggtagctttatagaggaaatcactgacttcgatgtgaagatgatgtgtttcgtccaaatgtatcttgattttatccggatgaaagcggaaagatgacagccattcccaataaactctcggaaggaaccggcaatttcgtgtcatgtattccagttcttcttctgtaagtctcaatcggcttagcttatcaatttcatttttaagtctttccagaaattcttcagtatattcagtctcatttctatcatggaagctgaatttccccattgcatagggaaatagtttgatataagcgtacgatgtggtaaacttatagagatctgtatccagtagcgttctaacaatcatgtcgtccgttctttatattaaaaacgttgtaaagttagtatttgttgaacgaaactattgtttgattgtcgatatttctttcttttaatgatatttgttatctgtctgttggtatacattgtgatgaaggataacagaataaagatgaatgttggctttttcataatgagtataatgtagattaatatatgctgttcggataccgtcaaacgctatgcttgtgccaccccattgtcacaacagtgccaacgtgctgtcacaactgtgacataggcatggcacgactgtgccaacggggtggtagaagtgtggcacagaaagtttaattttgatgatatatgtaatcctgttattggatatatatcattatgtttttaatgatatgtagtgcagttgtgggcaaagaagtgtcctctgttatatttccgtagcttccctccgggctgctatatccgattgacttagctgcaaataccttaccaccgaaagttaaaatcatctctgctgcatagacggggcaggctgtccgtttgtacttaactacttgaggcgtgcgatgtaccgttcgatattgttttatgataattccacggttggattatgagtggtcagtccgccgtctacgacgattgtttgtccggtgatataccgggcgtcattcgaggcgagaaaggcaatggtagctgccacatcttccggttcacccaaataaggcgtggcgcattgtcccaaaaagatgttgcggacgtcctcattcagattatccagagcggcgggagtcagtatcagtccgggtgctacggcgttgcaacggatattcttcttgcccagttgggtggcgatatatttagtcaggttgatgacacctgctttgctggctccgtataaagttccgttggcgtcggcagtcattccgctgatagatgccacgtttacgatatttccgccgccgtgcgccaccatgataggaatcacttgttgggagagatacatggtgcagcagaggttcaggtgaaatacttcatcgaagtagttaatatccagtttctcgatacccaagtcacgttttgggtcggttccgcctacgttgttaatcagtatgtccacttgtccgtactctttcattgcaaagtcaatcagctctttgcagctttgcagttcggtagcggagaaataaatgggacgtacgtcagcccccgattgagtgagttcggcagcaagttgctccgctttttctttggagtggtcggcaatgactactttaccgccttcagaaacaatacggcgtgtggttgcttcgccaatgccgccggcagcaccggtgatgatgactgccttattttcgaatctattcatataatgagaatttgatggttaccttctatcctaaacaagcgggtggaggatttgttacttaccttaaactctctttaataagattcgataaccagtttgaaaacttttgcatctctcttagtttttcgttcctatatatttaagaaaactgttaaatgttaacgttgttctgtttatatgttaatcggattccgattctattaaaccatgttataagataccccgttttgcccgataaatttggagataagccgaaagtccgtatctttgtactgtgtttttcatagtattagatttaaggttaacaaaagattggctgtctgggatagatagcctttttttatgcccttaaatttgagcgaacattgaaaataacgagtgttggttattcttcaggcttttcgtttcccggattgtgaatgaatatgttaaatgttaacgtgtaaagtctgaaatgttaatgcgattcggcgagtattaaaccgtgttatattattgcttgtttgggagctgaaatttgctatttatgtggaagttagtacctttgtactgtgtttttttcataagtattagatttaaggttaacaaaagattggttgctcgcgatgagtagccattttttgtttttatacctttttgattgtttattccttaatcattgtcgataatatctaggactttcctgttcttttttaacttatccgatatgtattgtttggttataacaaaaaacgatttttattgttatagtacgaaagacttaataaactgaacattatgaagaaaagaatcttattgttaggggcacttgttggtgctttcttgctggcttcttgttcgggagggaacaagaagcaggttgcgtcctcggctactcctgaagagttggacgacgccagtaaagtgataaactattatcatacatcactcattgttttgaggcatgtagctaatgcaaaagatataaatgcggtattgggatatatggagcagacaggaaaagtgcccgaagtagctccgattgcgccgccggaggtctcggtcagggatactgcggaactgatgaatccgggtgtctacttcaacgatgaagtccgtcagaatctgatacagaattacaggggattatttacttcgagagcacagttctacgctaactttgataaattcctgtcttaccggaaggataacaaaaaggcggaaaccactaaacttttgaaagagaactatcaattgagcatagcgatgtccgaatacaaacaagtgattttcgatatattaagccctctgactgaacaggcggaaaaggaacttctcgccgacgagccgttgaaagaccagataatggctatgcgtaaaatgtcgggcaccgtacaaagcatcatgaacctctactcccgtaaacacgtaatggacggtatgcggattgacgtgaaaatggcagaattgaaaaaggaactggaagccgcaaagaaacttcctgccgttaccggttatgacgaagaattgaaaaactatcagagtttcctctcttccgtagaatcctttatgaaggatatgcagaaagccagagataaaggcgcttactcggacgcagattacaatgcaatgtccgatgcctacgaatacgggctttccgttatctaaagaaaaagtttcctgctatcctgccaccattggcacgatagcgggaattattgttaataatatttatatcctatataaatcagctgcagtcttgaattcgttcaagacttttttattttctttcccataactttgctgccataagactaaactattttatgaaataggaaaagataaccaaaccctgtatgttatgaagaatctgcaattaactaaactaggctttttactttttctcatcctgttgtgtggatgtagtgaccactttgttattgacactcctgccgaggcgggtaattcttacgagtccgatgtccatgtcctgaataaattcgtagatatcagcgaaccgggtcagaagtattacattaatccgaacaagaaaagcaccgttctgtcttacatcacgaattccgaccttgaagaactgaacgcagtgaattccctaagtgcatcgaggtacgaaaaaagtctgttccggctgaatgaaaaaatttcgcaagctatttcttctcatacggtggactatgtagtgatgtgtacaagtagccagatattcgtagaccggattaatgatgattcacctatcgaactgaaaagtgccggtttcacaactctgtcggataatctggtcgtttctttactggatatttcatcagaggaaatgtcttcaagagaaatttactcggggaatctggtgcagacgggactcgaactgaatccgtctctgtatgcgagggatcactggatattccgcatacgatgtgaggtgggcgaaccgacagatagaaaaacggcctgggtgcttttctgcggagttggttatttcagtgccgcttctttcaattggcttgcgctcgattcttatgataaccgggtttcttggaacttcaccggcgaaagcatgttggacgaaactatgccttcaatcgcgcaaatggttttctttaaataaaagaatgtcccatttctacaatacattcaaattatcactcctgtttccgaggagaggaagattatctgtatgtcgtaattctcattcatcgggaatggaatgagtaggttaatgcaggtgtgccaagacgaaacggcacacctgcattttattcttcttacttcattttattccacgggaatataaatctccgtcagcaactcttcgggagccgttttgcacgggtcgttcagataacgttcggcactggcttcgtcgcgcaacgtacattccatttcaggcagatattttccgtaaatagtatcatacactgcttgcagattgtcatacgaccctttataaaggaaaatggcataacgtccggcaggaagcgtcttgaatcctacgtcgcctttaggcgctacctgaacaggcattaccatgcatacatctgtacgcaacttctcggcaggtgtcactttggggtcgtcgtgatagatgcaaagcgggctgaaatcccctattggcaggttttgttctttgacaaactgccacaaccgtccccaggtgccgccataatcattcagtttgtagtcgccggacaggcggatataaatcacatttcttgcaggtacatttttaatctcacttttcagttctaattccggtctgataatcgctggtttcataattacaaagtttttattgtttcgatactctaaaggtgaaatcccataaaactgcctgaatactttcgacaatgaagagggggacgaatatccgatgcgataggcaatatcagcaatcgggatatccgagtaacggagcaggcgtgcggcagcttctgtccgcgtccggacaataaacgtaccaatcggttcaccgagaaatgctttcattatccggtgaaagtaaaaaggagagaaattagaaaccttggccagcgattttaaatcaatctcttctcctaaatgctgattgatatattccactacgacatttacgcacttttgatactcttctttcgttgttttcttctgttgcatagtttgattgttatttcactatgcaaaggtactggtaaaaaagggaacagacttgtccgatattgcttatttgtagaatatctatttgtcgacgatgcttttctatttcttcgtttgataatttattttaatatttcgtgtatttaagtatagtataaatgtatataaaatgaccatatttttaaccgtttgcggtgatatggattttaatgttttaaataatgtcaaaacctgaaataaaaaacgctcttttgattataatctattactaaaatcgctatattgtaaccaaattattaaataaataatagccatggataaaagaatagtagggacgaacgccggaaaggtctggtgtgccctaaaggaaattggtgaaatttcaataccagaattggcgagaagattaaaccttagcgtagagagtacagcattggctgctggttggctggcaagagagaacaaaatttgtattcaacgaaaaaatggattgattgctttatccgatgaaagcgcctttcctttcagttttggatagtatggattttgtaaatgaacgtcattgacgttttattagcttgttggtaataaaatgtcaatacgtatggataaaagtgaaaagaaaaaatgccggggagtggataaatctgctccccggtatttttttcgggtcaggctgcacactggttgccgaagaattgtctggacagtgagttgataagcttgtttttatctgtggtgtgcacagataacgtgaagcagtggtcgcttcccccataagaaatgagagatacgggaatgtccttgatagtgtccatgatgtggctttctacctgggtgcgtttccagtgaagtgagccgatgatgtgtatcacggacatattttcgtctatgaccatttcggcatacttatgcagttccctttggactattcgcagggtatcactgctggctgtcagcatcatggagatagatacgttggatgaggccattgaaacgacgtttatttgatatttgttgatgacttccagtagtttccccattagcagatagccgggcaatacgtttaatgacgtaaagcgtacaaaggtggccgagtcctgtgaaagtattgctttgacactgtctcctgtgtcatgagaggagatatagagccgttcggttgtcaggtcgtggatatctgtcaggcggatagccatattggagcgtgccgcaagggtgatgcagtctgtgtagagtaggtaaactccgctgttaatcagttgttcggcttccgtataggtcagtgagtgctgctctctccggcagttccggtttgcatagatatgattgatttgggtggataagactatttcgtccgcttgaaaaatggtagcgagtactgttgcgtagtagtcgttacgcctttcgctcatgaaatctatttcaccatatacattcttacagatagagagcggggcgacaaaaatgtcgacatcttggttttcgtcaatatattgacggacagtttcctggatataggggatatccggttttctttccaggttgatttgcataaatttaccggcatccagcgtttgggcacgaaatccctgttggcgcaagctgtaagtgaataaatcactggacagtccgtatatttcagcttttattgttttatcaatcagtaaatcagctttgtcctctaccaatgcatgtatcttctttatgcactctcggatacggattttcatatcctgattcaattgcggttctgtgatgagatgattggtcaggctataacaatattcttcgatagcattaactgtggtatgagaagcttcgtcttcttcgtggaaccaactggcggagatagcctgcatccattcttgcaactgtgtcaatacaggaagtacggctacataagggtgttcctgccggatacagttgataacttgcttgatatcatcttcatctttaattttttcaaatttgcaaactttcatcgttgtctggttatttattggttgttactcttttcaaaatgatatgccttttttcaaaagggaatgattggatagcatcattcttttgctttggaatagggtatatctttataaatcaatttattaatcttgtaattaatacctttaaagtatttccttactataaataatctgccaataccgtaccacattgggatatgaagtaagatttgctatctttgtagcgtaattgtaattgattgataaaccaacgatattcatctatttatgaaactctgtatatagctgcactcaacaaatagcatacttttttaataaggctattcagctatccgacaggcaactttccgtctgccgtaaagttcttaaattgggttatgccgtgggactttcattgatagttctgtttgcactttcaatactagatacattctcaaaatgactgaagatataaagaataaacttttgatgtgtgcggagatttaccattgcgcagactttattacaagcgacccggtacaattccctcatcgctatacgctgaaacaggatattgaaatcagtggcttgctgaccgcgattatgagtttcggcaatcgcaaacagatattgaagaaagcagacgaactgcacaggctgatgggagattcgccttatcagtatgtgctgtcccgccagtgggaggtcgatttcccttcgggagtaaccaatagcttttatcgtatgctgtcatatgccgacttttatggatacttccggcgattatatgcagcctatacacagtttgaaagcttggaagaaactttgaatgcgtactcagggatacctatggaaaagttgtgctcattccttgaagtatccgctaaaagtcctcaaaagaaactcaatatgtttttgcgttggatgattcgccgggattcggcagttgattttggaatttggaagagctttgaccgcaaagaactgattgttcctttggatacacacgtctgtcgggtagcccattatttcaagttgacggatacagaaaccttctctttgaaaaatgcccgtcagataacggcagcattggctgaggttttcccggatgacccttgcctgggcgatttcgccttgttcggcttaggggtgaatggggagatttaatacatgacctgataaaatgaaattttcgattataaccggaaaagttgacataaaaccaacttttttcggttataatcgaaaaatcagagaattattaaaatgctgttattttgtttgtgaaatccttccaaccatttgcattcttgtatttctccacagattcggcaggaacacgaatgactgtgatatcgtccggaaatccgtaccatactttttcaaatacctgtggaggtgttatcccttctaccattacttccttaatacctgtattattgaaagctgaaaaattaatctgtgtgacgtttgccggaatagttaattgagtcacttttctattaccgcccaatagtccttgtcccaaaatccggatacttttagaaatatcgaagcgagttaatttcggacacccttcaaggcagtaggggtgaatcatcgcttcgggattttcattgagaacagttccataggtggtcacttccgtcaattccgggcagtaatagaaagccctttgcgctatggttgtaactccattcggtaatttcacagtggtaataccactttcccggaatgcttccaatccgattgttcttacattctccggaatctcaatcgttttcaattgagacgtcttaaggaatgcctgtgctccgatttctctcagggtcgcaggcagcaacacctcttcaacgcccgcatatacaaaagtgctggcaggaagtttggtgagtttcgtccggcttagatctgcttttttcaagttccggcaatagtagaaaatattttcctcaagttgttccagagtcgtcgggaatacaacttcctgaacggttgaattgaagaaagccatatctccgatagattgcagcccttcgttgagcaccaccttgtttatttgactacctctgaaagcagcttttggaattgacttcacactattgggaagtatgatttcattatgccctttcaatacttccgtcaatactccattttctacacggacaggagaaatctgcacggagaaacttttctgtttaccctctatcgttatggttacttcctgtttatcaacaggggcagatgatgagaaaccactgagctgttccggggtaaccttcactggtcgttgtttcccgtcatcatacttgcctgtcacgttaaggccggttaagtctatattctctcctaatgcataaatcgtttttgcgggtaattgttctatggagaaatcctctagtaaagctcctacgggttcagcaggattttctgccgaaggtgaatctttcttatattcgtcattttcggtgctgcaacttaataatattgctcccagaaccatttgcaagcaaagtgctgtaattatataaggtctagtttgtttcatatgataaaagtttagttagggaattgggttaaacgtatgtctacctttacgacttttccggcttctacggttttgccggaagaccatatctggtagttgtcagggccacccccttcttgtaccacgaatgtcaggaaccgttgcgactgcgttgtgaaccattcctctcgtggcaatacaaaggttgctatgccactttcgtttgtctgggcaattgcagttggcaaggttaaattatctttttcaaaaatcttataatccttttcattatacatttttacgggaacgcccgttgcaatttttccattctcatcataaacggctaccactacttttgcttctttcatttcttcgtttcctttttcgcatgctactatgaaaagcatgacgcttaatagaataacaatcttcttcataatcttttcttttttctaatttttcgaatacaaaagtagtaagattgtatcaaatttgggttatgatgcaatcttacaaatctaacattttaatttaaagtgttctgatattcaatgagttgtataagatgtgtcctaagatttctaacacaggtctaacacctatccgaaaagtgctaaaaacaactccttattggctgtttctgccgatttgatacgtgatttgagccgtgacttgcgagcatatacattagctaccgtatctttcataaacaaactgattacttgtggcgagaaacctacaaaaatataacaaagcagccgtatgtcggcttctttcattgacggaaaatcattccgcagcttctccatagcattatcatggcaggtatttacgataagttccagctcttgcaacagttcattgttctctgcaaaatcggtgataatctgtttcacttcgtggaacatggcagcctgttgtgatgcagtattctcacgttcatagtaagtctttcccagtttgtcaatgatgtcaaagcgtgaagctatcaaaccttttaaatggctttccgcattgcgctgtccttccatgtgttccgtcagggttttgtattggaaattggcttcttccgccaatagcaggtagtggtcggtacgttcgcgttgcaggcgcagacgttgacggatgatatagtatgctacccctaatatcagaaaaattacgcttgctacggcaatctcccagatagtacggttcttcatccggtattcggcaaaattggagcgttccttgaaatagtcacgttccaccataccagcggagaattgcatattcgagcgtgtcagagagtcagtcagatagatataatgatgtatcttctcagttgctttctcgaagtttctggcctgcgcttcaatccgataagcggtgtattgcaggtctgcgatgtcacgaatatcggtagaatgtgcttctgcgagtgccagatagtagcgtgcgctgtctatacggtttttcagtagattcacatctactaacgtatgatatccgtagagcgtatcttgccgggcagaaagttcgatacgttgcagcaggtcatgaggaatttgtttcttgcctgacactacatagagagaagcaagattggtgagactggctttggctaacttatcgtacttgtgttcatcggccaaatcgagtgcggcagaatagagccgcatggctttctccatatctttcgaattgaaagttgcggctgccatatcgagagttgcttctgtttcttcgcgagtgttatcagactgccggaagttattgcgagcttcacgaaaataatgataagcccggctatagttcatctggtcataatacacttcaccgatttgactgtataaaagccccgcataataaggctcattggtatctttcagtttctcttcaactttcagataaaggcgtaacgctcccggcttgtctcctgtacgcagtttgacttttccccaataatagagggttttgcattgacggcgtaaatctttgggatgatgtttgtaatactcccaagcccgacgaatcagcgaatcatttgttgctttgatatgattcttgtctaaagcctctgaataaagcaacgcatacttggcctgttcagcctggctaccttccgatttgagttgttgtaatattgttaaggcactatccggcttattttgtatcagtgcttccgcctcgtcaagccgggaaatctgttctctgttataacatcctgtaaaaaagagaattgctaatagttcgagtataattctgcatttcatgctgtgaatgtaataaaaatatttcgagtttagtatggaatcgtcatatctttattgttcttatggtgtttaattttacaacggtaggaaaatatgtaagtttggaagaagccttgaatacatattcacggttacctattacgagccatgctttgccgttacggtcttgcttcaaaacttgatgtcggctggtgacacgtatatattgttgcctggcattgagtatacggaaactgtaaatgttggaatagtcgttccgctgtttgagggcagattgatcccgtttcaacatggtgtaatcaatgtcaatagcaaaaaggcattgtttggcccacattcttcccgggtaatatcgtttgatttattcatggtgaatgttttgaatgttgatagtatattttgagaagatatttatttaccaatcaatttcttctattcccttactacgcaaaaaagcattggctttgctgaagtgtttgcaaccgaagaaaccatattcggcagaacggggagaaggatgaacgctggtcagtaccagatgtttgctagtatctatcaaagatagtttctctttcgcataatttccccaaagcataaatatcaaattctctcgcttttcactaagtttcctgataactgcgtctgtgaagatttcccagcccatatttcgatgagaaccggtttcgtgcgctcgtacggtaagaacagagtttagcgggaatacgccttgggcaacccagcgatccaggttaccggaagcaggaattggttttcccaggtcttgatgtatctctttgaatatgttgtttagtgaaccggggatagctactccctcaggtacagaaaaacagactccgtaatattgtccgggattgggataagggtcttgtccaaggataactacttttactttttcgaagggacaggaattgaatatatgaaaaatctgatgtccgagagggaggacgtgtgcccgtttatattcatctttgacgaatgtaaccaacttttcgaagtatggtttatcaaattcttcttgtaattgctgtttccaactttgttctattctgacattcatgaggtgccccttaataagttatacaaagacaaaagtagatatattgcgagagaatatcaagaatgagagacgaaattgtgtatttcaccgatttagggtgaatggtgtgctaataaatgataattatcgtctttcttccgaaaaagaatgaatataaacgtatttttctgatttattacattatctttgttcccagagtttgagttacgaattattattgtgtagttcttctttttaatatattattagcaagtagtcctcttctgtaattatcctcctcactccaaaatagtatttattttaataaaatttttagatgaacatttacatttcaggtttaagttatggcacaaatgatgctgacttaacaaatttatttgcagagtttggagaagtatcttctgctaaggttatttttgatagagaatctggtagatccagaggatttgctttcgtagaaatgccgaatgatacagaaggacaaaaagcaattgacgaattgaatggcgttgaatatgaccagaaggttatttcagtaagcgttgcacgccctcgcactgaaagaccgtctcacggtggtggtcgtggtggttataataactccagaagatattaatacccggataaaagcagaagattctgtcttctgcttttatatataaattatttccgtttcatgattcatcgtgaaatcccttttacagagaattcgaaaaatcattttacatttaagttctgctaattctgcctcttttgtgtgcaatatcggaaatttctagttctgcactttccattctgaaaatagatttattagacttttttgtaatacaagcaagcctctggaaaaaagagcaaagtttaataagtataatcacaagtctatatcaatattgacttcgtcgtgaacatttatataagatatgtttctgacggtttactttcagatatagtaaaaacaacatttatgacatttaaagaattaaatataaccgagccgattttaaaagcaatcaaagaaaaaggatatacagtaccgaccccaattcaagaaaaagcgattcctgccgcattggcaaaaagagatatattaggttgtgcgcagactggtacaggaaagacggcttcatttgccattcctatcatacaacatttgcaagtcgtgagcaaggaatctgtcaagcgtcagggtatcaaagccttgatattgacacctacccgtgaacttgccctgcaaatcagtgaatgcattgacgattattcaaaatatacccgtgttcgccacggagtgatcttcggtggtgtaaatcaacgtccgcaggttgatatgttacgcaagggaattgatattctggtagctactccgggacgtctacttgatttgatgaatcagggacatatacatctggatactattcagtattttgtattggatgaggctgaccgtatgcttgacatgggatttatccatgatattaagcgaatattgccgaaacttccgaaagaaaagcaaaccttgttcttctcggcaacaatgcctgacaccattgttactttaaccaaatctctgttgaagaatccggtgaagatttacataacaccgaaatcgtctactgtggactctatcaatcaggttgtgtacttcgtagagaagaaagagaaaagccaattattaatttcaattttgcaaaaagcagaagatcaatcggtacttatcttctcgcgtacgaagcataatgccgataagattgttaagatattaggtaaggctgggatcggtagtcaggctatacacggaaataagagtcaggcggcaagacagtccgcattgggtaattttaagtcggggaaaacccgggttatggttgctactgatattgcttccagaggaatcgatataagtgagttgcctatggttattaattatgatctcccggatgttcccgagacgtatgtacatcgtatcggtcgtacaggaagagcaggaaatacagggacagcacttacattctgttcgcaggaagaacgtaaactggttaatgatattcagaagttgactggtaagaaactcaataaggctaatttcactttttgaaattagcctcttacattattcattaaaaataagtataaattaaatatgatttctatggcaaaatccatgacagtaggtaaacgtgaaaatgaaaagaaaagactcgctaaacgagaggaaaaattaaagaagaaagaaagcaaaaaattgtcgggaaaagcgaatagctttgaagatatgattgcttatgtagatgagaacggaatgataacttccactcctccaacggaagatattaaaaaagaggaaataaatcccgatgaaataatcattgcaactcccaaaaaggaagaggaagaaccggctatcttaagaggaagggttgaattttttaatgaggctaggggatttggctttattaaagatcttaacggtgttgaaaagtatttcttccatgtaaataatgttgttggcaatattgtagaaaacaacattgtgacatttgatcttgagcgtggtacgaaaggtatgaatgcagttaatatctgtcttgaaaagcaataatcctttattaaagttttattttgtaattcgtataaagcggacatgaaaataagatctttgggcaatacaagttttgatttgatattcgaaacatttaataggacttttgctgcctatgatgctcgagaacaggaacagtgtgaaaatatctgatatgcccaacgaaattagatctgtatctatcggagcattcgatatgatagctgatttctgggatttaggggaatgttactgttggaagacgtttttctgactgatccccttcatcccactattttgctattcttggaaaataaaaatccctgaacttctttgaaattcagggatttacatcgttttgctttctctaaaagtggtgccaccaggaatcgaacatttaaagttctttgtacttaaagtcctgataaacagcactaaatcttatatcgttaaaatcaaaaccattgaattagccatatttctaatttcaattatttcaatctttatcgctgtcatttttttgacggtgcaaagatatggaaaaggttcgattcctccaaatagtattggcataaaattacagaaaactttataatgtattcatttatgctggaatgaacggcatatatatgaagagaacgtctttaggaaaatttccgaagacgttctcttctatactgttggcttttaaaaagcttccagcctgttttcatccagcagttttataatatccttctctttataaagtatcctgcctcccagccggtaataggggataagcccggttgtcctgtgttcaaccagtgtccggcgtgttatcttcagtaattcggacagttcagcttcggtgatgtacctgtcaccgttcaggacaggcctgtatctgtccggttcgctttttaagagttcggtgatgtgtccgatatcctggaagaactgggtaatctccggactttcccttgtcagtaagtcatgtgccatatttctttgcttaattgtttcctttttgtaacagtccttccatgtatgtgacgatgtcttttttccggtaatagattttcctgtctatcctgctgtacgggatttttcccgtgctgcgtaaagtaagcaactttcttggagagatatccatcataatacatgcttcctgattgtccatccattccgtcagtctttcctcctgccgtattcctcttcctgtccggatatcccggatgattgagcttaacgcctgcttcatttcttcaaatgttgtggcttcgatactgatcacttccataagcttttgattttttgtccgatgcaaaggtatgctgccggtaagtttgtctccaagtctctgactacaggtgtcagcagatgtcgtcagatttcacggatagttggtcaaattgtaaatcgtatttacaatttgtacccgaactttacaacatccgggattacattttacagtgctttttgtaattttctattttatatttctttgtgaattagaatgttatgtaaaaagatggattcgtttttttgaatccggcatgtaattttcattatagtgtaatatactcttgtagtgcgcacaggaagagtattcaggtaatcactttttaaaacaatggaggatatgccatgatgtatatagataatgaggtacttgagaaaatgataatgactatggtggaaggttttaatc

SEQ ID NO: 3013 - DNA, 9386 bp, Unknown
  gut microbiota DNA sequence
aatctaagaaaaatgaagaatatatttaaaaagaatttaagtattcctttagatatgctatctaaacaccccttcaggttatatgcatctatcttcctgtttggattttcatctatgtgcgcatcggatgcattagcccaatcaaaaaagatctccatcataggaaaaaatgtttctttagaacaggcaattcaagaaattgagaaaaaatcgggttatctttttgtttatgacactaaagaagtcaatctgaacaaaaaagtaacagtgaatgttaaagataaaacagtaaaaagtatcctcgagcaggtgctggctaacactggtatttctttttatgaagaaggaaacaatattgttttaacgaaaactaccaacaaaaagaaaattaacgtaaaaggtaaaattgttgacttcaaaggtgaaccggtaattggtgccactgtgaaggaacaaggtactaccaacggaaccatcaccgacttcgaaggtaatttcaaactgactgtaaaagaaggctcttctttattcgtttcttatgtaggctatcaagataaaagcgtaaaagcagttaccggcaaagatattttggtaaggttgttagaagacactgaaatgttggaagaagtggttgttgttggttatggtacacagaaaaaagtcaatttaacaggtgcggttgaaagtattgaactttctaaagctaaaggacgtgcatacaccaacgtgagctccatgcttcaaggtaacgtggcaggtgctttcatcagccagatttcaggtcagccgggtgatgatggcgcaactatccaaattcgtggtatcggtacatttaacaatactagtccgctggtcattatcgatggtatggaaggtaatctggatgctgtgaacccgaaagatgttgaatcggtatccgttttaaaggatgctgcttcttgtgccatttatggtaatcgtgcatctaatggtgttgtgttgattaccactaaacaaggtgatttgaactcaatgaacatcgaatataatggtttggtaggcgttcagaaagcgacttcattgccggatgttttgaaaggtattgattatttggatttgaaagctgaagcttataagaataccaataaatcatggccgacttggtatacggaagaatacatgaataactatcgcaatcatgtggatgaatacatgtatcctaccaactatagttggatggacgatacttatcatacagcaatgataactgatcattatatgtctatctccggtggtaacaaatcattgaaatattctacttctgcaggttatctttaccaaaatggtatcgtaagaggtaacaatgcgaagaagtttactttccgtagtaatgtatcagcttctttctttgaagataaattgagattgaatgtaagtttatcaactcaccagagaaccaagaacgacttggtagatggtgctcatagtgcgatttacagttcttatgttgctcctccgactatccgtatgactttgccaggtgtaggttacaacaatgcaggttatagctttggtgcaatggatgctggtggttttaaccgtacaaaggaaactccgcttacattaaatgcatctattaatgctactttgatgaagggtttgagtttgaatttgtatggaggcatcgacaatcatacttctgaaaacaaaaacttcaaaccgactgtacagttgtttggatttaatgatgatggtacaatgagtactccacaacctcgtgaatcatcgttgcattatgaacaatctaaaacaacaacgtatgtattgaacggtcagttaaattacaatactgtcattgctaagaaacacaatgtaaatttgatggccggttatgaaatgcgtgaatattcttggaattggcattctatggaccgtaaaaatctgacggttaacttacctgaattccctgtaggtgatccaaagactcagttgaatgacagtaaagcacatgaattggcttggatgtcttattatggacgtttaaactacatgttcgataaccgctatatgtttgaatttaacttgcgttatgatggttcttctcgttttattgacaaatggggtgtgttcccgtcagtgtctggtgcttggcgtatcagtgaagaaaaattcatgaagaatgtgacttggttggataacttgaaacttcgtttgtcttacggcaaattgggtaacgaaagtatcggtcagcaatatgccgcatctgatgaattgagcttgaacggtaagtacaatttcaacaacagtttggtaggtatggctgctgttacaaaattagcgaataagaaaacttcttgggaatcatcagaacaatacaatatcggtcttgactttgacattttcaaacgtgtatcagcaaccattgactattatatcaaaaacacaactgatatcttgatgcaggtacctgtttcaggaactcttggtatgagcactgttccttatcagaatgcgggtaagatgcagaatagaggtttggaaatgacagtaagatataacgaccgttttggtaaggtgggtacccacttcagtgcttctgctactcgcgtatacaataaagtgcaggacttggctggtaaggatgagttgattatgtctgaccacatttggagggtcaatgaaccatttaactctttgtatggtcttcaaacagaaggtatctaccaaagcgaagaagaaatcaaaaaccacttaattttctctaaaaatggtacagctctcaatccatatatgggcatgaaaccagaaccgggtgatatccgttttgtggaccagttgactatcgataccaatggtgacggtattcctgatactcgtgacggtgtaattaatgaagatgacaaagtgattatcggtaatacattcccgaaatggacattctctgcaacgcttggttttgaatggaatggatttgacgcttctattttcttgcaaggtgtggctggtatgaaagcattgaatcaaggtattatcactgtacctttcttcggtggtgaatcaaatactggtgcatggtataaagatagatggactcctgaacgtccaagtcagactgtacaacgcttgtattcagaaccgggacgttctgaaattgtatcggaatattatttggaagatgcttcttacatcagatgtaagagtttggacttaggttatactgttcctaaaaaagtcttgaagaaagcatttaagaatacaccttctattcgtgtatatgtatcactccagaacttgtttaccattacggatatgcgttatggatttgaccctgaaaagccgtcacatttaactaacacattgcagtatccacaggcaaaaacttattctttcggagttaatatgaaattctaatacaaagaaatgattatgaaaaaatataaattactttttttagcatgtttaatattgtttagctcatgtgatgatttcttggaacgtgaaccattggattttgtatctcctgataactatctagaaaatgagaaccaggctgagaaacttctgaatggtgtatatgaatgtttaatgaatcatacagcgaatgcacgtttgtttccgattcatatagctactatgaccgatgatgctttcgaccctcagccttggcatgatacgactgaatggcctcgtggtcaaggcaatgcaaacagtgctatgccgaaattgaaatgggaacagaattataagggtattgcacgtgccaatgtgtttattaacagtgtggcgtctgcaggattctcatctaagaatttgcctcgctacattggtgaagctaaattcttgagagcttggtattatacagatttgattaccttcttcggtgatgtacctttggtattggaaccgggtgacttgactaacagcaagccgcgtcgtacaccgaaagaattagtggtgagtcagattttgaaagacttggaagaggctattgctacacttcctgttgagtatccagaagatgcgctgggacgtatcacaaagggagctgctatgggactgaagtcacgtgtacttttgtatcaaggtgactgggcaaatgccgctagggccgctaaggatgtgatggatttgaatcaatatttcttgtttccagattatcaaggattgttcttggaagtaaatgaacgtgctgcagactgtgaaattatgatgagacgttgctatactcctaaaatcgatccatcttatttgtattatccgttgggagaatggcctgcatttgcaccgactaaacaactggctgattcttattatatgaacgacggtcttcctatttcgaaatcgcctaaatatgatgctcaaaaccctcacatgaatcgtgacccgcgtttcgcagcttcattgttctatcctggatgccaatacctgaactttatgatcaaggctccagatccagaagtctccaaggattctatccagattccttcttggttacttaactcaacaggttatcgttcgaagaaacatttcgatggaacattgaccaacgctgaagatgaaggacgtgatacttactttatgcgttatgccgaaattctgttgaactatgctgaagctttgaatgaatcggaagggccggtgaaagcagtatatgatgctattgatgctttgagagatagagcacatactacacgtttgtcaacggcaatgcctaacttgtcaaaagatgccatgcgtattgaaatcagaaacgaacgtcgtgtagaacttgcttttgaaggtttaagatgggctgatatccgtcgctggaaaattggtgaagaagtaatggtagatgcaaaaggtcttgataacactaaattgaaagcgggcatgtatcctggcgatggcaaaggtgaaacaaaagactggaagtatgtaacgattactgtagaccaaagacagtttaatccgaagagagactatttgtggccgattcctcaatatgaaatggatgctaatgaaaatatgttgcaaaatcccgggtattaataaaatttgaaaactatgaaaagaagtatattatttacatttttagcattggctacatgcctatggactggttgtaatgatgatgaagaattgccagcaatgtctcgtacgtcattgaagtcatatggtcctactttctgtgaagtgcagagtcgtttgtatctgactggcggttcagatatcaagagaagtggtgcttgttgggtgttgaaatccacaaaggaatatgatgaaaaagcacttgaatttgcaactgttgaagataatgtacaggagttacctatcaacaatcctgatttataccgcatgcgtatagaaggcttgcaacctgatacagtgtactacgttcgtttctttgcaaccaatgatgaaggaactttctatagttatccggttcgtgttccgaccacaaagatttataatgataaagtatttgtggaaatgggtaaatttatgatgggtagtgcagctggtaaggttgatgaaatgcctatacatgaagttgaatttgaacatagcttctatatttcaaagaatgaaatcacgaatgctgaatattgcgaattcttgaatgaaaatgaagtaggtgctgatgccactgtgaatggtgaccaatggatcaatttgaaagatcctacttgccaactttctcatgatggttctaagtttgtagtaaaggctggaactgatcaacttcctgttgtttgcgtcacttggtttggtgcacaggcattctgcgaggaaagtggtggtaaccttcctactgaatcagaatgggaattcgctgcgaacagtggtttgttgaaaatgggaactgtttatgctggaagtgccacagcttctgaagtgggttggtttaatgaatctgttttgcatcaaggcggaatgaaaaaagccaatggtcttggcatcttcgacatgtctggtaatgtggctgaatggtgtcatgactggtattctgataaggcttatgaagatgctccagagaaagatcctcaaggtccgaaatctggtagtaagaaagtcgttcgtggtggggcatataatcaagctcctgtaactattactagacgtgatgctcagcaaccaacaactgcttctccttatattggctttcgagtagttaataaaatttaataaatatgaaaaaagtacttttaagtttaataatagcaggctgcctcttcgcatgtgacgatgaaacgctaaacccgattgttcagccaatcgctcaaacgagtgagcctatgtatattacaagtactaccgctactttggttggtaatgtattgaccggtgggggcactgtacaagaacgtggtttctactatatagaatacacttacgatatgaaggtttccgattatactccgattactttgcagcaggaggtgatgaagggaacccgggttatgtgtgctcaagacagtgaattcagctattctttagaaaatttggaaggagatactgattattattacttggcgtatgcacgcacagagaagggtatttcttacggtgatcctgtgttgtttgcaacaagtgatggagatgtcattcctgtactttctatcattgaaactgtgaaagatgaagtaaacagaaatgtgataatcaaagctaatattgatgctcctggtggtgcaccgattgaagaaatgggtctcgtatggagtaaagaggtaactcaacctactattgaaaatggtacaaaaatcaatattgatgttgtgttgagtgcttttgaaataagtctttctgatctggttacgtttacgaagtattactatcgaatttttgcaaagaataaatatggtgtaggttattcagaaccgatgatggtaatgttcgtgggtgataagtttactgacccgcgcgataaaaatacatataagatcaagcagtacggtaattgtatttggatggtagaaaacttccgttatgttccagctgatcgtttgagcaagggtatttgggtacaaggttacaatggttctagcgctgaagaagctatgcagtcagaaaattatgccgtttacggctgtttgtacgattatcaaacagctaaggatcttgctcctgaaggatggcaccttgcaactgacgcagagtggaatgaattggaaaaattggcaggtgtgtcagaagaactcttgatgaaagaagaagactggcgaggtaacagcaatgacagactaaaagctgacacttggcaaggtaatggtaattggtctaatgaacttggattcaatattcacccgggtggtaaacaatggtgcggtggtgcattccaagactttaaacaggcgggactttattggacttcaacaatgaatgatcatcgtgctgatggtgctttgcaaccgttcttcagatggttctctggcggtccagcaactggacgtttcagtaacttccctgaatgtgtaggtatgtctgtaagatatgttatggattaaaatgaaggttaatgagatcatggtccgaggttaaaatcgaatcatgatctgaaacctgagtgatttaaaaaagaaattgcgaattaacaattaatacattgtttaaattatgaaattcaaatatttaagtttgtgtctctgcttgtcactctttgcatgtagtgatgatgagaatatcctaccggaagaaaaacctgcagttccgcaaggtgagcctatggaagatacttcgattgtacaaaaagattatatttctaattccaacttgtggatgggcccttctctctctaatgatggttttgtagtagaagtggaaatgggtgctgaaagttctgtacgtagcacagaaagaactaaaaaatctattgaacattataacatgggagttcaccaatctccgcttcctgagattaaagctgctgaatggggatataccgtgttaaatcttcccacaggtcaaacagatggttcaggtagagtaattgataatatttacttggataacaaggcttctattaatgatagaaagacggctttggaaactattatgcaatttgtgaaaaagcagtatcgtgtagaagacagtaatacaccttggtattcaatgaatggtcaccattgttggcatcattatgccggtgcttccggtgctaccgttttagccagcgaaattggtgaaaacattcacggatatcaattgcacattgcaatgaatcgtggtgcagctagacaatatagcaaaccttgggctatcgacttctcttcatggcatggaccctctatcttggactatagcaaaagcaaaatctggaaagaatatagcggcccgaaacacggacactctattaatttggtggaacgttcgatgttgatgagttatatggctggtgccgacggtgtagtagcagaaggtggtggtgccatctgtttctatgatgatattactgctgacgactgctataaactttctccttatggaaaagtatttcagaagttgtatcagttctctaaaacacatagcaatgtaggtattacatatactccgtttgctgtattgttggatcagttccatggaatggaccgtcagccaacaggacaacaagtattcggaaaattcggatacaaccaaggcgatatggaaacctttaatttgattgaaacactttggccgcaaactttctccgttgagaaaaacggtaatgaaataggttctatggtaaatagcaagtatccggatgctgttgacttcttgttgcagggagcttctctcaatatactgaagacatacaaagctgtaatgttgagcggagacattacgctgactcctgctcaaatagccgatcttagatcttatgcagcagatggaggtgtagtgttggcatcaaacagacacttagaccagttggctttcaatggaacaggtgatactgctatccgtgaagaaaaagtgggtaaaggtaaaattgtaggtttcgatccgagtgctttgaaagatattcttgataagtatttgagaaagatgttgcctatcgaaatagaaggtgatgtagaatatttcgtaaacgtatcagacggcgctttctatgttactttgattaataatgatggtgtaatgaaagctccgaaaactccggttcagtttgacagctcaaaacgtaaagacattgtgattcattacaaagctaaaaacactattcaatcagttgacgagctttggaattcacgtaaagtgtatgttgaaggcaggactatcaagtttagaatgttgccgggtgattgctatatcttgaaaattgcgtcagtgtaatcataggtatctataacttgatatagacaaatgtaaatcaattttgtagatggataattttaaaaagagggtgtgcacttcattcacttcattcagtatgtgccctctct

SEQ ID NO: 3014 - DNA, 85597 bp, Unknown
  gut microbiota DNA sequence
aaaaacaaaggaagtcttataccaagaaattacggatcaacgtaagaatctgagggattttcattttatgcatataatttagcgagtctatacaagaaaaatgctttatctcttactcctctgaactgtgccctgaacgctttgattttagcattaaatgattctgctgctgcattggtagcccttctttcaaagaagtttattatattcagatagtgcgtttgtatcgagcgcgctacccttccaaaggtgagaaaccccgctttgtctacttcatcataccaccttgcaagccttgtcaaagctatatctttaaacttacactgatgatagattgatcctaaccgcatggccatataatatcctttctttatatcgggatattctttaaatagaatctcggcccatatcctttgagactgagtccatagagattcttttttgtaaagcagataaatactccttgccagcaactgttttcttgtatctccattggcgaaaacgggcgcatgatacatctttccgcaggtcttggcgtaagctatctgtatggactcttcgtccaaagcctcccagcgagctttcacctgcatctcctgaaccgcttcatacgctaatttctgtacatggaaacgatccgtaacccgtttggcagcagggaagcaagtccgggcaatctgttccatattgggagccatatccaatgttatctcacgcacctggtagcggcgacgacgcgaaagtttaagcaggacagaggtaaccgtgcaaacatccgtacctttaatgataccaataatactgcctttaccaccgtgagtctctttattaatcaacactgtatagagttctccacgggaaagagccacttcgtcaatacagacgtaggcaccaatgttcttctcaaacaggagccagttctctgcgtgagcaagctgatcccagtgtaggtaattacttaaatggttgcggtattgacgttccaacaaatccccgtcaacgccatataaagtacccaataacttgcaactgatcggataattatcaatatagttcttttaaaaaagacgcaaagtcttgcgtcaaacgagtaccctcagccaccatacgccaattgcgggaaatatactcattgctgcttttcaaaatccaacggcgacgacggaggttcaaaaagactttcttgccacgaagaggaaagtcttgaacaacaacaggctcataaaaccctttactctctgtttcttgaccagcatacttctcggggagctgattcttctcctcaaggtaaatgataacttcattcatgctttccttcacatcaacaagatcaaagtaatccaaagttccttcaggaagaagaaggtgataaccatttaacttcataagctattaatttggagacaaagataacaatttatatatttaaccctcagggttattcattgatcctttctcagttcagttggagttgcaccaaataacttcttacaataacaagtcagatgtgcaggagagctaaacccaaagtccatagctatttcccggaaagcaatatccggatcacaaattttctcacgaaccagttcagccctccgctcctgcatccatcggtaaggactctgactaaaactctcttgaaacttacgattaaaagagcgttccgaaacacaacacaaacttgcaaattctttcaccgttttcacattcttataattatccagtacaaaatcctcgaacttccgtcctactccagtcgttctagaaaagaaagcagcaagttctgatttagtataaaaccccctcaatgcaagaatgatttcctgctgcttaaggatatgcatatgcctacatagcaatcctgtatccagataaaaaagtaactgcctcaaaatatgtaacagaggctttcggattggtaaaatacaattattaccgttctccatttttacatgtgagattgattcaaaatacattttgtcacaagccgttatctgcttattccaaaacaacaacagacattctgccgagacaataccttcaaccctattttcttcatgctgcggtataagcagcatattatgctctaaaagatgtatattatgctccctgcctatattaacggatagttctcctttcaaaagaaataaaatacaaaaacaacaactattatcaatctgtccggattcttgcgcagccaatctgtattgggtaaaaccactgtcaattttaattccataattaaaacaggaatgatgttccgacaaataaagtaatttcatgttataatttaagtagtttaattttaaaacaactcgcttcgcttactatgtttgttttttttaaagacacatacttttaaactacaaacaaaaactgtaattctataaacatatacttaaaaaggaatatatatctgcatccattaacgactctcgctccctacatgacacatatagccctaacttagccacaagcaatatcgtctttcaatatacttacttcattttacatatcttcctaagtacaaggaactcccccaccacacaaactattgcgataaatggggaagtctgatgattataaagcagaactgcttctatttattatacatcttctatttttctatcacttcttatttagaattaatagtacaaatacttacccggttccaatccggttcctcaaacatatagccaattccctgtccttcagcaacaattcgctcctttgaaatcccatacttattaaccagcatcttttgaactgcctcggcgcgctgtcgcgcaatacgctcattaagttcttcactaccctccggagaagcgtaacccttgattacaactcctgcctctttgtggtttctcaagtaaattgcaatccgttcaacattaggtaattgagaattatcaatagttattctaccttgacgaaaagtaatcacagactctagtgtttttttactattgtcaatcgtatctttcacaattttcggttctcgattcttgtattcttccaaagccgtttctaaatctgtcactttttggttagcatcctgcaatacattatcattgcgttcaagttctgaacgaagttgatttatttgagcatttaatgcatcaaattcagactggtcgtaaggtcttactttagtaaaatggtgttcaccattgctacatctgaaatgatatacgaagcctgcactaatctcccacacggcacgccccgaatggaaatatacaggtttcgtacccatagaattcatatcatatacaagagccggtttgagagctagagtccacgccttactttcccctaaattaaaattaaaatttaatcccaacttagtagacataccattttgatcttcccccatgtttctaccaacataataatgcatccagccaataccagccacagcctcaatctcaaaacttcttggaataccgttataacctccaaaaagattatttaaattcaccaatcctaacaaacttacatttgattcatcaaatgctgttttactttttgttgtattaaaataacccattgcctcaaaacctaatccaaaggtaggggttaaatgcttgcttacatgaactccaactgccgaacgcatgtttttaaaaaacgagtgatgagtcaatggggtcacgccacctacattaatacctattgaccaattatccgaaaatttgtttccttccaaagctgtttgtccacttacatggcaaatggcaataccagatagcaataagcctgcaaaaatctttttcatcataattcttatttaaatttattattagcagaattggggctgaaatatatatcattcccaacattctacctttagctatatagttgactaactactactttcatttacaatacaaaataaaatcacccattgtgagatatatgtttatgtacgtctttctcagctgctgtaatgggacctacccacgaccacgattctacggtcctctacgtaaagtcatatttttctgttgcttttccatattcaacaaacactaatacggcaaagtgaactaattgtaatcagctatctcataccaaatcaaacattgtataacactttgcaaaagaaggcaattcctatctcaatctgttacaaataaacgacattatattttatgcatcagacaactatcatttatatagaggcttcataatttggagattcatagtttaggctataattcaagcgggagaaataattacataacataaagaacctatttcagcatatctcccccttcttagaaacacgttttccagaagtgatattcattcattgattttattattatccaacaacacaacacgcacccagtcaacccacatttctcccggcaaatcttcatcatggatttctcccggccatgtcatcataccattcaattcacctcccaatgaaaaatttagaattatattgaagggatattcacaaaatggatactgtagtttctccttatccaaatgttggttctcatatttccaagtctctttgccgtcgacataaaatattaattccttttcagtccgctgcactgcatatacatgatctttagttacatcaaaattcttatcaggctccttgttcgttactcctgcagaaccattttcaccatttatataaaaagtatgtaccgtttgaaagatctgcttaggactcccttgtacccattccataagatctatttctccccctctgggccattccggtgctcctataggcatttgccagatagcaggaaaacctccacgaaccaatttggttaatctggccttaacttccaaacgtgtaccacagggaaaacctatcttggaaaacaccccgccatttttataagtcccgttgtccttacaggccctcaacttcaaatagccttcctccacctttacattttcgtaaccatccacacccctaaaatactgtgaccaggcgttgttggcatacgtacaaagtttccagattgctgtgtcgggcacaacacatttcgcatcaaaatcatcaacaaataaaatgttttcaagtgtatccgatccgatttgctccttttcttctgcgcatacataagtaacagtcccacctatagcaaacaataaatagcacaaaattgatctcatatgattataaattaaaaagattaaaaaaccattctttcttcaaaaacaatattacctcatcgaaagaagagttgtcaccacaagagtgctgacaactcccttcgacaggcactgtcacctcaaaaacaaacttttacaccataaatattattctaaatcatagagtacattcaggaccctataaatctattttacaaaagactatttccactgatatacccgcacataatcaacttgcatggtaaaaggcaaatgtttctcatttataggaccagccattccctttccacctgcaacattcaatatcaagaagaaaggaatatcaaagggccattgtactgcgcccaaacctttgttataataggttgcgcaaacttctccatttaccataaaatcaattttcttatcgttccattctattccccatatattccattcaccctgcttgaatttagaccctgaatgaccaaaaggatatgtcttttgctccgtaccagtagtatgtaccgtttgtacagcaacatctaaatcttttatatgctccattatatctatttcaccacttgcaggccatcctccgtattctgaactggcaggcatcatccatatagccggccacgaaccattccccgatgaaaacttagctttaatctctactttaccataagtaaaatcaaactttccactatcagtgcgtatacttccagatttatatccgcggggatctgtttcatccttcataaacttgagattcaacaaaccatcttcacaccaaacaacggatgtatcattcggcttataataataggcatgagcaacatctcccctgggagtataattccacttcttggagtcaacggccccatcgatattaaattcatctgaaaaaatcagaacccacgatttatccactctttcaacggaatcttctttctctggtcgcagcacatcaatggaactgtcagaaaagtcgtttgaacatccgaaaaataaaactgctaataagggtattatactttttttcataactcaacttcgtattattttatattatctttatactaccataaacagatataaaagtatatctagccggaatacgaaactcctcccttccaaccggacatattctcgtcatatcttcttctattcataaccaggagtctgctccaatgccgaatcattatcaagtatattctgatccaacggccataaaactttatatgcctcagtcttctgatcaagaatagcaactttattatcaatatcaccttctatacagaacactaatggaataccgtcctttgcattcttcatgcggcacaaatcccaccaacgttgtccttcctgtacaaactccttatccttttcatgtaaaatagctaattcattagttagaaaatcagatgccttatatatatgtgaacctgcctcagacttatacgccctatttctgactaaatttatatatttctcaacatttgcattatcactctccatattagcaatctcggctaatgctagatatacccaggataaacggtaaagaataagatcaccatcatagactctatttccctgagcattgagagagcctaaatttttacatacatgagtaccatatacatacaattctccactttcctttttccgatatgaaggcataaatgtggcgtcacaacgagtatcacctttttcaaaactattataaagcgaaagtttatactcatatttctgttgaccattattctgtatatcaagcgcatcatcccatggcgttccattttctctaaaactatctttattagtcgtcccggaaacaagagaataggtatatccacgagaaagggagttttctgcttcaccctccatataagacacagccattatcacctcactattacctttgttatcagcactgaatatacgtttaaaatcttgttgcaattgaagtccatagttaccctctacatctttcaagtacttcttggcctttgacaaatccgattcggtagctttgttatcaccaatagttactttggaattccataaatatacctctccagccaaacattctgtggccgcctttgaccaatacaccttggtaccatgtccatatgaattaaaatcagaattctctccaaaatattgtagggaggtttccaaatcctttttaatctgtgatataacttcacttggtttagctctccccaaataaagtttattcggatcaagcactccatcgataacttccacgccaagacgaattggtaccccaccatagactctataaagatcaaaatagtaaaaggcacgaaggccatacgcctgtccaagataataattctttttagcttccggaatgaaattagcatcagttacacgagctataaaaagattgatattggttatacagccataaatatttccaaacttggtaactccgggagtctccttagacagattttgtaaacggatttccccactagagatagccagaccatctgcacttgtgccatccttataatgtccgccccttaattcgccaaaagtgataatatgctgttccgccatatctcgcaattgtttatgaagaccgtcaatatatgcactgacttgggattctgttttccaatagctggtacttccataattatctatcggggcgagatccagcatatccccacatgatgtagccactatagcagctatattcaacaccataatatgtataaattttaaatttctcatctcacttcgaattattaaaatgtaacattaacgccaaatataacggtacgtggcaagggatatcctgacgaaatctccgggcttaccgtcctggcagaagttaaatagcccaaattctgtcccgttattgagaattgcagtttctgcatatatagtcttttagacaattcttgaggaagagtatatgacaaagacaattctctaatccctaaatagttacccttagaggcaaatagagttgaggtacgatagtaattggcagctcccacctgatcagcaaatacgtaacggggatattttgcgtttggattactttcgctccatgtattaaaaacatcctttgtcgtattgtaagccccctgcatacatcctaaaaaccaaggagtcttatcatcataaacccaataatcaagcgcaaagtcaaaacgggcatacaaactaagtcccttccaagacattgtggtattaaaaccaccataccaacgaggagtagtatttcctattacaacctgatcatactggtcaatcaccccatctccatttacatccttccatttcacatctccaggttttaactctatgccttttgcccgctcattatcagaaagtttattccaagcttcagggccatattgatatttaccttgaatattccccgaggtcacaaccaaatttcccggaatatcatcaacacttctgtaaataccctcggcctggtaaccgacaagtatcccatactccattccctcctgaaaacctccgacatacaccttctcatcttccaacttacctgtacccggatttacaaccttccgaccggtatacacttgctgtccattctgtctgtttcgtacctgcccgttatcaggaagggctataatcttattcttattataagttatattaaaagaagcatcccaagtaaaatcattggcatccaacaccttaccagagagttgtaattcgattccgctattacgtaattttccattattgttcttaacagaagagaatcccgtggtcgaaggcagggtgaagtctgcatacttatcagatgtcagacgattgtagtaatcgatatccaaattcaagcgtcctcccaagagtcctacattcaagcctatatcaaaactggccgtcttttcccaacgcaaagaaggattaggcaaagtacctatcagaaaaccattgttgccatggtatttattagaattatatgaaccttgaagagtatatggaccgattccgctggcattaccgttcaaaccgtaactagccctcagctttccataatagaggaaaggaagtgattccttaacaaaatcctctttcgtaaaaacccagccaccggaaactcccggaaaaaatccccaccgattcttacccagcaaagaagaataaccgtcataacgaaataccccggagaacaaatatttaccctcatagtcgtagttcaagcgtccaaaataagaaagaatacggtaacgactatgattcgaatctatctgacgtttaccctcacctgcatcggtcagacctaaatctttaaaatcatcggtagcagcaccagaaccggatgcagagaaaccgttattatactgatcataaaattcactaccaaacataatattcaaattatgaacagcagaaaatacagtcgtataatctagaacagcattataggtctgagagaactgacgagaatagcttgcactagttgaacgagttcgattccattgccccggaaccgtctcatagtccttgcgcatactttcttgtacagtatgaaaataataccaactggcagaagccctcaagaccaatcccttgaataaattagcttctaatgactgcataagggtaaactttgtccgttcattatcctgatcgtaactttttgcaacataagtctgattaccgtccccgggactaggacccaatgtcggattaccatcctcgtcttcaaaacggacagtaggaggagtactcatcacccgaccaaaataatcactttccgtcccccaggcgttgtttaaccatacataattagcccggctgaaagtcgcattggaagtcgttttcaaccaatctgcaattttgtacgaaccgttgaatgtgaaattataacgtttatattcggtagtgataggggctccgggggagtcattataacccaaacttgcataataagttcctttatcattcccccccgacatactaaccgtataatcctgtgtcactaccggattacgaagattatattcctccggttttgtccctttataaatgattgttttagaagggtccaaaggatccagcatttctcgccagcccatatccaaaagataggcattttcatccgttttccccataatattccacaccatattcgcaccgagcttattacccgtaccaaaaggcgtagaacctgtaagatttgccgtagctgcccacggggtatttttataggctgtacgaaggactgtaatatagtcttccgcgcccaaaaagtcgtagggattattaacataaccgagacctatatttgctctgaaattaatttcccgatgtcctgcccggccagattttgttgtaattaaaattacaccattacttgcacgggcaccgtatatggccgtagccccagcatccttcagaacatccatagatgcaatatcctgaggattgatatcatcaaaattatcacgaagctgtccgtccactatcaccaggggtcctcccgaaccatcaaattccgttccaccacgtaatataactttaggagatgaagtaggatttcccgaagtgagagaaacctttaaaccgggaacagaacccgacagtgcctgagagggatttgtatatatacccttctctaatatctggggactgacagtcgatatagaattcgtcagttttgcccgtgaaacttttccgccataaccggtcacaacaacttcctgcaaaagttcactgtcttcttttaagattatcttaaaattcatttttccttgcacactcaaagtctgggaagaaaaacctatgaatgaaatctgtatactggcattatcagaaaccgagagtgtaaaattaccatcaacgtcagaaacagtgccatttgttgttccaacttccacaatactggcaccaatgaccgcctcacccgcagtatccgttattatgcccgtaatacttttcttctgtgccacaactacaatcgaacacagaagaaaaacaaataaaataaaactctttttcatactcttttatgtttttcatgtttaaaacacctatcaacaagaggcgttcaaataccatatatccactccaaaaacatcacaaattacggaggtataaacaaaggaataaagaaaatcatatttaataaattaggggttattatttacaagcgcaaagaaagaactcataaaactaaacatagtcagaaagcatttaaaaaaagtcatatatcatccaatactgcatttttttatcaaaaacagaataattaataaacattttatgtatatacgttgttaaatagaaaaaaatcagctttaaacaacacgaaaagataaaaatgtacaggttatttggtatattcgcaatattaacactactttgcatatcatctacatcaggtcatgacataaattaccagtttacgtctatttccgtagcggaaggattgtctcaatctaccgcccaatccatacttttagataagaaagggaaattatggataggaacaaaaaatggtctgaattcttatacgggacaaaatctgaaaatattcaaaagccaccccaacgacagatattccttaccaagcaatcacattatacatttaacccaagattcccttaacgacatatggatatctaccagacaaggtatggttagatatgatgagacacacgggaattttattcccttcaatcatgatatcatctattcttccttatgcataaatggaggagtacttttcggaagtgagaatcgaatatacaaatatgattaccaaaaacgctcttttaaagcagcagtatgcatcaaccccaaaggtgctacggacagtgacattaccaaatatagggtacaaagaattatagcagtttccccaaaggaggtgctaatcgtcaccagaagggatggaatatatatattgaattaccccaatatgcaattaaagcgttttttctcttgtccaaacaatattttacaaggagcatgtctggcttcaaacggatacatatatttatctttttggggacaaggcctgttttgttatgagaaaacaggaaaacttataaaacaatatacgagcaacaactccggattgacaaacaattatgtattggatataatagaaaagaaaggatatctatggttagcaactgatggcggaggaataaatcgactggaactacgcaatgaaaaattctctaacctctatcatattgccggagatgaaaattcactccctgtcaattctattactgtattatataaggatagcaacgaatgtttatgggcgggaagtgttagaggaggagttttcaatatcaaagaaagttacatacgtacttataaagactgtcctttaggatataataatggattgagcgaaaaatctgtgacgagtttttacgaggaagctaatggaaagttatggattggtacggacggaggcggaataaacttgtatgatcctcaaacgggaaacttcaagcacttctcgtctacctatggggataaagtgatttccatagccccagtatcagaaaaagaactaatgatatctgtttacacaaagggacttttcctgtttgaaaaaaacacaggcatttatcgaccgtttgtgataataaacgacagtattaacttcaggcagtgcttttacggatatcttccacgcgctcaccgagtgacagaaaacaaaatatatatacttagtaaggagctatgggtatataatataaataataaaaaattctctccaatcaaaaatgataacaattatcaattacaagcctcggtcatagcctactgcgacaaaaagatatccttggcaatgaatggaaacaaagtattccgaatcattaacaagaatgacagcattgatcttctttttcaattggacgagaaagaagttatcagtgcgattgattacgacggaataaataagatatgggtgggaacaacaacaggaatgggatattatgatataaaagagaaaagatattttaaaatcaggtcacagttattcaatgatattaccgccctccgttatgagccttcttcagaaaggatatggatctgtgcacaaaaccaactattttcttactgcataaaagaaaacagatttattcaatggaacagaagcgacggattttatcccaatgaaataatatttacttatcaacaacgggctgaaaaaaacagccgatatctttactttggtggcatagaaggactggtccgaataaacacagacatcccagagcctaatgaaccagatccggaaatagcactttacagcatagaacttaacgggcaaccgtatacatccggtatagacacccaaaatataaaagttccatgggaacataatgcactcgccctacgggtatatattaaaaataaagatattttccagcgagttccattccgatatatcataaaaggaaatgttgataagataatcgaatcatataatccgatattggatctttccaacctatctaccggtaaataccgcatcgaagtagcatgtatgacaaaagacggaaattataccactcctatccttctcacaaatgtccatattaccccaccatggtataaaacaggctggtttataatattatgttgtattagccttataggagggggtattgcaggaatattcatttttaatataaaaaaggaagcaagaatacaaaagagactaaaagaatacagacaatatctgaatgaaaagaggatagatttcctcattcacataaatcacgaattacgtactcccttaacattgatttatgccccactaaaacgtctcatggacaaaagtgagatgcaaggattacctcagcatctgataccacaattacaactactattcaaccaagcacaacacatgagggaaatagtagatatggtgttggactggagcagtttggaggcagactataataaattgaaaatacaaaaaactcaattgaacgaatgggtaaccgaggttatcaaagactatatgaatgaggcaaaagaaaaagagatatgcatacaattacaaatagatcccaacatagaggaggtatggtttgacaaacaaaagtgtcaaacagtactatcaaacttactgatgaatgcactaaaattcagtaaggcaaacagcaatataacagtaagcacgcaacgtcttgaaaacacagtcagaatatctgttatagacgaaggaagcggtatagaagattcggatatggcaaatctcttcactaaattccacaaaggtaatcacaaagagagaggaagtggattcggattatattatgccaaaacaataatggaaatgcacggggggcttataagggcctataataatacaaacaaaggagctacattctatttggagctgccattgctcaatacaaataaaaaagaagaatccgcccatttacagcaaaaaggctctcctctcccttccagcatccaagatacacatttcgattgtaccggaaagactgtgcttattgtagaggacgaaaaggagttaagggaatatctcataagttctttaactgagttctttaagaaagtttatgcggcagacaatgcagtctctgccttagaaatctgtcagaagaaacagccttctattattattagtgacgtgatgatgccgcaaatggatggttttgaattatgccgtcagataaaaaacaacatccagataagccatatccctgtaatactgttaacagcacgttatgaccagacagggataacaaccggatataaatccggagctgatgcttacatccccaaaccatttgatctagactctctaaagatcgtcatcggaaatattttaaaaaatagagagaaaatacacaatcaatacatatctatcaaccagtcgacttctctccagactttaacaaacagtaaagcagatgaggatttcatgacaaaaataaatataattatacatgaaaacctatctgacgaggaattctccgtccagcaattggcagatctcatgacaattagccgttcttctttatacaacaagataaaaattataacaggtttgggagtcaatgactatataaacagattacgtatcgaaaaagcgatctcactgcttaccaatacaaatttaaacataaatgaaataagcagtgaagtgggttttacttatccccgatattttagttcaacattcaaacaaatgaaaggaatgactcccaaacaatttagagaggagaatcgtatgaaataagtaggaagttcctgggaaacataacaagtatgaacgggtggatacaaagatataatttccttcttaataaaaaataaatgtcggaaccgtgcaatgggaatcatacgcaattgcctatatttgcgctattgaacaacaaatacaggtataattatggaacacaaagctgataaggactatgtggctatcatttcactccggaagttacctcaatactcaaaaagatctattgcttatttccaaagcagagggacggataataactctaagaatgacctgctaccatgtcaatagaaataaaatattttaaagatagaaaagagtggcgaaaaaggatataattgccagattgaaagaagataaaactgtatggaacaattatcaacttttttccgacacatataaacgcatccgaattgcctacattgaagcagcaaggaaacggcctgaagaatttgaaaagcgattaaacaactttatcaataaaacgagagaaaataaaagaataacaggattcggcgggattgaaaaatactattaatccctataaaatacctgactcaaaataaaaaacaattcctctttgataccgccccctaaaatgtgcagaaaaccgaattgaacaaataggacactcactctatccttaccaaatgataaagtgtcccccgataagactttcgggaaggaatactcagcttttgaagcgtgcatccgaattgtgccaccttattgatagctaacctgtcacgtgtctttgtctgcaaatagttcaatatctgcatggaagtcatccacttcccttcttccgcttcctcatccaacggactaggataacaatgaaataactgttccaacggactcaataagttcgcgcaaagtcataatgtgtcccgattttgtttccgttttcattttgtcgaacaatgtgcctgcctcacaaacactgagagtttcttttccactcccgctatcttgcctgataaaagtaatattcattctatttttgtctattttctacaatcggaatttattgttttaattcttgtaaagatacgctataagcttccggaaagcaggcatttctcctgattaatatccgcattttatttgtattacactcagatttgatgtatctttgcttaatagttaccagaagctcactagtgtgaacaaataagctatcagttgtaaacaaaaacgttaacaagtgtaagcaatcttattcacagcagtgagcccctgagaagcattaaggcttaacaaaacaaactctaagcattaacgtataactacctaagagaatacataacaagaacggttactttaaaacaaaacatgaaactatggcaatattatttgactggtatgaaaacccgaagccttcggacaaagaacaaggagaaaagacactgcacccacgtctaaaatataacggttcgataggaaccgacgtattgagccgacgcattcaagaacgttgttcgctgacagaaacggacgtcacagctgtactcgacgccctttcgcatatcatgggacaggaattggcaaacggacggcaagtacatctggacggtatcggttattttcgcccttgcctgaccagtacggaacccgtaacgatagataccaaacgaaaggctaccaaagtaaaattgaaagcgatccagtttcgtgccgatcagacattgaaaaatgaatttgggatactgaaagtaaaaagtctcaaaggcgggctcgacttctcccaactgacgaacgaagaaatagaccggaaactgacgaaatacttccaaacacacccattcatgcggagatgtgacttccaagacctctgcagaatgacaagaagcacggcaatgcgacatatccggcggctacgtgacgaaggaaaactgaaaaatgagggtggagtgatgcaaccgatttatgtaccaggaaacggttattatactaataataaacatgttacatattaaatagtgggaattagtaacctgagggtaaaaattaccctcaggttactccaacttaactctcatagccgcaaacaacgatgtataaagggattgaagctatctatgagagtatgagagtaaaatcatcactaacatctattgtatgcattttctttcaccgctattgttccatacaacatggttgacggacaatgcttacatacatcccctaaccccgcattcaacattttccagcattcggcgttttccggcacttgtccggcttcttccccgaaaagcttgtttgtaaagatcaccttcatcgtgtcataatcgctcacgaagatattggcattgatattccagtaccgattgtgacgccgggcagaatgttggagtttcctccaacccacacattgttgcccaatgtcacaggagaagtaaaaagatttccagaactgaaaagaaataagattgcccgtaaaacaatattttaccggcaaacgttttctttatagtatttttttaagttattttgcgcaacagatatcacgaaatcatcaaattatggattggattggccttgatttaacattccctattaccgaccctacatggatatttctccttgtacttctcattatactgtttgcccctattttattgaacaagttgcgcatcccgcatatcatcggtatgattctggcgggactggctgtgggtgaacatggattcaacattctggcacgcgacagcagtttcgaattattcggaaaagtgggactgtattatatcatgttcctggccggtctggaaatgaacatgggagatttcaaagagacacggaacaaggcgttagtcctggggctgctcgcttttattgtacctatcggaatcggattcgttgccaatgtgtcttatctgaaatatggtataattacatccgtactgctagccagtatgtatgcctcacataccctggtggcttaccccattgtcacccgtttcggggtgtcacgtcatcgtagcgtaagcattgcggtaggaggaacggcagtgacggacacactcacattattggtgttggctgtcataggcggtttgttcaaaggagagaccggtggtttcttctggttatggctggtagtaaaagtgattttcctgggtggactaattatctatttcttcccgcgtatcggccgctggttctttcaccgctacaatgaccatgtgatgcagttcattttcgtccttgccatggtctttcttggagcaggactcatggagttcgtaggaatggaaggaattttgggggctttcctcgcaggattggtactgaaccgactcattccacacgtttctccgttgatgaatcatctggagttcgtcgggaatgcgcttttcattccttactttcttatcggagtgggaatgttgatcaacctgcgtgttatcttcggacacggagatgccctgaaggtggccgccgtaatgattgtaatggcactgacgggcaagtggattgcctgctggctcacgcaaaagatatacaggatgtccgttctcgaacgaaacatgatgtacggattgagtaatgcacaggcggcagctacattggcggcggtattggtcggatataatattatcctgcccagcggcgaacgtctgttgaatgatgatgtactgaatgggacggttctgctgatcctcgttacttgcgtagtcagttccctgataaccgaacgggcggccaagaagctggccatggatgattcggaaacgggaaaagagtcttcgacggaaactgaaaagattttggtatctcttgccaatccagacaccattgaagacatgatgaacctttctttagtgatacgtgatacgaaactaaaggacaatcttctggcactgcacgttatcaacgacgacagcacttccgataacctgagaatgcgaagtaaacgctacttggaaaaagcggccatgacaacaacagcagccaatgtttcgctgaaacagctgacccgctatgacttgaatattgcttccggcatcatccactctgtgaaagagaatgaagtaacgagtatcatcaccgggctgcaccgcaaagcgaatatcactgattcatatttcggaatgcttgccggaaacctgctgaaaggattaaattgcgagattattatctccaaattcctgataccggtcaatacgataaagcgaatcgttattgccgtccctccgaaagcggaatatgaatccggctttccacgttggttggagcatttctgccgaatgggaagcacgctcggatgtcgtgtgcatttctttgcaaacgaacagacaaccgcccgcctgcaaacgtggataaagaaaagacataaacaggtactgacggatttctctcttttagaggactggaacgatttactggtactgacagggcaagtaagctacgaccatctgttagtcattatcagcgcccgtcccggaacgatttcttatgacaactcgtttgagaaattgccgagacaattaggaaaatatttctctaataatagcctgattgtgttatatcccaatcaatcgggtgaaccactggacagttctttcttctccaagctatacaccgatactgaaacccgacactatgagaaagtgggcaaatgggtttacaaatggttcaaaaagagttgataagcggtatattccgaccacaaatatatgccatttgaagaacaaggctattattgtaatctaatttatagtttgactacaataacagccttataccatcagtcttgcaccattaattttgtataatatcacccactaaaagaatatagccgagataggtattaaactcattgaaatattcagtttcctttattcgcttcggattcatcttgtagatttccgccttctcaaaacgtctattgtccggacgaataataattgtatgttcttcttcattcaaggactcaaacagacaataattagtacgattacgatctccgcaatatttatcaaacctacggatataggaaggatcattctgatctatctctactgtcattcctccggatgaaggtccgattaagtcaaacaccccaactcgaattcccttaaaatgcactttcacaaaatcttccgaatccgaggattccagaacaaccggcaatgctttttggtctccctgaaaatttgaaaaggctttatcatctttcgagagtagtttccaaccttcggaatgttcaaactctgttacgggaatcattttagctttctcataattacccggatacaacggagctttcaatgcatgtgccttttcctgcgccttgttcatttgtaacagggaacggctcagtgtctttgtatatataggatgtccgccatcataagtaggatgtgtcccatcattcgtaaacacaatcttaccactatactccttttttgaatctcctttaaaaaccaacttatcctcattcaacaattccagaacatcatcggcaaaattaacagacggaatatcataatagtctgctactgtctccatataccgcacagaacggtaattctttcctgctttcaagtcatccaacattggttcatttagcgtatagagaaaacatatatccgtatgcggattatgatgccagatcttacgcacaattccttccatggaatgagcgatcaccaaggagtcagttttggcatcattcacagcaaattcgacaaataccaaatccggatgatactgcaacacgtcccgttctgtacggaacacacccaaatcggatccggtcccaccaattccggaatttattgacgtaaactgtacattactatattgttgcttgagccaatcagtaatttgcactctatatccttgatgatttgttatacttccacccaaaaaaacgacagatacgggttcattcttttgtatcttataattaaaattaggaagtcctgcacgcatctgtaaccctacagagtcttctgttgtagtacaactcaaacaaaacccgataagacaagctataattccactaaataaaaatttcttcataagtataatgattaaaatgtaaacagtttatgctccaagttgaccggtgacttacctttgaacggaagctgtcccaacaatatccgtaataaagcagaatgagtggaagcatcattcgaataagtatttatataagtcttgacacgttcaaaatattcatttccaatgtaaggactacctaatgaaataacaatcactttacttttgtccatagaattggcagcccatacggactgagcctcatcgtcccataattggagcgggccaaatggagtatgagtattccgtgctaccagaaagattactttatcatacacttcagtcgcattatcctgccaaccttgatcttcataaagtatattacggcggaaatcaacctcaaaaccattcttcacaaactcatcccgcaaattctgtaatcgcttaaagtcacggtcgttacctttatgagctacgggagttacagccaccaataacagctttttatctttttccaaagaaagtggtaacttatgatcttcatcccgtactaaagttatggaacgctctgttatctctttggcagcttcccgtatttcagctttttcttctgctgagacaggacgtatcaactccctgtttttatttaataacccaaaacgttctttcattgcccaaacacggcgaacagcatcgtccaaccgttccattggaatttcaccacgttgaatccgtacttctaccgtatccatgtattcgtaagaaggccacaacaatatatctaccccggctaaaaagctggcaacttgcccttccaaatcatttttataccagccccggaaacctgccattgtcatcgcgtccgataccacaaccccgttaaaatgcatttcttttttcaataacccggttaatagctcatgggataaagttgccggaggcagataaccatttatcctttctttctgatagaaaggtaaagttatatgtccgggcatgatacatgcaactccttttttaatcaactcggcaaacacttttccatgatattgcttccacatttcttcagacaaggaattgacagttgtcatcaaatgctgatcacgataatcaaccccatctcccggaaaatgtttgattgtagcggcaacagagttatcttgcaccccctttatctgttcggacaacaaacaaaccgctttttccggattatccgaaactgaacgtgtatttacaataggattcaatggattcatatttaaatctgcaacaggatgtaacacccagtttatacccaacgaacgacattctaatgctacacttttaccatatttataagctaattccggagaatttgcggctcccagtgccatctctttcggaaaaggagtcatcccttgaagtcctactcccgattcataatcctgttgaaacaataaaggaagctctgatgctttttgatattcctcgacagaactacgcacaaaatcaacccgctcttcctccggaactcctgtaaacaacttccaccccataaaataacctgtaaccgggtaacgtttgaagtacacgtccaatgagccgtctcccaaatccaattctttcttgcgatcaggtaacattaacattgtctgccctatcttttcacgcaaagtcaaaagtttccaagtggaatctaccgactgaaattcataaacctcattaaccgaaccggctgtcactctttcttttgtacaagaaaagaacacggatacaagcaatgtagcagtaactattaaaaaagagtttttcataattcatttcactttgtttttcatgttacaaaaatagcactccttattttaatccattagaaatcatgtttcaatcttttccatacatgtatctttattcctactccggttacattactatcacacaggttacgtttttcgttttcagcctcgattttgtttgcgagttacttgcaaacaaattatatttgcttctactaaaaatatctatcaggacatgaaaaacattgcattcatcatttttcttctgttcatttccatttgcagagcgcaagacaacaacatattgtttcagaactataacgtaagcaacggactctcacaaaacaccgttatacgtagtttggaagacagtaacggagttatgtggttttgcacgcgggatgggctgaaccggtttgatggtaccgagttcgaagtttttcgcgccgacggtcagccgcactccctatccagcagtgatgttaccaccattattgaagaatcgcccggagttctatggatagggactcacagtggactgaatcgctacgatgtatcctcaaatacattcactcaatactttcatgatccggcgaaccagtatactatatcggacaattgcatcaaacacttgttgtgcgataaccaaaaaagaatctgggtaggcagcatgaaaggactcaatctgtataataaggaaactgatgattttatccccatttcaaccaacggttctgtcttctggcttatgcaaaacagtcaaaatgaaatctgctatcttatcaacaacacattgtgcatcatgaatcctgtcacctatgttacagagcgttttcaattcggtgatgaacataaaatctactttttatatgaagacaatgataaacgcctgtgggtaggtatgtgggattcaggacttaaatggtttgaccgtaaaaaccgtaaacttgtagatgccaacctgacaatggaaaatggcaaaaatttcaataactcccaagtcaactacattgtagaaacgttggaaggaaatcttatgcttgccacacgtgaaggagtgctgatttatgaccggcaagcaaacaggcttatcaattattaccaacgggaacaaagctgcggtttgagtgaaaataccatcatctctctatatagggataaagcaaataatatatggatcggaacttacggaggaggtgttaatttgtacacaccatacagtaatttctttattcctcataaaccagaatataagctccagaaaagtatcggaaacattaatgccatagtggaatataaagagaaactttggttaggcacggacggtggtttaatcatctacaatcccaaagacgaaagttatgagtactgcccgcttcatgttccacgctcggtaacaaacaatgaagtaaagtatatacagaaagaaggagatcatcttttatggattagtatttattattgcggactatatctctatgatatggaaacccgccgcataataaaagaaatacccgattttccttataatcaagtaagacgtattgccaaaggtactgataatatttattggattgctttaggagtagacagccccatactacgttaccacatggagaacaaccaattggaagagtcttttccagtaaagggtcgtgccacagaactttctatcatcaatgtacaagatttaaaagctataggaccttatatatggatggggactcgtgcagccggtctatatcgctatcacacacagactcatgaattaaaacattttggtagtgaagaaaaaagtccggaacaattcctgccaagcaatcatgtcagtacgctgtatactgatgcatcggaaaatttatggataggaacttatggcggaggcataggattatataataatatcaaagaaagtttcacgatatataatgaagagaacggtcttcccaataatgctatcaacagtattgtggccgataataacggtaaattatgggtttctactttaaaaggcatgtcatgttttgaccccaaatcagagactttcactaactgggataataaaaatggatattctttgctggaaaccaatttacacgcttgcctgaaaagttcatccaacattttttatgtcggtggaaataatcatttcctttcatttaatccccaattaattagacgaaatacatttatacctcccgtatatattacaaaaatgagaatttgggcagattatctggaagataataaagctacccaatgggtaaatatctcaaatcagagaatcaaattaagatacaaccaaacctcattcacaatcaaattctccgcacttagttatgtgtttgcctccaacaataaattttcctatatgcttgaaggatttgataagggttggtcggaaccgacacacgaacggagtgttaactatactaatatcccgccgggtaagtatgtttttaaagtaagagcttgcaataatgacgatatatggagcaatggaaatgcttcattatcaattacagtcactcctcctctatggaaaacatggtatgcgtatttgttctatctagcattcactattagcatgattatgctgttcatacgttataaaacccgggaagcacaactgaaaatggatcttcagttaaaacagatggagaaacagaatattgaaatcagtcacaatatgggtgtacagatgttcaccaatttctcacatgagctacgtactccgctcactttaatcatagctccgctcacagacctgttgcataaagaagatatgcctccggcatatcgccaaccattggagctgatcaaccgtaattcccaacgtttattatggctggtaaaccgtttaatggactttcacaagctggaagccgggaaaatgcaacttcacgtcagcaattacaatctaggtacttacatacctgaaatcatcaaactatttatgcctgttgccgaaaagaaaaacatatctatcgaatttaatgatacgacctcctcaacagacacttggtttgatgccattctattggaaaaggttttctttaacctgctctccaactctttaaagcatactcccaacggtggatatattatcatctcaagtatggaaaccaatactgaagatattcagaagcctgaaaatttggacctccccgcaggaaagattcttttgattaaagtagaagatagcggctccggaatccctgccaatatgatgccccgtatattcgaagctttcttccaggcaggtgagaaagtgttgggaagcggaattgggctgaatctgacaaaaagtatcattgagctccatggcggacgtatttggatagataataaagaagggcatggaatgaccgtgtctttcaccctcccattaggtaaagacagttataccgaaaaccaactacttagcaaagacaagatagtaaaatccacccatacttattctgatgtagaagcacttattgcaacagatgtcaatccctgcgagatatctcagactaatacttcacccaaggaaatgactctgctcataatagaagacaatgaggatgtacgtaattacctggtatcattgctcagcaaatactataatatctatactgccgtaaattgtaaagaaggctatgaaatagaacaaaaacaaatacctgatttggtgattagtgacattatgactccatatatggacggtattgagtttacaagattatctaaaaacaatatggtaacttcacatattccgatcatattgctcacagcccgtgtcacttcatcgcaagtgcgcgaaggctatgaatcgttagctgacgattatatcatgaaaccattcgatccggaattgttggttgtacgtgttgccaacctgttgactaatcggaaaaaactcgcagaacgatatggaacggaaatggtatcaatcaacagagagccacagaaagctaaagaaacttctgtttatagtgccatggaagaaaagtttatgaaaaaagtaatggaaataataaacaaaaacatagaaaaccctgcctactccattgatcagttcagtgaagaaatcggtatgagccgcgtacaggtatatcgcaagatcaaagccgtaacaggtatgtcgcccagtaaactcatccttgacatacggttaaaaacttcactagatatgcttcaaaacacagaatatacagtgaccgaagtttcttatcgatgcggttttaatgaaatatcttatttcggaaaatgcttcaaaacagaatacggcttatctccttccgaatatataaagaagtacaggaaataacagagttattatcaaaaagaagtgccgctatgtcttacgatagcggcacttcttttttagaacctcaccttcttttaaggttgctgataagatcctgaatacaaatattcaatggaaggcaacggtacatacatagtactgtaaggcggattcattgcaggaatcggatccccatcagtattcggattatcataaacagctcccggatttctcttttgcccatcaattgtcttctgcatagctactaaataaagcaagcggtctccattctcaaaaccaaactctttgattctttctttttctatatctgcttcagttacattcttcaaaggagtcaatccggcacgttgacgaatcttattcacatctcctaaagcttgagatacattcttagacaggactaaggtcgcacgcgtcagatatgcttccgccaaacgaatcaacggtacttgggaatacttcccatacggagcccgataatacttatcattccaaaaagcattccattttgtcttgttatatgccatttcatgtatggttttatctcctccatccgtatagtttttcaggaaataatgcagttgagtaaatctcttatcagccaaggcttctgcactcggaacataattcgtcaaatccataggatcatctgttaccgcccagccaatatacttaattaaacgaggattccagtaagcacaagcccaaccaccatgttgccaattctgactgccacgcgctccttccaaccataatttattactagcatcaaatgtctttgacttgaaattataaataccagttttacacatacgagctaacggaatagctacgttatttccctgattgctttcagtgaacgcacactcaaacataacttcctttgataccgggtctactgtatattgctgttcggcattccggttaaaagcaacaatcggttcttcagtcaaatcaaaaggtgctactccggcttccgctttagtaatcacataatcagcttcttccaatgctccgtctttatctcccattaaccattttacacgcatcaacatcatagcagctgaaaatttattggcacgaccacgcacaaaataatcttcaggcatcagacttttagctttagcaaaatcagacaacatctgatcatacacttctttcacagtccccatataaggattgcgtgcagactcttgtgaataatcaagcctattgattaacggaatgaacttacgattattcccctctccgcctgccgggtcgtaaggagcaacaaaagctcggctaatcagccaataggtataccctctcataaaatatagttctccggtctgacgtgccaacgtcttcttatcattttcagtcatattggcaaaaactggctctccttttttctccttctcctcaatataagtcaacggagaagtagctcctgttacagaacgatataatattgaaaaggtcttctcaaattgttgtcctgttacatcaaaggtagacatctgacgaggataccagtaaagtgcttcctgctcataagccccttgcggattaaccgtagacaaatctgccaccaattcctgataataagggataataccgataggtgcctgccagttaggattctgaaaaagagtattataaggatcagcaacagaatattccaaatcatcaaccgataaccaaggattagattccggacgatccagttcaaaaaatttatccatatcacaggaagcaagaagtgcaataccggataaggttatcattatattttttatcgctttcatactatcaaatatttaattaaaatttaaagttaatacctgcggagaatatacgggtctgcggcatttcactaccggagaatacagctccctgcgcattggcacctgtttggttctttactcttacttcagggtcatagccgttaaatgaagtaatggtgaaaaggttgacagctgagacatacactcttaaagcatcaatatttattttcgagcagattctttgtggaagtgtatatcctaaagtcaaattacgcaaacgtaaataagcacttttctccagatacttggtgtgaccggcatcatgttttatataagttacattttgcttgtcatttccattgtcatcataattatatttatcttgccaacgaagttgcggatactctgcaatatctcccggtttcttccatgagttctcataaatatcagcagtcacattattacgtccatctcctacaaatgattttgtatatctatgataattaaaggtataactacctaatgagagatagaacataaatgataaatcgaatgccttatatttaaagttatttgtccagcccatataaactttcggaagagccgttttaccttcttgaattatacgatgtttatttacgtttgattgagtagcgggaatcaatcttccggttttcactgtctcaccggtcttattgtaacggtcaagatctatttcataaatcatgccgatacctttctccggatcaactcctgcccattcagccataaaataagtacccaaagccagatctttcttcgtgatcgctcccggacgtgtattgatgataccggtcccttttgcatcaacactcgcatcaagtgctgtcactttattcatatttgtcgtcaaattatagttcatgttccattcaaagtctttcttgaccaaagtaacattaatgtcaaattcaaatccctgattatacatcgaaccaacatttgcccacatagaattattgtcagcattaccgccactattggtgataccggcagatgcgggtaattgcacacgcatcaacatgtcacttgtcgtacgacgataataagcaatagaaccatttactttattattgaacagcgcataatcaagtcccaagtcaatacttttgtttttctcccatttagctgctttattagcgatattccataagaacatattctgcatattattgtaatattgcttgctctttatactatacgaattcttcgtcacttccgaaggaatgttctgattacctgtttctccatagctgccacgtaacttcaacaatgaaataaaaccggcattacgcataaaagcctcatcagaaataatccaaccacctgatactgaatagaagtctccaaaacggttttctttcacaaacttagatgatccttcgcgtacaaaagatgctccaagtaaataacgttgcttgaacttatagtcgatacggttaaagaaactgaatgtgtaactctcaccacctatataagcactgttattccccagcattgtaccaataatcttgggttcctggaactcaccactcaagttcttaccggcaacaacagcattatccgtataactcctatttgcttcaatacccgttacaatatccagaccatgatctgtccattcacggttatatttggcaaaagcatgatattgttgggacttagtcgttttcttgcttttattaccttggttaccatctacattgccagtattcgtaatcaagccggacaaccaataatcactttgcgccaatccatacccataacttgcatctgcacgaactgagagcccttttatccacttcaggttaacatccatatataatgttgtgcggaaactaaaattctcacctgtactcaactgataatcgttgtcaagagtagctgtcggatgaccatccgccatttgtggattccaataccctgtagggtcttccggatcatacactttgcgccacggaaacttatcagaaactaccgcccatttattcgtcgattttttacggtcgaacttcagaaaagactgagttcccaaagtcacaattcctttcttaaattcactattcaaacgtgcactgaccgcattcatgctaagccctttcaaactggactcatcagaacggtaattaacagacgcgtaagtcgttgagttctctcccccttggttcaaggccacgtttatatcatggaaatgtcccatacgagtcaccaaatcaacccaatccatatccgtattcatagcttcctcacgagttatcggagaagtccaattggaataatacggttcgataatatctttctgtgggtcaagcggatttaatcccacattagcacgagcctcatccattatattaaagtatgtcttcgtactggccagtcctaaatctgaattagtgataggagtaataccgccttcataatgaacgtcgaatttaagtcctcccttttttcccttcttcgttgtaacaatgatcacaccgttcgcacctcgggaaccataaattgcagttgcagcagcatctttcaatacttctattgattcaatatcattggagttcaccatcgtagaacctccgcctacaataccgtcaaccacccaaagcggatcactccccgatgcaatagaaccgataccgcgaatctttatctgtggagtactacccggcataccgtcattcacaacttgtacaccggaagccagcccctgcaaagaattctcaaaacgcccaccttgcatcagcgacatttcatcacttttaattttagaaacagaccctatcatatcacggcgtttcttagttccataggcaatcaccaccacatcatcaatcaccacagagttttctgtcaatgtaacatcgataacccgacgttttcccggaacaatttcctgattatcaaaccccatataactaaatcgaagaggagaagagtctttctgaacaacaatactataccgaccattcatatcagtaacagtaccattcgttgtaccttgttctaaaaccgaaacacctacaagaggctctcctttggggtcaactaccttaccagtaattgttgcattctgtccccaaacagacaacgtcggtaaaataagtccaatcatcagcaccaacaggaaccgagatcgtaatccaatacgtgtaaatgaattcataataattaaaaatttaataaaggttacttagtgttgtttaactacggatgcaaaattaggcattagacagcacggcaattaatactcatgcttcaaaatatatgagaataacatcttcataacaacactggttacatttatataatacatgttacatgatacgcaaattcgaatgatttatgtcagtctcaaccgtcatgtttttcatattttctgcaatgatataaaatacttcgaataactcatgaaacaaatctcatatattttgaaatgccattattaaaaagattggctaaatcacggtacttttgcacttgttctattttcaacaatcaatataatacaatgaaacatttactgatcttattattagcctgtactttttcctttcccagccgggggcaaagtattatccagctttccccactccaaggagagaggggcatacaagcagccatcgaaaaagcatctatgaacggaagctccattttacttcatgacggagactatatccttcataaaagcatagatataaaaaactgcaagaaagggataataataaaaggtaaaaatccgggaaaggtacagttgcggtgtgataaacccttgaaaggaaaactgagacctgtcaaagatactcaaacaaaaaacagagttcacccgaatgctcaaggtattattatggagatagacttatcggaaataggtatcaatgttcctttttttcccgatttaatgaaagagcgtaagaactttccacaactcatttacaacaatgagctactccctctttcgcgttaccccaacaaaggttatctatatatgaaaagggtattggacaatttcggaacaaacgaacaaggaggtacttttgaatatagtgatccggaacacggcaaatgggtgaatgccatcaaaaacggtctatggtttacaggatactggcgtatcccctggcaggcctggactgtacgtataaaggaaatagacccgaacaaacaaactgtcactcacagcgtagggatagaaacaaaggaaggaaaagatgtaggcatatttggcggcatcggttccaaatatcatcgtccgtacggttcgggaaaagaagaatattatgtagagaatcttctcgaagaaatagatcatccgggagaatggtgcattgattttacaactcaaaaaatatatcttttccctcccgaacatttcgatgaaaacttattgagtattgtatcagacactaccccattgattaacattataaattcaaatcatataaaaatagaaaatatctccttcaaaaatcatttaggcgatggcgtcatcataaaaaatgccacagaatgtctgattgccggatgtaacttcaaaaatatattaggagacgcattaatcattcagggaggaaaacaaaatagaatacaaagcaacaactttgaatatatcggtcgcacctgtattgaggtatcaggaggtgaccgaaaaaatctgattgcttgcaaacacttaatagagaacaattattttacccgttttggtgagatacagcgcagttatgctcctgctgtaaaactgggaacctttactacaggaatcggcataaaagaaggcaatgcagtgggaattaccgtccggcacaatatggtacacaacgctccccatgcagcctttatctatggaggaaacaacaacatcctagaatataatgaagtgttcgacatagctcgggtcacaggtgatgtcggagccttttatagtcgttgggactggacttcacgaggcaacgtcttacgccacaattttattcatcattcaccacgagctaatgcattgtatgcagatgatggacatgcgggggactcaatttataaaaacatagtccatcaagtcgtttccggtaccattataggtggaggtcactgcaattacgttcacgataatctatattttgattgtagtgcagcaggcataagtattgatgcccgtggaaaaaaacgaaattataatgcacaaaatcctgaattcacccatttgttcgatgttttccggattaacaaaggcaactgggacaacatctacccaggcataagtacatttttacagaccgaccatctggaattacccattaataacagcatagcagataacacatttatcaactgccgttgcggattacgaaaagaagggaaagatgaagattttcaatattcatacttcggcagtaatacagacttggttattcccaacttaaatttccgggaaatatctattctaaaaagtctgaaaaatattctgggagttagctctataacagaataccaattagagaaatgcggactatatatagataaatatcgcacttccttaccggatagagtacaattaatcaattctataaaacaacaacaaaagggttttgattctatcgaagatcaacaagttactaataacaatcaataatattatcatgagaaaacacctatttccagtccttttgctagcgaacacactgtggagttgcctgtttgctcaaactcctattgttatggatatggttcatcataatccgggtgaacctttcacaaacacatggttcaatgaacctgggaatttagtgcaatatggttttaacgcgcaagtagttaatgaatttcaatctgtacatacagccataacatatagcagtttagacccgagaatatgtcctaccggttctaaagaacgtttatggatcgattctgttgccacccgtatagaaaacaagattgaagctatccataaagccggattggaagcatattactttactgatatcatcgtacttcccaaacgcctggtggaaatttataaaaatgaaatttgtgacgcgacaggacgaattgacttcactcgccccaaaacacaagagatacaccgaatcatgcttcaagaaatatttaaacgtttcccgaaacttgacggtctggttattcgcgtaggagaaacttacttgcaaaatactccttaccacacaggtaatggccccatacccagaaacgaaaaatcatgggaacataattctgcttataaaaccgatggaggagaaaaaatacacagtaacctaataaatctgctgagagaagaagtatgcatacgtcaaaataaaaaaatcttctatcgcacatgggatttcggttacttccatatcaatccccaatattacctttccgtaacaaacaacgttgaacctcaccccaatctatatctatgcataaaacacgtacagggggattatcaccgaacgtataaattcaaccctacattaggaataggtaagcacaaacaaattgtagaaattgaatgtcaacgcgaatatgaaggcaaaggagcatacccgaactatattgcagacggtgtacttaatggatttgaagaattaaaatcagattcccagccttactgtttgaaccagttaaaatcaaatcccaattttgccggtatttggacatggtcaagaggaggaggctggagaggtccctatatcaaaaatgaattatggtgtgacataaacgttgcaatattggccaattgggcaaaccggatgtcgttaccggaaaaggaattatttaagaaatacgccatagccaacggattcaaaggaaaagacatcgaacgttttcatcgtctttctcttttgtctgctgacgcgattgtcagaggaagagcatctttaattctccccatcaatgtatggtggacgagagatcaattcatcggaggagagaaagaactgagacagaatctcaaaactattatagaacaaggactaactcataaaatcatactagaaaaatcccaaagtgttgctatctggaaagagattgtagcattagccgataaaatacaaacaggcaatccggaactaagacgttacttacaaacttccgccaagtacggattacttttatattcaatctatgaacagggttggatcatcatgctcaaaggctacgaaggagatatgaacggtcaatatgacacaaaaagtattcgcaaagccatcgataattatgaccggttatggaaagaatacaaactattcggagagactcatccggattgtgccacactttatgagccttatagttttgactttaacaaacctccattgtatcacgatttaaaacaaggactaaatcctactgtagataaatacagaattacagataaaccataaaaaataagaaaatatgaagaagacatttctaaccgtgctgttattctatattttcacaggaatagcagtagcacaaaacctgtcaaaaacaacagaatacaaaatcttattgacaggagcctcattcgcttctccgcaaaacggttggttcgaaatcggttgtcgcaaactgaatgccgaagccataaaccgggccataggtggagaagccatagccaatacagcaaaccgaatggccaatggtaccctctactctaaagaagaactggaaaatattgatgcattagtcattatgcaagtacacaataaagatgtttatgaagaacttcaactgaaagataaatacacggattatgaagtaccatttgatcgcagcaattacgcggcagcctatgattatgtcatcaaacgttacctcacggaatgctatgaattacgtaacgatactacatccaaatactataatactccttatggtaaacctgcaattattgtattatgtacacactggcatgattgtcgcaccgtttacaatgaaagtatcagaaaactcgccgctaaatggggatttcctttaattgaatttgataaatatatcggattctcaaaaaatgtattacatcctgtcacaggaaaacctttcagccaattatattccacggatattcaagttacagaaggcatagcttatggacatcatcccatacggggagaacaatcatatatgcaacaacgaatggcagctatttttgtagattcgatgaacagaattttacctataaagtactaagtatgaaaagaactattatatataccctctttctcctgtctttcgtttgtcaacaggcgaatgcgacacatattgttcaaaatcaatatgattcctcattgaaccaatcggaacatatgtcttggtggacacatgacaggtttggtctgtttatccactggggactttacgctatgcctgctcgccacgaatgggtaaaaagcagagaaaaaatgtccgatgaacattacaaccgttacaaaaacttatttaatcccgatttgtataatccggaagaatgggcgtatatggcaaaagcagccggagttaaatatatggttttcacgactaagcatcatgatggtttttgtatgtgggacagtaaatatacggactataaaataaccaatacaccttataaaaaggatatcttaaaaccgttagttaatgcttttcgtaacgaaggtatacgtatcggattttattattcgctattggattggcatcatcccgatttcaccattgaccgtaaccacccccaaatgccacaaaaccccgaactcttgaaagaattaaataagaaccgtaatatggcaaaatacagggaatatatgaaaaaccaattaaccgaattgctcactgaatttggacaaattgatgaacttttcatggattatacgtatgctgaaggagagaatggaaagaatagtaaagactgggatgcagaaggtattgtcaaattagcacgaaaattgcaaccacagattattataaacaaccgcctcggactaacagaaaatagacaaggctgggattacatcactccagaacaattcatgccacaacagtggcccacagtaaacagccaacgagttccttgggaaacctgtcaaacattctccggctcatggggttaccatcgtgatgaatacagttggaaaagtgtacatcaactaattgttatgttagccgaaactgtcagtaagggtggaaatctattactaaacgtcgggccaacagcaagaggtgtttttgacgaacgtgctatagaacgtttaaacggcctggcacattggatgcgttttcatagtagcgccatttatggatgtactgccgcaccaactgaatatgcttgtcccaacaattgtattctcacatataaccccaatactaaccgactgtatatacacgtgttagaatggccattcaaatccttatatctaaaacaatataaaggaaaaatcaaatatgctcaattattgaatgacaattcagaactcaaatttcggactgaaaccaaaaaaggaagccatatgaccgaaaacacaggagctgacgatgttatcatcactttacctgtagaacgcccaaatgtcgagttaccggttatagaacttatattggagtagtcaacagcaacggaaaattccaactagatgttgaacttctgatcgaaaaacatgagctgaagtttgattacactattcaatcgcttcaaataaagataagtcactatttcgattccataacttatgaattgcttttcctgatatgcaatgaagcggaacaagtcctctttgccggctatctaaagaattatacctgaaatctcccatgacgaaataacaatcctcttttataacgataggaccaaaattatcatgagaagcaattcgtttacctttttcctcaatagccttattattaatatatacgatcccatctttaagctgtattgtgtctttcggcatccctataattcgtttaacgtataactgcgtttcattttcatcccacttgaatataacaacgtccatacgctgcggagaagagtatccccacacacgatgatacccccaatttgtttttttatcagctttggctacggctggtatcagacagagtaaattgagtacaggtgtttctacaattcgctgaggcattaaagccccgtatgtaattttcgagttccaaaccagacttcttgcacttatcgtaggaaacatactatcagacggaatatatacccattcgccaatgaataccttaaccaaaagcaatataagtaacatacaagtccccagtttggctaacgtctgaaatttgatacgtttcatttcaattcctcagtagataaagactgtaaagcaacaccatgtgtctgaacccatctcgccatgaacgcaaatgtggtctgcgtttccgaccatcgggatagagagtcaccgggatttcacaaatacgcatctgatgaatagaagccaaggcaacaagctcagaagcaaactccataccattacactgcgggttaataatgttatagcattttttcgtgaaagctctcagaccacaatggaagtctccaatattattcttaaataaaaaacgccccaaggacgacaagaacggattgccgacatagcgatgaagccatggcatagcccctttcgtgattccacctgcaaagcggtttcccattaccatatcataaccagcctgtaatcgttcgataaataatgataattcaagaaagttataactatcatcagcatcacccataatgatatatttcccattgcaatgttcgatgccatgtctcaaagcactgccatatcctttctgacttacctgtatcacatccgcccgattattcttagcaacgagagcggaattgtctgtactaccgttatcggcgactataatttcataagttaatccggtgtttgaaaaaaattgatggattttccggatacatatgcctaatgtcttttcttcattgaggcaaggcaaaatgatagaatattcaatgtctgtgcttttcatggtgttagtattttatatattgcaaaatcttgattacaaaatacttgttgaaaacggttctggttcaatctgatcaccccatgagggtattgaagataggaaccacgatacagaaactcgacataccaattgacgttggcaggaagattggatacctctcccgaaatattgcaggaaagacgattcgtatataaatagatagagcggctttctccgcaggctatccaatcgtcctgagcggtattcgtacggaggaaggcgtacatttcttgagcactctcgccttccacgttcggatttatggtagtataaatctgtatgggtgaggtcgcatattttattgaaactttccaaacagaacagattagtatgccaataattggatagagaacccattttcccgctttcttgccccacaccatacacataaatcggaatccttgaatgaagaatatgaaacataatggaaaaagagaaagccaataccttattacatcataaggccaacagattaagagcattatggtagaaaccagataaaccgactctgccgttaatttccggctacttatgtataagccgagcaagcaattcacccaaaagaaaagattgaagagtgaaaaaggaatatataagatctgagcgggatattcgtaaaatgtttggatgttgtggagtaggtttgtcagagtcactaccttaaagtgctcaaaatgttctgtatatcccgaaggaaaaacaagagtaaagacaaaccaaatgcatagagcagatgcataaggaaggaaaaatctccatcctaataatctgtttttccattgaagtacgattaaggaaataaataagaagtatccttccgtacgaatctgtgccgtgaaaaaaagaagaatacctaagccgatgtatagtatagttcgcttttcggtctgctccttcaatacatagagtttgttcattgtccaaaaggagaacatgaggaagcagaaaaagggaagttcgctgctgacggagttaacatacccccaatagaatatgttgcctgtcagcaaagctaaaacgagtaggacggacattctgaaacgctctttcgagagaatagggtgataatagagaaagatgaaagcccctaccagacagataactcctacaattttgaaggcaaaatagttgatgccaaacaatgccacacacggaaatagtagcagaggatatccccacgggtaaagtataggtgaatagcgctgataagtagaatgggctatcatctcctgcatgtccgaaaacacttgctgcatatctccgtattgtatgctttgtgcctgtcggatataaagtgcaaagtcaccgttgaatatatgccccgacactattaattgcacggctccccatagggtgccgcacaataatagcataaaacatagttcagtaatatgttttttcaggaactgcatgagtcattatttgcatctaatagacagaactatagagctttctcttctacaaatttaaagtcatatcccggttcgttgtcttccttcgtcaaaggagtaatctttccctctacaatcatagattccgaagatcccaaattggggagttgaacgagtttataccccgctgccgcttcctttataagttcaagatacttgtctgtacaaataatcagtgtattttccggattgtataacatcggagttttctgcaataattcttccaaccgaataagtgctttgagattagcctttggacttattgagatagtatggatataagccggtttccatatttcttttaaactctcagcttttataagcgattttttatcagatgtgcaaataacaaccttagtcatatttgttatctgaggatcaggctcttgcgaataggcaaaacccaatgtcatgcaaaacaagcataacaataaaattcttttcttcataattctaaatttttaattggtttgaaaatatcgttgacttatgtttttaagataattgtttgccaaatcaggaacagctttgtcgggtatgaaagcatgtaaaattgtcatgtcacttgataacaaaaagcaatatggaaaaccttcttcttccaatgggagagataaatttccattttctatatcaaatacagtagaaggcaatttcatgtttttctctaaatatctacgagctgttgacgattggtagcttccaataagcaaaatattctcgtcaagatttaattctttagataaacaccctattttttgaagtatgaaattgacgcaatcactgcaatataattcgttgactcttactactaacacttcttttctccctttcatatattcctcaagcggaattgtgacaccattgtattcttttaataagatatttggcattttcattccattcaccgaaaaagcaatttgagaatttacccatagtgccatttctttttgtccggtaatggatttatcagcaatctgttcctgacaatacgtctttagggccctatacttctttaaagtaatcatattgacacctagtaataatagtgctaatatgccaacaatatatatgttgatattctttttcatcctgttacatttaaatagatttaatatgtaagaggaataagacagggttactatcttctgttagtccatcatacaattgcattaatttgctatcgttaattaatggcgaattatatattttctccttcatacgcataacagtactagccgattgcggaataagaaaagtttccttgtcataacaaactatgggtgtatttcctggagaatgtgcaaaaaataaaggattgtaatatctgccattacacttataagtctttttcgttttatgagaataaataacgaaaggagaccaagtgaatccatttttgctaaaatagaacaatgcatagtcctctaatataacatagtctgccatatgaacttttgttccgactatttttatatatgtatcactgttcatgtcctctggtctttctggatatccaccattagttatatttattctatatttctcgtaacaacgatctttctctatcttataaatattatgcgtccatggctcttttaaataaatgtcatttccaaaactacgtaaaggatgcattccattgtttaagtgaaatacctcgttataaaaacttgggaattctctataaagtagtttgaaatctttgtcataaacagatagcatttgccgttgagaatcatcgtccataccagcttctataaacccagcaataaaatcattattaatcaattcaatatcatttgcataaaagctaggagatacatcttttatatgcttcccattcaaatcgtaataatgaagacgattccagtcatacaaaactatttgtttttgatcgcttgttagacacattttgcataaacgcgagtattcaccaggaccttgtcctacttttccgattctccgaacgaaattgccgtgtttatcaaagcaatatacagcatttgcaacaaaaacatccattatgaaaatatactcattagagcaaagtatctgatgtatgtttcctattaaacagtcgctgtttgtttccaatttgatgtatgatatatcatcgatcaagctgtcgaaagcataggattcttctccatccggatcaacatttatttgaataagagttgaatcggaaataatatgctcgcctgttgaaactttattttggggtgtctgacagccaatgtttatgaagagaatgattactgtaacaatgttacaacaaagtgtgaacaattttgataatgacttatagtttatcatacaatatatatttaaaaaaattatatactaagtccatagcattaggaatccatgaacttagcatttttaatcattactgacggcaaggatcagtaatactacaaacttcaacgtaatttgtggctggaccacagtaatactttttagcattaaattcttgtactacagtttcagtagtggttgttgatgaaccagatgaagagtttgagccccatgaatgatcacctccaatagaaccacctatgattccattacctgcactaataccaccattgatattagtatcggttctagtacccgttgtgacagatgaagaactcgaggtggtggttgtttttgtgcatttcacatctgtctctaattgttttcccatgttagttgtagttccggatgtcgtccccgtctgcgccatcacctgcggatgcagtgatatctccattactccgaactcattaagcgcgtcatgcacgtttaaaatagttcctaccattagtaaagccattccggctaatactacgattttgttctttttcattgtttctcgtgtttaaaattaatactaaggttagtttctcttttctttaaaacttctttaaagtgctctttcaaagtatctgagttcttccatgcaggagcatagctggcggtgtaaacgcataggtatgaacaatataggaatccggcatatagaatccactttctttggcgttcgtatagatgatatgacaatatggaaagcccaattgcaaacgcaatatacggtatatacagatagcggtcagctacaacaacgtagcggggtagcggaatcacatgaagcaccggcaacagatgtaatatgaaaaacagcgtgcaaaagaccaataatggctttctgcggttcaggtatatcacatatcctatgaataggataacaaatgggtatatccataaagccatgggtatcttttcgcctacctgaaaggggaaaggataaagataggaaagcttgaaaggaatagccgaaatcaagagatacttaaacactgaatagcaaaggcatataaaacgatctactatcgtatatcctatgatttcttctcctgtatctttgttggccacaagggtaactataaagatggcaatagcaggaatgagataatatactttttcgatatacactttcaaggaacgcatatttcttttgaacagcatccagtcgaacagcaacaagcatggaactataataacggactgttctttgcagcccatagccaatatactactgaccacactcgctagaagatactgccatttactattgcgcatatattgtatgtagcatatcagtgccgacaaatagaaaaaagtgctaagcactatcttcgacgcactaatccagcaaacggtttctacctgaaccgggtgtatggcaaataacagtgcggtgaagaaggatatacccaatgcctttttagaatcaaaatgatttcttataaaagaataggccaataagtacactaaacaggcattgaatatatgaaacagcaaattacctatatgaaaggctaaactactgtagccgaagcatagatgaataagcgtgtagtataattgattgattggggagtattgaccgttactaatactgtggaatatagtctgcaaattcttcaatgatatcccgtcgttcgtcatcgaattaatcacttgccactgatcatcccaatacaattgaaattcgtgcgaaaatatactataatatatcaatacagcaacaactgcaataacactccaatgtgagacaatcgttttggcaaatgttgatgtattcatagcattaagtaatatatttgttattgtgagacaaaaatagtctggattataatatcatgcaattattggaggaggacaaaatgtgtaaattatccatacgttcattttgttgattatctgtattttaatccttatttatcttctttgaattgagatttaggtagacagatagtagaatttcttctcctaatttcaacttgttttttatcctgtttctataccttttgattgtatttgtctcaataatcaggactttcgcttgttcagagatggcgattcctatataagtaaggtaacaaaccttcatctcttgagaggttaggccaaaggaagaaactatatggctaatatctccatataatatattgatagcatcgtaaagcaacagccagtcttcctctttcttgatgtgattatatcgatgtttcttcaaaagcaacaatgactctaaaccaactgtcaataataattctttttcagttaattcatttttaagagataactgcgatccgagtttagctttcagctctcgattacgctggattaagtttaggttctgttcatctttgtatttcagcctctcctttaattcagatactgttttttctaactgaatatcatccttttttagtttatccattttcatgacgagtgttttttatttgtatccagatttaatgcttctctataatataaatacaccgcaggagcgtctgtccccacacccctaggtatattttaacatttcgttccttttgatatgcggaaggccttaagtaaaattttacataaggccttccgcatatcaaaaggaactttgaaaacactccccatattccactttaccgagcagcgtatcgaagtcttctgctggttcatcgcctataaaacagcagaagacagattaaaataacaaaacgctttcaccggtatccaaccattccgacatcaaacgatagtatgccggatattcggccggagttatcaattgctttttcagtttcaaggtacggacaatctttatctcctttgccgcttttttcactgtaactcctacggtacctaccggattatcaatcttcttatcagtcggcagcactaccggcctcatcccgtcagcaactttcacaatacaagtataagtttcatcaggtaaatatctcaataacagattaaccgggcgagtcgtatttacaactgttgaacgtccttcataagcagcccagccattccgcgcctgtggcagttcaaatttccggtaacctgcttccaaagcttttccggcttctgccgtcactcgtaatgtgtcggtttgcgaaataacatgggaaactccttccaaagtcaccggccgggcgtccatgttgacaacagatacaaaatcctgtatatcggcaatagcattatcagcaacaaacagtctgctgacagcagcgagtcctgccgcatccttatcttctgttttaggaaagacagcctttacttcggcctgaatgccgcttgcctgttgcaaagcagccagcaaagccgctttctccgcttccgttccataagccgaacgaatcacttcggcaaccggacgcaaacgatacccggtttgtgacaatgacaaacggcagtttcctaatccttgcacgtaagcagtgagttgtttcgttttttgctccggactttgtgtattggcagtcagcctctttgccagttcagaaacttctttgtcgttactttcaaattgccgtttaatcactttcaacgcatcggcttttgaagcatacgtagaagccacaatagcctgtacgttacctgccggcaaagaaacagcaagcatactaggacgaggttgcatattcttcaacgcccaggtcacagtctttacaccacccgctgttttcaccaccggaacagcttttccattcaataactcataatgcaaaggtttgttttcgggtaccgataccgaaagcacatactccctgataggagataattcctctatctgctcgcacacatccagttcgggaagataccccggacgggtaataaccgagtaatccagataaatagtagctcccagctccaatccggtatggactacaaccatttctttcagaccattatatgccggagcatcggctgcagcagaaggaagtacctcaacaaacgcgttttcgggcgtcttaacgatattgccatctttctgacgggtatacgattcgtgaatcttcaattcctgaaactccggattgtaaacaataaaactttcgccatacagacgattcattgccgtatgggtaaacaatgtcagttccttttgtacacgcatctcctggctaccgtcagtatgcaagatgtacgttttgtgcaatttcccgaattcggcttcggataccgcttttgccggagctaccataaataagagtaccaccagcgtaactatataataatgtatatttttcattctgctctactttttaatcactaaatattcaccatacgctttgtgcgcattcacagcattacggaaactatcccaatcagcagcctcataaacacgtttcttcaaagccagtttgttgtgaagcagcactttgtttccttgctgcgccaatgaaccctcaaaatcggctcccgtaccttgcattgtctcattcttgtcggcattcgccagcttgtatcctgccggaagttgaatcgtttcatccagttcaaccaaacgcgaacatccatctttaaaaccatacttacgctctttcagtgaagtatcgatacgcaaataagagcgtacctgattataaaggttattcatcaccaacggacggaagaacatctccttctcacctttcaatgcatagtccggtatttcataacggaaagtgattttaataggtgctgcctgatagtctttaggattcttgccgtagtctacgctcagcaatttagctttgggagatatggctaaaagctggctttccattgtatttttccattcgctccggaatccggtagtaaagatacggcggatattactgtcactctgcccctcggcggtaagagtgaaagtaccgcgcaaagtaccgtctgcatccaagcggttatcggctttgatacgcacataatgattttcgggagctgaaaccggagtgatacacaaatcagaaccttcgggcacacccggcagatagttctgctgctgttcggcactgctccatagttcgcgacagaaaggaacccaggtaggatcgagtggcatgtatgttccgttgctcaacttcaccactgccacacagtgattaaaatggtcggcaggaatgctttccacacggctacccgccattgtcatagccggataggcttcgaaaccggccatgcgcaggaaagaaatcagtgtacccgctatgtctttacagactccgcaacggtcggtatagttcatcttggtattgtgaagtgtaaagccctctccttttcccatggatataccggcataacggatattatcagccacccaatgagtcagcacggcaatcttttccatttcggtcttcttgccttttatcagttcatccacttttttctgcgcttcgggcagtggggcaaaactaccatagtcttcattcactttgttgaaccacaaagatttgtctttccattgaggagtggaagacatcatcaatttgggagctgcatcgaaaagatccaccatattcggctctctgccgaaaggcattacattatccatggcaaaagtgtataccttgctattattttcataacgcatggacgaagcacattccccctgatagaactggaattgcagttctttctccataggaacagctactttataaactttacgcacggtgggggcagcgctccagaaaggaacaatatcataaaattgcccgcgcataggcgggataaaacgagaatcgtcttcatcaccggctccaagcaacgcataagtgaaccccttcttggctatctcataatccacaacatcaccgggttgcaaagtgccgatttcgagcattatttgtctcgctccccagtaaatagcccgggcaggagcagcataatcacaggttttctttacatccagttcgtcaaccttgccattggcacgatagacggttacacgcttaaactcggcataggcggtcagagggtcataatcgtatttaattacccggttagccactgcccctctcggagtctgtactttaatcactttacacacagcaaacgagccttgcccggtaggttggacagataccaacgtgctatccagcaatgtcacgtaatcggatgtttcataagtctttcccttcgcagtattttcataagatttccagctttgagcgagcgccgtagccgaagaaagaaggaaacaagctaatgtaactgatagttgttttctcatgttttttacttacattttatttataggaacaaatgtaagtaaaatctttgagtatgcgaagtttatctccgatattacttatcgcgtcatgtgtaatcagggcgttcgccgaatatcacatccagcagaaacagaaattaactcgtgcgtagtgtattcccctgaatctttcccaatattttgggaaattgccaaaagaacaacaacgtacaacatatcgccgctgtcgcgtcggatatagcttcagccgcatatacacctgtcactcccataaaatgcggcaatatcaatgccagcggaatcaacagtattgccttacgcaacaaagcaatgaaaatagaaatccgagcctgtcctaacgctacaaacatattctggcaggcacgctgcaatccgaaaatagtcataccgcccaaaaatacaggcatcgtccaacggactgtttcaatcagtctttcgtcactcgtaaacgcggaagctaccgttgaaggaaacagaatcatgaaaagcattaataacagattgaaagagaacatggttatcagcacaatacggaagcattcttttacacgctgcttatcgccgtgcccatagttatagcttattatcggaacaaatccctgtgcgaatccggtcagtggtacactggcaaactgcatcgcactctgcagaattgtcaatgcactgatgtagatgtctccgaactctttcaggctgctattaagcacaaacccgaccaagctctccgtgctcgccataatgaacggagaaactcccaaagccaatatggaaaggattatttttctgtccagtttcatataaggtttctccaaaggcagagaggcgcgtttggaaaaaaggaaagtcagtacccaggccgcactgcaagcctgtgaaagcactgtggccaaagctgctcctttcacgcccatattaaacccaaagatgaagatagggtcaaggataatattcagcaaagcaccgatcagaacggaaaacatagcaatggcaggacgcccttgtgcattaataaagctgttcagtcctgtcgatatttctacaaatatagtacccagcagataaatggaaagataatccacggcatactccaatgtattcgccgaagctcccgtgaaaaggagaatgggttccataaatgtatatgcgataaaagacgtaagcaaggtaaataatatcagaaggacgaaaccatttcccaatattttaccggcacgcaaacgatctccctgcccgagcgcaatggcagctaacggcgcaccaccgccaccgacaatcgcagaaaaagaggaaatcaaaataatgagggaagtagtcactccgacaccggcaagcgcatcggttccgatgcccggaatatgtccgatatatacacgatcgacaatgctataaagcagattgacgaactgcgcagctactgcgggaagtgccattttaaagatgagcggcaacatacgttccgtccccagccgttcttcgtatttatttatcattctacgcttctttttcttaaattggctgcaaagttacaagaaaaacaagcttcccggtttaaagtagaaggataaaatactttttgcactctatcgattcttttttgtattcaaaatgagctaaaatatctgcccgagaagctgtaccataaagctgaaaagtatagcatcgatctaccacccgcaacagatattatgtggctgtcggcatagctacggaaagttattcctactcactaagaagtacaaagccataagtttcttggcgtttccatagttagaaacttcagtttcaacgcttagaaactttagtttccatacgcagaaactctagtttccctatagagaaactccagtttccagccttgaaaaccgagtttcaacgtttggaaacattttctcatccatagacttatgtctattataactgtttaataagttttttctgataagcaatacgttctgttccgttcttcacataaataatgccgcagcgctgaaagccgtattttgtcagaatatgctgcatcactttattgtcctgatgtgtatcgacacgaatattgccccattgttcaaaacaccagttcaggcaggcatctgatactcctttccgtttaccgtttgttgctaaacggtggatcacgccatacggttcgtcattgagccagttcccttcataaatatgctggtaggtaggatcttcacctaaaataaaacaaaaagttcccaagatttccccctgaccgtccatacagacaaagctatggccgtcttctatttcctgacgaatcaacgcttcggacggatagccgccaatccattgagttacatttccgtttgtacgcataaaggcacgggcataatcatatatctccatgactctaggaagatcttttagttcggtagctctgattttcatcacttaaaaaagttatttaaaagaatacgataagtcagcaatagaattattcgttgattgctccgcaatgggggcagacacctttttctttcaacttctccccgcaatgcccgcaacaatatttataacgactattccaatatactttctttacaaaaacaagaataaaaaggatgaggaataaataacctatgtatatatgcgccattaaaataaagaagaaatagcagaatatacaacaggacatcagtcccagcagataaaagattgccgctgcgggggtcaactgccggaataaatcgtcaagcactgccagggagactatcacgaacagccagatactcaacaaaaagactgaaagaataaaaggaactttaaaaggcgacaaagtaggattgaaatagaaatgctcccatgtgtccggcacaaacacctgcattgattcataaaccgttgcactgaaggccattagcagacacaggaataacggataaacactgtcaatatcattgaaatacaccatttgcaactgcttccgacggaaggcacgaagcagatagacaccgacaaaaagtgcaaagataaccacaaaataggaggcgtgcgtatcactaaacaaatgaatggcctgagaaatactatccgtagggacaaaagatcgtttcaactccacctcgcgtatccacccctgttcatcctgcgtatgtgccagcttcacccaaacgctatctacactatcggcaggatgtacggcaaactcggccactaccacacgatctccccgataaagatttatgtacgtatccttgataggcaggcactccagcaaaatggaatctgccgttaactccagattcgtattccatgtatagtgccgttcataaaggtaattcaaagagtccttcgttttctgcggcatttcttcggaagaaagattggggcgggcataatggcaggacgaaagaaaaaacaagcacaacagcaaactcaccacagaggacacggaggatacagagaaaagtgtctccttccacaagccattccaacaggcagttacaaaagaaagggcagaagctccatatcctctgtgtcgtctgtaacgaatcattctgcggtggttcattctcattgcgctgcttttactttcatttgacaattcttgcaatcgaactcaagacggaaccgctttccgtcattcgacaccaggaaatagggttctctataaggcgaccgcacgcgttgatgaatgggacaccaacccatactataccgcaaacaatgtttgcagaacatcagtaccgcatcttccacccgttctttttcataagccccggcaatctgttgtacgccatgttcctgataaaaagaggcggcacgggtattcatcacatttcccaaatacgtcaatgcggtttgcggaaaagcatggttggtcggtttccatacggcgcgttcctgatgataattaatccggcgggcagctatcagtttttccactgcctgacgacggaaatctgccaatacggaagacggcaggaaccagttatctgcaaaggagatttctatcttctccgcttcgaaaggcgtattgcccagtttggcaagctgagtcctcaaatgatccgtttgcggcgtccgtgccagttccttttcacggggaagagaaagtgtcacactattatcatcttcatctgtcagtgtcagagaaaagccgaagttattatcggccagtaatatacttacggacagctttctttcggccgacttacgggaaagtatgcgttcaaattcctggtcaaagttacggtaaagtctggtgcgcggcttgatttgcggcatttcctgcggatagagcttgttgccgtcgacacgattgatacggaagccctgcaaacgcccttgctcgtcaatatagcagacaccgtcgccgttattgaatgatttcaatccggcaacagtcagatagtttccacgtgcctctttcatcgtgcccatttcttctcccaaagatttcggtgtatcgaaagagaagatttccttatcacggccatgcagaaaataatgggtaaatccccgactgaaactcttgtcgagttgcggccggaagtcaaagcggcaagtccctgaagaggcccgtacatattcctgacgacgggcaaagatagcatccagtttctgccgataagcagccgtgacgttcttcacgtaagatacatctttcaaccgaccttctatcttaaatgaggaagctcccgcatccaacaactgttccaactcatcactctggttcaagtcttttaatgagagcaggtgtttatccttgaccatcactttcccgtctgaatctaccagactgaaaggcaaacggcaaaactgcgcacactccccccggttggcgctacgcccgaaacaagcctggctgacatagcactgcccgctataactgacacaaagcgccccatgtacaaatacttccaaaggaacttccgggcaagtatcatgtatcttttttatctcacgcaacgataattcccgagccagaaccacctgacggaaaccggcctccttcaaaaacttaaccttctccggcgtgcgattatccatttgcgtactggcatgaagcggtatcggcggaagattcaactgcgtaatccccatatcctgcacaatcaatgcatccacacctatccggtacaaagcatgaatcatctcttccgtctcctgcaattcttcttctttcagaatcgtattgacagtaacataaatgcgggcattatacaaatgggcatgttttaccagtgcttcaatatcttccaaagagtttacagccgctgcacgggcaccgaatttgggtgcaccgatatatacggcgtccgccccatgatttatggcttcaattccgcactccaagttttttgcgggagccagaagttctatcttacgctgctttatcattcaatatcattaatgttgtaaggcgtttcctgataaacaaaatagttcagccagttggagaacaacaagttggcatgagcacgccaacgtaccaaggggcctttatcgggatcatcgtctacgtaataattacgaggtatttctattggcaagcctttatcccgatcacgacggtattcggtatccagtgtcagcggagaatactccgaatgtccggtcacgaaaaattcacgtccgccgcgagccattaccatatatacgcctgcatctttcgattcggaaagcaaagtcagctccggaactttcagaatatcttctctcctcacctctgtatgacggctatgcggcacatagaagcaatcgtcgaaaccacggaagatagaatggtaaggttgtagtacccggtgctcgaaaataccgaacatcttcttctccaacggatatttgggcacaccgtaatgatgatacaatccggcttgcgcagcccaacatatatataaggtggatgtgatgtgcgtacgtgcccaatcaaagatttcggtaatctcatcccaataagtcacctcctcgaaatccatctgttccacaggagcaccggtaataatcataccatcgtacttctcgtgacgcatctggtcgaaatcggtatagaacgttttcatgtgctctatcggcgtattcttggaggtatggctcttgatcttcataaaggagatctctacctgaagaggtgtattcgaaagcagccgcaccaagtctgtttctgtcgtaatcttcaacggcatcaggttcagaactacaatcctcaacggacggatgtcctgttgcgtagcacgggaagtgtcaatcacgaaaatattttcttccttcaatagctctatcgcagggagtttgtcgggtaaatttaaaggcataatcgctatatattagtaatttggctgcaaaaatacgaaaaatatagcagatattagggatgttgcttatttagaagacgtacaaattaagtcaatttaatcatagaagcataacaactaatcaataaaagccttatttttgccggagaaattagtactaataatttaaatcttagaaaaatggcttacgtaattagtgacgattgtattgcttgcggaacttgtatcgacgagtgtccggtagaagctatctctgaaggtgatatctattctatcaacccggatgtatgtactgactgtggtacttgtgcagatgtttgtccgtctgaagcaattcacccggctgaataatacaatctacaaaaagtataggctgctttccacggaaggcggccttttttattttccggcaccggatgatttacgaaataattaaataaacagggcgcgaattacataatgcaaatcgcgcccttatctttttaagctatgagtcttatttcaacttagccaacgcttctttaatacggcgaatagcttctacaatgttttcgtcacttgtagcatagctcatacggatacattcaggagcaccgaatgaagtaccgcctacacaagccacgtgagcatcttcaagcaagtacattgccaagtcgtccgaattttcaatcttacgttcaccgttgctctttccaaagaagtagctacatttcgggaacaggtaaaaagcaccttgcggcacgttcacttcaaatcccggaacttccttagccaacttcacaatcaggtcacgacgacgttcgaaagctttctgcatttctttcaccggttcctgcgtacctgtataggctgcctcagctgctttttgagatacggaacaaggacctgaagtgtattgtccctgcaacttattgcaagcttttacaatccattccggaccggcgatgaaacctattctccagcctgtcatggcataagccttggatacaccgttcacaatcactgtacgttccttcatttccgggaactgtgcaatgctctggtgtgcaccgatataattgatatgttcgtaaatctcgtcagcaagcactatcacctgaggatgttttgccaatacagcagccagtcctgccaattcttccttactatatacagaccctgtcggattcgacggagagcaaagaatcaatgcctttgtcttcggagtaatagcagcttccaattgttccggtgtaattttgaaatcctgttcgatgccggcagaaacaatcacgggagtaccttccgccagtttcaccatttcaggataactcacccaataaggagccggcacaattacttcgtcacccggattaaccagtacgaggattgcgttacaaactgattgttttgcaccattcgcacatgaaatctgagcagctgtatattccagaccgttctcttttttcagtttctcaacaatagcattgcgcaaagccggataacccggtaccggagaataacgagaaaagttatcatcaacggcttttttagcagcttccttgatgtggtcaggagtattgaaatccggttctcctacacttaagttaataacatcaacgccttgtgccttaagctcattgctcttttgcgacatggcaagcgtcgccgagggcgacaagctgttcaaacgatctgataattgattcattttgtatctattttattgttgttgagtgaaattcgctgcaaaataagcgattatatttgatatatgaaaacgaaatggcaatttacttattaaaatgtaatgtatgccccattctttctttctttgttctcaagtatcgttcattatacgggttaggaactgtttcaacaggtacattttctactatttccaatccataggcttccagccctacacgtttcaccggattatttgtcaaaagtctcatcttatgtacccccagttcgcgaagaatctgcgcacctactccataatcgcgctcatcagcaaggtgtcccaagcaaatattagcgtcaacggtatccatgccgtcttcttgaagtttataagctttcatcttttccattaaaccgataccacgaccttcctggttcagataaacaacgacaccttttccttctttttcaatcatctccattgctttatgcaactgctcaccacaatcacagcgctgtgaaccgagaatatctccggtagcacaggacgaatggacacgcaccaagatcggttcatcttcattccatgtacctttaaatatagccatgtgttccaatccgttcgatttctgacggaaagggatcagacggaacgctccgtgttcggtaggcatatttacttctacccctttttctacaattgattcctgcttcagacggtagactatcaggtcgtgaatagaaatcagtttcaatccgtgttcgtccgccattgcgcgaagttcgggaagacgggccattgtgccgtcatcgctcatgatttccattagagcacctgccggataaaggccggccaaacgtgccatgtcaaccgttgcctctgtatgtccggcacggcgaagtactcctttttcctgtgcgtacaacggattgatatgtccgggacgtccgaaagtggccggtgtagaagcaggatcagccaatgcctgaatcgtagcggcacggtcagcagcagacactcccgttgaacagccttccaacttatcaatcgtaaccgtaaaaggagttcccaatacagaagtattgtcgctcacctgatgcggcaaatccagttccttgcaacgggatactgtgacaggtgcgcaaagtactccacgtgcgtgtttcaacataaagttaactttctcgggagttattttttcagcggcaataatcaggtcaccctcattttcgcggtcttcatcatctactactataacaaacttgccttctttgaagtcagcaatcgcatcttctattctatccattttaatttcttccataacactcttatttattaattttctgtatgatgaattgaacttgttcattgttttttataatccgttccatgtctttatccagacgaatacggaatgcccagatacggaaatagaaaaatagcccgacaggaaaaataatcccggctaccaaattcagccaatagatatggaacggacgtatatgagcagaaacgggaatgaccggataattgtttaatgctcctatcaaagtggccgacttagtgttagacatttcttccaccaatacctccagtttttcattgatagccattacctcatcatccttctcagtagacatccacaatttgaagtaattcggtgcttttgtcaaacgatttttggtaatatatgccctacactctgctgtgagcgattccaaatcaccagggatacgctcataatcaggatcatttataataacttctttcttaaatagatgacgtacactgcggattcccaaaacctttttaaaccagttaacatacgcatcggcattcaacaccacagaatccttattggatttataagtcagaaagatgcctaatggagcaagcacggcactacttgtccacatccccatccacacgatccatttaccgtcacgtgccattttatatcccgtattgtcaatgatataataaatgataaataccaataccgatacaatgacaggcattcccaagcctcccttacgaataatacctcccaacggagccccgataaagaagaacaacagacaagaaagggaaatcgttatcttcttatgccactccgtcttatgtttccggatagcgtagtcattagtctccatcgtatagctcttgaaagtcaaatcgctagccatgttttccgcacggctaacagcggaagatatcaccttttgtttttgcattaaaggcgacacttcataaagactatccacattgtattcctgaatatccgccttttctattttggcggtgtcttcttttgtcaatccgtaagacgcacggaaatttccttcggccacttccttataatactgtcttccgatactatctcctagtactttcatagagtcaatggaactttgcaattgcgccatatccttagcactggattgccgccccatgatatcaccgtcaaccatattaaaatcggagtcaaactcaataattgtgtgcttctccctgaacgactcacggcggtaaggcacattctgagatttcatactctgtgctttcaaattctcgaataagtctccgctatatagatgcaaccaaagatgctgtttgtccgcagtcatttccagacgtccggaatctgcataaataacacgtgctttctcaaacccttctttcagatcatagataagcacatcatacaacatacccgttttccggtttttcttggcaattttcagattataatcgggaatttcggaatagaaaactccttccggaatatccaattccggagatttttgtttcatagaaagaatcagggttcccagtttggcttgggcaatgggacctaccacattctgaaaatagaaagaaacgcccaccaaaccacagacaaaaaagacaagcggacgcataattttgagcagggaaatacccgcagccttcattgcgagtaactcgtatcgttcgccgaagttaccgaaagtaatcaaagaagccagtagcaccgccaacggcaacgatactggcactaatgtcaatgcggaataaaagaagaactgagccattacgctcatctccaatccctttccgaccaattcgtccacatatctccacaggaactgcatcataaaaatgaacagacaaatgaagaatgtgcccacaaagagcatcatgaagctctttacgatgaatatatctaatttctttatgcgtagcatcttaataggttcgtgcatttaagacgcaaaattagcacaaaaaaaggagcatcgaaaatttttagttgaaagttaactaaaaaccacaagttcttctcaatttagccacttgcgactcccacaattctttcatatcatccacttcatccggctccgcaaaatcagtgatttctaatacgtagtcacttgtcaactcattataagtcatcttaatttcaaagtaatcgcgctcgttctcgtcatcctcccaacggaagcggataaaagagaaagaacgtattgccgtaatttcagcctttctctgttcagtctttccccaatgaaactctacaatcttatcatcggatatcactttgtctgcaaaccagtcctccaacccggtaggtgtactaatggctgcccaaagaatatttttagatgtcgcattcagcaaatactccaaatgaattttttcctttttcatagcaatttcgaattgtttttacgtgtgccaagataaatacttttttctaaatacatggcataaatcctacactttatttaattattctttcattttcaagtctcaaactccctgtttatagagaaaattaaaaaccttcttaaagaaaaaacacaaaaaagttgtgatttgttttggagtttatagaaaaacatctatctttgcacccgcaatcgagaaacgatggcgggatagctcagctggttagagcgcatgattcataatcatgaggtccccggttcaatcccgggtcccgctacttgataagaataaggcatttgggaggcttccacttctgggtgcctttttctttttcagctccggtttgcgctagcgtcaaatacaatgtaacatggttctataaattttatcgggccagtttaagtaggaaaatatataaagtactatttatatcgcttctttacatacaaagtaatacgtttatatgccaaagcgatgtgttcattcaccgtactttcacttatggataataattctgctatctctctgttttttaacttatccgacagtactagcctaaatacttctttacatttaggaggtaatgaatttatagcttcctgaataagcaactcatattcattatcttccataagactttcaggatcattactttcaggtattaactccacttcatataaagaaacatacgttttatcaggagagtaatttcggcgaagataatgaagtgcctgatttttggtagatgtatataagtattgctcaatagttttgatatgccctaaagattcccttttcttccaaacagtcgtaaatacatccagcacagcctcctcagccggttcctttgcttgtaaatagtaataagccacatgatacaatctttgcgaatattgttcaaacaattgccgcaaagcattttcatcaccggtgatgatcttatttagtaaaccttccggattcatttcattttacatattttagatagactttagggtttaaatatacattgctcccgtatacgcttggcaaatgtaggaatatataaaaaataatcaagtataaacccgtagtttttatttgttgctgtcatctatatataaaaacagcacaatgaaagaagattataacataaaagaccctaaggttgatgatttaattaatcgtcttcgcttcaaactaccggagtatgacactatttcgaactacaaacgactacaagaacggattaacactccggtaatatcgttaagtaagaatatctctccggcatggaagtggttttccattgctgcctcttttgctcttttggttgtttcagcctttcactttattgacttaagccgtccggaattagtatggtatgaagtcgcagcagttccggatgcaaaaacaaagattgtacttccggatagcagtactgtatggcttaatgccaatgcccgccttgtttacccccgttcttttgaggatgtaaacaggaaagtcagtatttcgggagaagcttttttccaagttcgcaaagacaagaatcatccctttattgtagatattgggaaattgcaggtcgaagtattgggaacctcttttaatgtaatgacagatacatacaatgatgaaataagaatatccttacttgaaggaaaagtggctttatatgaaaaagggcaatcttctaaatctgccaaaattcttatgcccaaccaagaagctaaatattcaccgtcaaatggtgaaattatgatttctcctatccgcatggacaatgtcatgtcatggattacagggaaatttagctttgaggataacactttggctgaaatcggagaagaattagagcgggcatttcacgttaagatacatattgaaaacgaggctatacgcaaaaagacttttaatgcaacgtttgaagataaagaaactctggacgaaatactctctattctccagatttcagcaaaatataaaatggagaaaaaacgcggagaaatctatatttattaattgtaaaaccctataaaataatactatgaacagctcttgaaccctaaaaaacatttgggaatgcgccaacatccccaaacgtaatcgttaaccggcagcccactacaactgccaagtatcaaatatttaatatacaaaaatatgaataataaattatttattagccataaaaacacccatttaagattctataactttattctttctaccaagaaaagttattccgtattcttaataagttgcatctgctttttcttttcaactaatccgctgatagcacaatctgtctcgttgaatttcaacaacgcgtcatacgaacagatctttaatacgattgagcaaaaaaccggatataaatttgtttataacacacaagaaatcaacaaacacagtttacgctctatcactataaaagacaaaaacatcgaaactgtattaaatgaactctttaaaaatacagatatatcttatcgtatatccaataaacatatcgctctgttcaaacaagtaaccagaaaaataacggggacggtaactgatcagactggcgaacctattatcggagcaaatgttcttgtgaaaggagccaaaaccggagtcattacagatttcgagggtaaatttacgttgtcggtaaccgacaatagcatactaatcatatcatacttggggtatgttactcaaaacgtctcagtaaaaggtcagacacattttaaaatcacattgaaagaagacacacaaagtctggatgaggtagttgtggtaggttatggcgttcaaaagaaacgcgaccttaccggagccatatcctcagtgaaaatgtctgacactcctataggtacattctccacaactgctcatgcattagcaggtaaagcagccggtttacaggtaactcaaagcagtgcccaagtgggtggtggagccaagttccgcattcgtggtgaaacttcaatcaatgccggaaacgatcccctgttcatcattgacggttttccggtttctgcctcttcaacactcgactcggagaagaatttttataaaacaggtacagttgacaacatattatcgtctatcaaccccaatgacatagagtcgattgaagtattgaaagacgccagtgcaacagctatctacggctcacgtgcaggacatggcgttattatcattactactaaaagaggtaaaaccggaaaagccaaagtaacctattccggcaatctctctgtgcaaaccattaagaacaactataaaatgttgaatgggaaacaatacagaatacatagaaatatgtacctttatgaaaaatggttgaaagagaccgggcaaggcatatatgccgattatataaccgacacttcttcgaaaacttatactcccagatatacagatgaagaaattgcaaccgcccaaaccacagactggctggacgaggtaacccgtaccggaatgcagcaatctcacaatgtttcattgacaggcggttctgagaaaacacaatatgcagcctctctaaactattttacacaaaaaggggtggtaaaaaacaatgcaatggaccggttcacaatgaaagtcaatctggatcaggaactatcaaaatatatcaaaacaggtttctcccttcatttaagtcgcaaccaatatgacaactcatcattgggagacaatgattttgaaaacgcaggtattatttcgtcagctttgcgcttcgaccccagtgtccccgtccgtgatgaaaatggcgattattcaatcttcccggatatggcacaataccccaatccgatatcgctgctcgaagttactgataaaacaacaagcgacagagttctggttaatggctatttacaagcagagccaataaaagggttgactttaaaagctaacctgggagttgaccgcagatatgataaaaacaaaagctatgtgcctaacactaccgtagccggagctgcaaaaggggggatagccaacatccttcaacgtgataatatagattatctcatggaactgacggcaaactatactaaagatttcgggaatcacagcctgacagcgctagtcggttattcttatcaacagtttaaccaagaaagcgtatatgccggcaacgaagacttctctacagatggatttctttacaacaatctgcaggccggagccggaactaagccttatgtaaactcctcagccaggaaaagtgctttaggctcatactttgccagagcaaactattcttatttaggaaagtatctactgacagttaccgttcgtgccgatggtgaatcaaacttccacccggactaccgttggggatatttcccttcagtgtctgccggctggaggttcagtgatgaagatttcatgaaacctttgtcaagcattctttctaatggtaaattgagagccagttacggacaaaccggtaattcaaacatagggaactatatgaccgactcttacggagtagtttccggctgggtattcggcaatgacggttatatgggtactgcaataaccaaaagaggaaacaaaaagttaacttgggaaactacaagtgaattcaacatcggtctggatctgggtttctttgataaccggatttcactatccatggaatattacaaccgaattatttctgatttgttggtaagtaataaaagtctgcccgcctataatgaaattaataccatagcagccaacatcggtaaaacccagggacgcgggtttgagctaacactgagtaccgtaaatatcatgaataaagactggacatggagtactgattttacgttctatacttttaaagacaactggtatgaacgagatcctaattggaagccagccgcatacgaatcaaaaaaagatccgatccgttcttactactcatatgtatctgatggcttgttacaagtaggtgaaaaagcaccggcatggcaacccactttagtacccggccaaattaaactgaagaatctatacgatacgggaacctcacctaatgtattagatcaatatgataaagtcaatcttggatcgcaagatcctaaatgcactttaggtcttaacaatacgcttagatacaaaaacctcgactttaatatttacttctatggcgaaattggccgcttacgcggagccagctattatgatgcctggatagtaggtcttggaaacagtctgacaaatgtatcacaacaatcattgcactcatacaccaatgcaaatcaaaatacaacggttccgaacctcattgagagtgcatacgatttcggagactattatcacaaaaagattaattacctgagatgtagaaacatcaccctcggatatacgattcctgtttccaaatcaatagctaacagcgtacgtatctctgcaaacgtcagcaatccgtttgtatttacaaactggaacggcgttgatcccgaaactgacacaggaaatttctcttatccaaacgtaacttcttttagtttcggtatagatatttcattctaataactgaaaaaacatgaaaatgaaaaaattaaatatatatatcattggacttttgactctcatgttgtgtgggatacaaagttgtgcgttagaatcagaggtattcgatgagatcaccccctcgatatacccccaaacagaacgtgatgtccgcgacctggttacgggaaatgcttattctccattccagaattacgattacggaggtttgtataatgtagctaatggagttatgcttatttcggacatggctaccgaatatggtttctgctcatggggcggatggatttgggaacctctggaatttgctcgttggacccccagtgacgaagatcgcattgcttatccttggacaaactacctgaaagggataagtaaaatgacacttaccatcgaccgaataacaaacgtaaacatgaataaagaccttttgaaccaatatatagcagagttacgttgtgcccgcggttttctggcctttttattatacgacctgtacggtcctattattgtagccgatctagagacgctcaagaatgcagaagatgaaataatccttccacgtttaagtgaagaggaaacacacaatttcatcgtcaccgagctgaccgaagctgcaaaagttttaccatatagttacgataaaagtagttcggattacggaagatttacaaaagggttatgccacatggtattacttaaattctatatgcaaacgaaacagtgggataaagctatcaccgaagctcgtgaattgcagaagcccgaatataaatacgcattggtgacagacaaaggggccgagaggtcagcttatgccaatatctttacatacgccaatgaaaagaactcggaaacaatctggtctgtaaactgtcttacaggttatcaggttcatttatggtatccccatgttatgccaagtaacctcaaggcatccgatgccggaagatttgatggtggctggggaggttataaaatgacatggaaattctttaaaacatacgaagatggagatgagcgtaaacaaactatcatctccgagtatgatacatgggaaggtactacccttaacgaaaccaacaagggagtgggaagtaactccttacaggacggtgtcattccattaaaatataaaatagaaagtaataatgcaggaaatcagtgtcagacagattggattgtataccgctatgccgatgtgttgactctattggcagaagccattgtcagagaaggaaatacagttacaacagaagccattaatttactgaatcaagtcagaacacgtgccggtttaactgcatatacagcttcttctttcagcagtgctcgtgatttccttgataaattattgatagaacgtgcacacgagttttatttcgaagggtgccgccgtcaggatcttatccgcgatggttcttatgtagcaaccatgaaacaaaaatgtaccgattacggacaagtgtctattataaacgaaaactatcatcgtttcccaataccggaatcagctattattgcgggacaagggattattaaacagaatccgggatattagtcatcacatatttttaaattaaaagaggaggtagtacatcaacactacttcaaagtggatattttgatgtacactcctcagctaatcatctaccatgaaatatattgttctttttcagcatctccagttgaagaacatagggctagtcttactatgctcctttatgttttccaacctgctatactcccaatcgacgagagaagtcatcaacttcgatcacggctggctattcaacagatacggtctacagcctgatggtaaacgaatagatgagccttttgggaatggcagtccggattctccatctcctaaagagttagcctttaatgacaaagactggaggaaattggatgtccctcacgactggggcattgaaggacctttcagggaaaatctggatggctatacaggtaagctaccttggcggggaatcggctggtatcgtaaacgcttcaacatcaaaaatatagataaagataaaatgttttttcttgattttgatggcgtgatggccaatgcagaggtatatcttaacggaaagaagataggagaacgtccctatggctacatttccttcagggtaaatcttacgccctatattcgctttgattcggaaaatatcattgcagtcagagtggatacggagaaactgggttctcgttggtatcccggagcaggtatttaccggcatgtcagattggtcaaaaccaacaagcttcatattccccaatggggtgtatttatttctacgcccgaaatcaatagccaatatgccaccgcatccgtgatggttcagttggctaatggaaagaaaaaaacggctagaagcagttacacaattgaaatattcaaattagataaagcaaacattccccgagaaagagttgcagtgggagctaaagagaatatcaaaattgcagcaaacgccatcgacagtagcttagtatctctgaaagtggagaaaccacaattatgggatttggaaaatacgaacctctatctagccaaggtatcagtatatgatagaaagacgttgacagatgtatacgatgtgccgttcggtttccggactttgaaattcacacataacaatggattcctgttaaatgggaaaagagttcaattgaagggagtatgtatgcatcatgatttaggtgcattaggtacagcaatcaacaagagtgccatagaacgccaaatcaacatattgaagagttttggcactaatgctatacgtacctctcacaacccacccgcacccgagttgttagaacttgctgacaaaatgggaatacttattctcgatgaagtatttgactgttgggctagtggtaaaaacgaaaatgactacgctgttcattattccgaatggcataaaaaggacattgaagcacttgtttgcagagacagaaatcatccttccgtcattatgtggagtttgggaaatgaagtagaagaacagtatcatcccgaaaaaggagtagtagcatatctcagggatattgtgcggctttacgactcaactcgccccgtcactttcggtgcctcatatcccagtaaaagtgctatcaatggtacagaactccaagtagatgtccatggcatgaactatccttcgggggtttatggcggtcctgatttttatgaaacatttctcaactatccggggcatgaacacttatcaggctttgccagtgaatccagttcaacaataagttcacgcggagtttattttccaaaaggttatcaaattacttcatatgacttgaaagcccccagttgggcatctcttgccgatgccgaatttgctgcattagacaaatatccggctatttgtggtgaatttgtctggacgggatttgactatctaggcgaaccgactcccttcaatagcgatatgagcgtcttactcaaccatgccgcgctcagtgaagaagaactggctaaagcaaaagaggaactaaagagaatagaaaaagagcgtccttcctctcgtagcagctattttggtattgtcgatctagcgggttttccaaaagatcgttattacttgtataaagcacattggatgcccgacgagcctatggcacatattctcccccattggaattttccggataggataggtaaaataactcctgtgtttgtgtattcttcgggcgatgaagttgaactctttctgaatggtgaatctttgggtaggaaaaagaaagaacagtatcaatatagattcaaatgggagaatgttatatacactcccggagaattaaaggccattgcctacaaaaatggcaaactctgggcaacagaaagcgtaagaaccacaggagaaccggctttgttacaagtctccgcctataaagacaagataaaagtagctgacaatgaactggcttttatcacagtctccatccgtgacaaaacaggaagtgttgtaccaacggccaatcataagattaaatgcaaattagaaggtgaaggtaagattgtagcaacggataatggtgatccaacttcactcatctctttttcagcgacagagcgcgaaacttttaacggattcatgttagttgttataaaggctcatcaaggagcaaaaggaaaactacgtctaattgtggaatccgagaatttgaaaagtgcctctgtggatattaacctattataaatcattcttatttgaacatcatgacaacaaaattattaaatataaaaacaagacttttcagatcattgaccaatttgggtatgatgattattttattttcttgcagttcgtcatctatcggagaagaaccgataaaccctcctgctcctcctgcttcatccgtagaaaagagtgagtattatgtttccacaaccggtaatgatgagaatcccggaacacttacatcaccctggcgtaccattcaaaaagctgtcaccacagttaccccgggatgtatagtaaatattatggggggaacatactatgaagaaataaaagtaactgtatccggaactgctgacaaatacatcgtaatcaaaaattataatgacgaggaagttattataagcggcgacaataaacccagagaactaatgaatctcaatggcgtgagttatataaaggtaaaagggttaaccttcgccgattgcttgggatcatattctgtgggaataaaaatatccactacatccgacgaggcttctcatcatattgagatagaatcgaatacaatcagaaacttatatgcaaatgccaccgcaacagtttatccgccgaatgtatatgccggaggaataacagtagccggctatctggactcaaaagccattcacgacattataataagagaaaacacagtaaaagactgtcggacaggttggacagaagccatttcagtaacaggaaacgtagatggttttctgattactaagaacgtagtgactaatacaggaaacatcggtatagatgcgtcagggcattggggtatttcgaaaaatcctaccactgatttcgccagaaacggagtcatctctgagaatcatgtttcatactgcaaaagtcctgttgagggaggtgcaggtatttatttggatggaagttcaaatatccttgttgagaaaaacatttcgcacaacaatgtttatggtattaccgtagggtgtgaaagggcaaacaattttgtaactaataatataatcagaaataacatctgttatcacaatgaagggtttggaatcggactaatgggctggtcccctgaaggcagaatcataaaaaactgccaagttgttaataacacaacctttggaaatgcgaaagacagattgggagaaatagccatatacagcacggaaaatactacgattaaaaacaatatattttattcaactcacgcaaactcaaatctattatatgtagatgatagtcacctcaatctcgatatgaattttaatcattattattccagttctcccgatgttaagttttactggaagggtaacatattttcaactttcgaacaatataaacagaacacaggctgtgatttagcttcggctttcagtaatcctttattcattgatacagaagtattcgattttcagttacaatccacatctccgtgtatagatacaggtgatcccgcctatacacccgcagagaatgaactggactttaatcataaccctaggaaagttggagcttgtattgataaaggcgcttatgaaaagcaataataaaaaagcggtttactaatatcaaacctcatacaacaaatcctccccgaaagttttcaataccaaccttcgaggaggattttatttcattcttttattcccattctatggtcgcattgggtttaggcgacatatcatagcaaacacgattcacattcttcacttctttcagaatacggtccgtgattttcatcagaacaggccagtcaatcggttcaatagtagcagtcatggcgtctactgtattgacagcgcgaatgataaccggccaatcgaaagaacgggcattatcacgtacaccaacagatttgaaatcgggcactaccgtgaaatattgccatacttttttatccaatccggcaatctggaattcctcacgcaggatagcgtcggattcacgcacggcttccagacggtcacgtgtaatagcacccaggcagcgtacacccaaaccgggaccggggaaaggctgacggtaaaccatttcataaggtaatcccagctccagaccacaggcacgaacttcatccttgaacagttgacgcaaaggctctacaagttggaatttgagatcttcgggcaacccacctacgttatgatgagatttcaccattttagccgtcttcgttccactttccacaatatccggataaatagtaccctggcctaagaagtcgataccgtccaacttgcgtgcttcttcttcaaatacacggataaactcgctaccgataatcttacgtttttgttccggatcttccacacctgccagtttatccagaaaacggtcggtcacatcaagataaataaggtttgccttcaactggttgctgaatacttcaacgacatcctcagactcccctttacgcatcaaaccatgattcacatgtacacacaccagattatcaccgattgctttcagaagcaaagcagcaacaacagaactatcaactccgccggacagagccaataataccttcttatcgcctacttgacgtttgattaattctatctgatcattgacgaaattcgtcatattccagttagcttcagctttgcaagtatcgaaaacgaaagccttcacagcattcttaatagcttcaatatcatctgtgaattcagctagcttcacttcgcaagccgctttgtcatggccggcagccataacgggaatccccattgcatagatagccggatttacatcaatagccacaccatcaatgacattgttcgggccgccattgataataatacccttcacgttaggtaatgctttcaattcttccactgtgatgtcgtgaggataaatctcactgtaaactcctaatgcacggatggcgcgagccaataccgtattctcatgactacccaagtcaaggataacaatcatgtcctgtttcatctgattctgtttttttttattatgttattgtcaatagtttctttagtttcaacttatccgcaaatataaatattttaaaagacaaaaacaagacactttgctttatgccttcagccgtatcacaaaccggcttcctttgcctaattcgctttccaccgtcagcgtaccgccatgagcttccacaaaatctctcgaaatagacagccccagcccgctaccttgcactttcgttccgggtacacggaaataacggtcaaagatacttttgtgataacgaggatcaatccctttaccaaaatcctgaacatacaactcaatgatattatcttcttgcttggcaccaatcactacacgaccgttttctttggaataacggatagcattactcaataagttagtcaatacccaagcaatcttttcactatcgacaaagagtttaccgatcttttcctccggatattccacttctatctgaatattaaacttatcggcttgtacttgattggccttgatagcatactctatcagttcaatcggtttggtgatcttgggcattaattgcagttttccggcttccacctgagtcatattgagcaattctccggtgataccaagcaagcgttcactattttccttgatgctctttgaaagttgctcctgttcatcattcaatgcaccgacacgcttatcctccaacagttgaagactcatcataatagcagcaatcggagttttcaactcatgagaaatagtagagataaatgtagtcttggcagagtccagttccttaaattccgtaatatttttcagcaaaatgacatctcccagtttacgaggttcatctttttccgcttctgtattaatgataggaacgtaggacgctttgaaatagctttctttattatcagcatatattttcaaaggttccttttgttcgcttggtgtcaccagttcacgaatcaaccgacggagcagatcattcttcaaagcaagttcttccgctgacttacgaatcacattttcacgcttcaaattcagcacattcaatgcctcctcattaataaacagaatctgccggtccatatttaaaccgatcaccggatcatctatgctgttcacaatcgcttcgataaatttcttggcggagagaatatccgaaagagtgctggcacgatattcggtcaaccgttccgccattcgattaaagctatcggcaacttcgcgaaattcctcattcttatccatattcaagcgcttttcgtaattatgatcggctatttcaagaatcccctctttcagttcttttatcggtttactaatgctccggggaagccaataaagcaacacaagtccggtcaggatacagatgctgccggtaatggaaatccatagtaacgcacgttccagtccgggcatagcagcagggctatccggttccgttgccgttagaatttgaagatttacaaccgaaagagttaccagcagaataatcattccggccaacattccaataccaagaatcagtttcgttttaatattcataacgttcatacgattaatattatgcaagtataatcaaatctacattagctcgtgacaaattattcaaaaactttcgatatcccagtatggaacagatagcatacggcaatttcaggtcagggctacccatacatacagtggatatctgcttctctttacaaatctccacaatgctccccagaatatctctagactgtacctgaacaacctcccctcccaactctgtcaccagtttaaaatgattcagcagataacgctgtctcgccagaccaattctatccatgctctctttcggtgtctgaacatacagggcgataaaagtagtattgtaccgggttgccaactttgccgccttcctgataattctccgcggtgttttctcgtgactgctgatacaagccataaacttttcatgtcttaacccgacagccactcccattacaacctcattctccaccttcttctccaccctcaatgctacttccttcaaagccaactcgcgcaattgcagaatattctcagttcgaaagaaattgtccaatgctgtctgaatcttttccggacgatatatctttccggctttcaaacgggcaatcaactcctctgccgtcaagtcaatattcaccacttcatccgcttcctgaagaacactgtcgggtacccgttctttcacttcgatacctgtaatctcctgtacttcttcgttcacactctcaatgtgttgaatattaattgccgaaatcacattgattccctcgtccagcaaagccattacatcctgccaacgcttttcgttcagactgccctccacattcgtgtgtgccaactcgtccacaatgacaatttccggatgaatacggataattgtatctaggtccatctcttccagttcttttcccttatagaaaatcttacgccgcgaaatgacagggagcccttgcagcatcgcctcggttccgacacgtccgtgagtttcaacatagccgatttgcacgtccactccattctccagcagttcatgtgcttcctgaagcatacgataagactttcccacaccggctatcataccgatatagattttaaacttaccccggtgggatctcttaatcagatccaggaaatgctgtacactttgttctctatcatccatctttatctgttttttaaaacattctaacccgtgacaatcatcacgatcatcacgggttcacacactaataattcatgagttaatttaatttatggttttaaagttacgccaaatactaaatgggcgtcctccatacgtggattccatatagcctgtacaaatataggtaatgaaaatctctcattaaaattcagcgctttcgttgctttcaaagcaaagttcgttactgcaaaaccattcacattatactgcggagtttcataaggaaccatgccacaagtagcattcaaatcaactcctttcacgctaaacggataattcaactccacatacgaagaatacacctgtttatcttcgcctttatcatttatctttctgtcggcacccgcaaacattgtataccacgcaatggacaaggggaatttttcaacaggaagcgtataagctaatcccgcttcaaaatgatgtcctgtatctccactcttgaaatggaaatagttaccggccccctgtccatcccaccaaagagtcgcaacagaaagcgccggtcctgtttcaccaaatttataagccgcagtcaggtctatttctttattactttcactcaaactagttgatccccatgcagtaagagaaaaattgcccgcgctgaatcctaaagtcggctggaaggaggctgcgccaccctgatagataccacgccatacatacgaacttacaaaatcaccttgtatggtaaactcctgtgccttcacactagttgctcccaacatacatacggctgccacagccattgttctcaaaatactctttttgctaaaaaaacttttcatacttttattatctaatccagattctcacttacttaccacttttttcttccaacgctatgtttaatttcaacacattcactttttctgtccccaaaaatcccaataacggtttttctatactctcgtcaactattgacttcacctgttcctccctcaatccacgagcctgtgcaactcttttcacctgtacatacgcacattggggagtgatattcgggtcgagtcctgaaccacttgccgtcaccatttccgccggtacctctttacgactcaaataaggatgatgaacgaggaacgtatcgatacgcgcttttacttcgtccaagtattcctgattcgtaggtcctttgttgctaccggctgaacttgtcgcatcatatccgtcgcccgcacaggaagggcgtccccagaagtaaatatcctttgtaaacatctgaccgacattcgccgctcccactacttttccgtttagtgtgactacttcggcatttcccttgttaggacctgcaacctgtgcaaacagccacaagataaggatatagaacacggagaaaaagacacaaaaagcaagtgttatttttaaagacttcaataaagttttcattgctattgttttttaattaaaagaataaacctactaataaatcaatcaatttaataccgacaaaaggaacaatcacaccgcccacaccataaatcaacaaattgcggcggagtaaggcacttgcgccaatcggcttgtattgtacgccacgcaaagccagcggaatcaaaatcggaataataatcgcgttgaagattactgccgaaaggatagcgctttcaggactatgcagattcataatgttcagcgcggccaattcgggaatagctaccataaacaaagccggaacgatagcgaaatacttggccacgtcattagcaatagagaaggtagtcaatgtgccacgagtcatcagcagttgcttgcctatttccacaatttcaatcagctttgtcgggtcgttgtccaaatccaccatattaccggcttccttcgctgcttgtgtaccgctattcatcgctacccctacatttgcctgtgccaacgcaggagcatcattcgttccgtctcccatcattgcaaccaatttcccggcctgctgctccttcttgatatattccattttatcttccggcctagcttcagcaataaaatcatctactccagctttttcagcaatatattttgctgtcaacgggttgtcaccggtcaccataaccgtcttcacacccattttgcgcaaacgttcgaaacgctcctgaatacccggtttgataatatcctgcaattcaataacgcctactactttccgattgacacataccaccaacggtgtaccgccattacttgatatagtagaaattatctcttccacctctttcgggaatttatttccggcactctctaccatcttacggatagcatcaaatgcccccttacggatctgtgttccgtcagccaaatcgacaccggaacattttgtctcagcagtaaacttaatcatgcgtgccccagccgtattcaggttacgcatacggatacccgattcacgtcccaactccactattgactttccttccggagtttcatcggacagggaagacaacagacagttttctacaaaacggtgcaaatcaacgcccggtgccgtgtggaagtgagtggccttacgattaccgatcgtaattgtaccagtcttgtccaacagcaacgtatcaatatcaccggcagtctctactgcttttccggattttgtaatcacattcgcacgaagtgcacggtccataccggcaataccgattgccgagagaagcccgccgatcgttgtcggaatcaggcagacaaacaaagagataagtgaagcaatggtgatgaccgtattactataatcggcaaatggtttcaaggtaacacacacaatgacgaaaacgagcgtaaaacctgccaacaaaatagtcaacgctatctcattcggggttttctgacgtgatgcaccttctacaagcgcaatcatcttgtcaagaaaactttctcccggctgagtagtcaccattacttttatacgatcggataatactttcgttcctcccgtaaccgaactcttatctccgccagcctcacggattaccggagcagactcaccggtgatcgcactctcatcgatagaagccagtccttcaataatctcaccatccgacggaatcacatctccggcctcacaaacaaatacatcccctttcttcaattgcgaagaacttacggtaataattttattaccttctactttttttgccggtgtttcttcacgagtcttacgcaaactgtcggcttgtgccttaccacgcgcttcggcgatagcttcggcaaaattggcaaacagcaatgttacaaacagaatgacaaacacagcgatattgtagccaaacgacccctgtgaagcgtttacaatagagtagagcgtcacgaagaacatcaccgccgtagccacttctactgtaaacataatcggattctttatcatcatccgcggattcagtttcacgaatgactgtttcaaactttctatcacttgctccttttgaaacaaagaagctgatttattatctttcatatctattacaaacttaaatgttcagcaatcgtactcaatgcatgtaccgggaagaacgacaaggcggcaacaatgaagataacggcaaatgtcattaccccaaacgtcaacgtatcggtttttaatgttccggcactttccggaataaacttcttctgcgcaagtaaaccggcaatggcaacttgtcccacaataggaatgaaacgactaagaatcaatacaataccacatgtccagttccagaaataagtattatcacccaaaccctcgaaaccagaaccgttattggcagccgaagaagtgtattcataaagctgctcactcagaccgtggaatccgggattattcaaccaaccgccttcactttccacaaattcaggataatgcgcataaatataactggagatggctgtaaataccaaaattacaaacggatgaagcaaggctacaatcgtagcgattttcatttcacgggcttccacttttttacctaagaactccggtgtacgtcctaccatcagaccactgataaatactgctataataatgaatgtatagtagttcatccatcccacaccgacaccaccaaaccaagtattaatctgcatattcagcatttccatcataccggacaaaggcatagtggagtcatgcataccattgacagaaccattggaagtcaccgtagtcgtaatactccaaagagctgttgcaccagctcccaaacggacttctttgccttccattgcaccattatcctgcgcaatgcccaattcatcgatacgcggattcccccccatttcctggctgacattaatgcagacgcctaccagataagcaaaaagcatgactccgaatatgctatatcccaatttcttcctgcgggtataaaatcccagtgcaaacaccattgccatcgggataatcaggatggaccagcattccgccatattggtaagataagtcgggttttccaacggatgagaggagtttacaccaaaataaccaccaccatttgtacccaattgtttaattggaacaatcgcagccgtaggaccttgggaaaccatctgctcctgaccttcaagagtcgtgactttcatcttgccgtcaaatcccatcggagtcccttggagaatcaggataaaacctacaaccagagaaagaggcaataagatacgtgtgcagctaactacaaggaattgccaaaagttaccaattgtttttgttgtttttgcagcaatacttttcatgatacctgccatagcagccatacccgttgcagcagtaataaactggaaaagcatgatgacgaacaattgtgtaaaataagtcaatccgctctcgccgctataatgctgtaagttacagttaaccatgaaactaatacacgtattgaacgcctgatcaggagtctgcggaccgttatcgtccggatttaaaggcagccaaccttgtgaaaccaaaagcaccattccccagaaaaaccaaaaagcattcaatatcaataatgctttcaggaattgtttccagttcatctcttcgtcaggattgattccacaaactttatagataactctttcgacaggagccataaaatcagaccaggtcttttctcctttatagaccttggcaatgtattttcccaatggataagccagaatcaccatcaaagcaatctgaacaaccacgcctaaaatttctgtattcatatactttttaccttaaactgtgtgtgttactttaaaacttctcgggtttgacgagtacatacatcaaataaccgaagatcgcaatacctaatacaaataatactgtgtacataatcaattctccttctttttttaaatattctcaaaccagtctacacatttccagaataaccagaaacaggcgaagccgcttaacaggcagaaaataaatgataatgtaatttccatgttttttcttttaagtgattattattagttttacttgccagtctttatgccaaatgcgtgccacaaaagcaagaaaacatataacatgctaatatacagaaagttataaatatttcacagaatatctatccttacaagaaacccttccattttgaaaaaggcattctattttgaaaaggttagtacttttcggcaatttctgaaagagaaaaaacaaaggatttttcaaattggaaggttatttccattttgggaaggtagaatatataagaagctttttataacctactgaaaacaagcggctaaccactcttatacaataattggtatacgctttgcctataaacagatatgaaactttatattatatcaaacagattacctgtcaaagcagccggttcaaatggaacattcgtcttttcacgcagtgaaggcgggctggcaacaggtttggattctctccaaacttcttatgagaaacattggatagggtggcccggcgtatgtacagacaacgaaaaagaccgtcaagaaatgaatgagaagttacaggaaatgaattttcacccggtcttcttatcggaaaaacagattcagaactattacgaaggatatagcaatagtaccctctggcctttatgccactatttttacgcctataccttatataaaaaatgtttttggcactcctatcagcaggtcaaccaacttttctgcgatgaaatttgccggctgatatgtcccggagacaaggtgtggatacaagactatcaactgatgttacttcccggtatgttgcgaaaaatatatccggaactctgcattggctatttccaccatatcccgttcccgtcctacgagcttttccgtatcctgccggaacgtgccgaaatactgaaaggcttactgggtgcagactttatcgcctttcatactcatgactatatgcgccacttcgttagcaccgtagaacgtgtccttcatcttgacttcaatctggatgaactacaaagcggtaatcgtgtagtgagagtagacgcactaccaatggggattaactatgagctttaccataaagcctcggaaaacgaaaaggtacaccaagctattgaccgcacccgaaaacttttcggcaaacacaagttagtcctgtcggtagacaggctggattatagtaaaggaatattgcaccgcctacatggcttctccacttttctcgaacgtcatcccgaatattatggcaaagtgactctggcaatggtcattgtcccctcacgcgaccatgtaggcagttatgcagaattaaaaacaaaaatcgatgaagagataggttccattaacggacactactccacaatggactggacccctgtctgctacttctaccatggcttctcgctggaagaactgaccgccatgtattatgttgccgacattgctttgatcaccccgctacgtgacggtatgaacctggtagccaaagaatatgtagccgccaaatgcgatcacccgggtgtgcttatcctcagcgaaatggcaggtgccgccgtagaattaacagatgctatccaaatcaacccgaacgatacggaacagatagagcacgccatctgccaggcacttgaaatgcccgaagaagatcaaagggcacgtttacaacgaatgcaagccattttatccgtacaaactgtcaataaatgggctaccgacttcatcaacggactgaatacgacgtgtatccaaaatgatacgctacggaaaaaacgtatcgtgcccaccactatcgcccaaatcaagctcaagtacaatcaggcaaaacaacgcctgatattgctggattacgacggtacactgacagcactcaagccacgtcccgaagatgccaaacctacacctgaacttatttctattctacaacaattagccagtgatcccgccaatcatatagtcatcaatagcgggcgggatcactttattctggaaaagtggtttggcctccttcccgtatctatggctgccgaacacggagcattctataaagaaaacggggtttggcacaaaaagattaagaagacagaatgggggacaggacttctttctatcctgcaaatgtttgtagacagaactccccgttcacatctggaaataaaggagacagcattagcatggcattaccgagaaagcgacgcatggctcggcacactgagagcacagcaactcgtcaatgcactggtttcgatctgtactcggcaaaaactgcaaattctacaagggaacaaagtggttgaagtcaaatcaccggattgcaacaaaggctcggaagtagagcgtttgctggctaacagacgttatgatttcgttatggcaatgggagatgacacaacggacgaagatatgttccaagctcttccggccaaagcggtcaccattaagataggcaacgtatcaaaagcagccaactacaatctgcccgcacaatctgatgtacttcctttcctgcaatccatactgagaaagcaaaaaaacaccgacacaacgaaaagctatgtcagaaaccgcctgacttccgctttcagctttttcagagacttattgaaaactaaataaaaacaagcgttatgaacaatcagaattatggagtgataggtaattgccgcacgtccaccctcgtttcacaaacagaagccctctcttttatttttttcatagtaatcatcctgcaaagtttataaacagacgaagcccctccggtatttctactgaaggggcttca

SEQ ID NO: 3015 - DNA, 17485 bp, Unknown
  gut microbiota DNA sequence
cggaagacggggctcaaacccgcgaccctcagcttggaaggctaatgctctatcaactgagctacttccgcattcttgccaaagttgtcactctgattgtgggcaaagatggattcgaaccaccgaaggcgtaagccagcagatttacagtctgccccatttggccactctggtatttgccctaataattttctcactacgcaaagaacgagcttccgtctatctttctaaaagaattaaccttctcatccttgagcctcttgtcggattcgaaccaacgaccccgagattacaaatcacgtgctctggccaactgagctaaagaggcattctagctaaaaaatgcaaccgccacgttctaacacgagcgaaacggctgcaaatttagttatttatttctttcccgcaaaatatttgcgatttttttatttgctacgttgtttttccttgtatttaaccagttgcttttcgagcgcttccacatctaaatcaattgcttcctcaaatgtatcacacactttacttgcataaaactccccgttaggaataagtatttttatgcctgcttctttatttgcagcaacttccggcttaactacctttaatgacacctctactttctttatatcttcgtaatacttttccaacttagacactttcttttgaataaatgcctgcaattgctctgacgcatcaaagtgaattgattgaattcttacatccatacttacctccttgtttttaagctcttggatgagcttgtttatacacttttttaagttcttcaaatgtggcatgcgtatagatctcggtagttgcaatactctcgtgacctaaaagttcttttactgcacccaactccgcatcattgttcagcatcgtggtagcaaaagtatgcctcaacacgtgaggactcctttttttcagcgtaaccacctttgacaggttccgtttcactaaattatagactagattcttataaagtcgttcgccattctctctaacaaaaaaagcttccgacctttccggaatcatttcgtttcttatgttaatatatccaagcatcaactcacgcagttcatcaccgaacggtatcagccgttgcttgttccttttcccggttactttcaaaagagaagcagaaaaatccacatccttgtcatccaatcctatcaattccgaaagccttatgcccgtagcataaaatacttcaataatcaatcgatcccgataacctttaaacccttcaccaaaatccgtttcatccagcagcttgttcatttcgctttctttcaagaaaacaggtagcggctttttatttttaggtcctgttattttacataacggatccttagtcacctccccctgccttaaaagatatttatagaacgaccggagcgaactcagtttacgatttacagaagtcgaagtgtatcccctatccattaatgaaacaatccattcacgaatcagttcagcttccacctccaacggattaaatcttccatactcttcctgagcaaactcctgtagttgctttatatcctcactatacgccagaacggttttttcagagtaattccgctcataccggagataatcaagaaaagattttatcaacataatatcgctacatctaaaatcgtgcaacgaatgtatgaaaagaattcaataattcaaaggaaattacgaattattaatcttctacttgctgaagttgttgtacgtaaactgcacgttctttcttaagtcttttagttacagacggtttatcaaactgctgtcttcttcttaattctttaacgatgccagttttttcgaattttctcttaaacttcttcagcgatttttcaatgttttcgccttcttttacaggtactacaatcattttgttactattaatatgttattggttaaaaaattccgcagtcaaattgcgccgcaaaattacacatactttctttattcacaaaactttcggcaaatatttctcaaaaactattcataaacaactcattaaccgtaaaaagttactacctttgaatctgttatatgtctattaataatataaaatggtatgagacagagtataaaagaacgaatgcatgcattacgaatgacattcccccccaattacattaaagcgtttatcatccccagcaccgatccgcatttgagcgagtacgtagctccgcactggatgtcacgtgaatggatttccggtttcacgggttcggcaggaaccgttgtcgtcttaatgaacgaagccggactatggaccgattcccgttattttctacaagccgccaaagaattggagggtagcggtattactttatataaggaaatgctaccggaaactcccagtattacaaaatatctcagccagaagttaaagcccggtgaatcggtaagtatcgatggcaagatgttctccgtacaacaagttgagcaaatgaaagaagaacttgcagcatacagtttacaggttgacttattcggtgatccgctgaaaagaatttggaaagaccggccttctatacctgattctccggccttcgtctatgatattgaatatgccggcaaaagttgtgaagaaaaagttaccgctattcgtgccgaattaacaaagaaaggagcgtatgccttattcttatctgccctggacgaaatagcatggactctcaatttgagagggaacgacgtgcattgtaatccggtagtagtcagctatctgttaatcacgcaagatgacgtgatttacttcatctcaccggaaaaggttacaaaagaagtgaacgagtatttaaaagaacagcatgtcaagttgaaaaactacgatgaagtagaaacttacttgaatacttttacaggcagaaatatccttattgatcccaagaaaacaaactttgccatatattctgcaattaatccggaatgcaacattatacgtggtgaatctcctgtagctctattaaaggctattcgaaacgaacaagaaattgcaggtattcatgcagctatgcagcgggatggcgttgcgctcgtcaaattcctcaaatggttggaagaagcagtaccttccggcaaagagacagaactaagcgtagacaggaaattacatgaattcagagcagcccagcccctttatatgggagagagtttcgacactattgccggatataaggaacacggagctattgtgcattactccgcaactccggaaagtgacgttcctcttcaacctaaaggttttcttcttttagattcgggagcccagtatctggatgggactaccgacattacccgcacgatcgcattaggtgaactaactgaagaagaaaaaacggattatactttgatattaaaggggcatattgcattggctatggctaagttcccagtcggaacccggggcgcccaacttgatgttctcgcccgtatgccgatctggaaatatggaatgaacttccttcatggtacaggccatggtgtcgggcatttcctcagcgtgcatgaaggaccgcaaagtatccgcatgaacgagaaccctgtcgtattacaacccggcatggttacttccaacgaaccgggagtttataaagccggcagtcatggcatccgcaccgagaacctgacgcttgtctgcaaagacaaagaaggtatgttcggagattatctcaagtttgagacgattaccttatgtcctatttgtaaaaagggaataatcaaggaaatgctgacaaatgaagaaattgaatggttaaacaattatcatcagattgtctacgaaaagctgtcaccgaatcttaacgaagaagaaaaagtttggttacaggaagcgactgcttctatttaagccaaccttgctcaacacccggatgtcatacaacatagggcagcattaaattaaaaattttattaggaacaaatactttatggctttaataaaatctgtacgcggctttactcccgaaatcggagaaaactgcttcctcgcagacaacgcaactattataggagatgtaaaaataggaaatgattgcagtatatggtttagcaccgtattgcgcggtgacgtcaattctatacgtataggcaatggagttaacatccaggatggaagtgttttgcatacattatatcaaaaatcagttatcgaaatcggcgaccatgtttccgtgggacataacgtaaccatacacggagcgactatcaaagattatgctttagtcggaatgggatcgaccatactagaccatgctatagtcggtgaaggagcaattgtagctgccggttctttagtcctaagtaatacagtaatcgaacctggaagtatttggggtggagtacctgccaaatttataaagaaggtagacccggaacaagccaaagaattaaaccagaagattgctcacaattatctgatgtattcgcaatggtataaagaatgattttttagtaaaatcggaaacaaagcttcactccttcttacacttaaaacataagagtaagaaggagttttttcttgtattacccgaatcaatcatcattgacttccaaagtccatattcatcttatttaaccctctgataattgaaatattacgaaatatccgtagatttgtaaaagattaaatcgaggcagtgaatcaacaaacattcacctattatgaaaataagactactacttacaattctcttactgacagcaacaatagctgccaatacccaaatcatggaaagaacgtttttaaagaaagtacttaccaagttagaaaagattgaatctgcgacatattacgtcactgacgaaagccggcaacctgatgattccaccacattattcagtagcaaagagtttgagcttatcgcaatagaatcttggagccgccaagtatcttctattcgaaattacgcaaaccggaagaagttaaatgatactatcctaaacgcagccaatgaagtaatcaaacaatatcagacaagcggtgccacaccttactttttcattgtagatcaagaaggaatcagaagttatagtaaagagaataccgataaagaaataatccatacaataaaagaactactatgagcagactatttaccttcctttgcctgtctttgttattcaatctagcacaggcacaattaccgacccccgagtataaaaaaggacaagccatcctgagtgggacaatcgccaattacaatccagacgacaatctgatattcaagatcggtgctcccaatatcgtaatgggaacagccgagacactttatccgactgttgaagcagatggaagtttcacgatttatattcctctctaccatagtgctcaagtacggatgataataggaaatgcagatttagtcattctgttaagtcccgaaaaagagaccaatgtaactatcaatttaagcaatctgccagaaaaacaatttgtatatagtggtcagtatgctaccattaacaatgaatggtgtcagccggaactgataacaaagatacctcctgtttatagagatggcgacttattggattctattgcaggcatcagtgccaacgagttcaaggaacgctgcatcaaccaatacaaacagtacatagcgcacaacaacacacagtcgcaattcagcgaagacactcgtacactagccaatctttcatgcgcatttgattgtctggaaaacctgcaagctacccactattgtctgcaaacagcttatcagaagaaagaaaacattacgcgagaacaagcttttgcagctttcctcaatatacatttacctgatgattttcacaactacctgaaagattttcctgtcaatcaccctttggcactttattgttataattaccgtaatgtagtcacaaacttcttatatgatacacactatgacccactctctatggaaaaatatctattggaaaacgcaccgctcacaaaagaggagcagacactcattcatcaatatgaagcagcttttaaagcaggagtaatcttccggcagcaaaacgatttgatgacactcatccgcaaatatactaaagagagagacgactgtaactggaaaatattttccgaagccaaaaaacgtctggggcatatcctgcaagacagcacctgtttgccggttgactacatacgcgcaatctatatgcgctccagcctttacaacctacaaccgttgacctcccggcaggaaatcatggcttcggaaattacaaatcctatattcataggaatcattcaagacatgaaccgtcagatgcaaccccggaagaaggctacaacaaagaaatataccatctgcgaagcgccgcaagtggcagaagaagaactgctggatgcactcattgcacgtcataaaggcaaagtacagtttatcgatttctgggctacctggtgtggcggttgccggcagattatcaaagaatatgagccgctaaagaaagatataagtgaagacaaagtagctttcatttacctcaccggccccagttcgataaagaagacatgggaaatactcatagaagatatcgcaggcgaacattactggctggacaaagagcaatgggaatatctttggacacattttcaaatgacagggttaccgatgtatctgctaatagataagcaagggaatatagtgaaacgatttactcacattaccgccaaagaattaaaagatttactggaacaagaaatcaataagatataagtccgtacaaatactaataaaagagaattgtttttcagggcaggatttcggaatatgcaatcccctttaagaagagagaagtccccttattttagattgacccattacagagaactaaaattaggggacttttataattagaaattaatcatgtgcataatcttctccgtagctccggcgttgcttgtcacataataccccgcatttgtaccggtttcacgcaagaatacctcatcagtccggaaacgatccagcaaagttttcagttcatcataatctttgatagaataggctccttttgcttccagcaattgaacagcttccataaatttctggtatttaggtccgaaaatcacaggaataccatacacggctgcctccaaagtgttgtgaataccaaccccgaaaccacccccgatataagctatttctccataacgataaatagaagaaagcaatccgaaacaatcaataatgagacagtcagctttcaatacattcttttcgtcggcacgggtataacgcacataaggacgtttcagtttgctgataatctctaccaggtgattttcatcaattacatggggagctataatcagcttcatttccgggtgattgttgaaatactcaaggaataaatcttcatccggtccccaagagcttcccgccacaaaagtaaaggtattgtctcctttgaacagattcactaacggaagatctttggcttcctcgcgaatctgcaatacccggtcaaaacgggtatcacccactaccgtcacacggttaatacctatctttgacaaatagcgtttggaagtctcattctgcacaaacaggtggtcgaaatccttcaacacattccgatatgtccctccataccatttaaagaagatctgatcgcggcggaaaatagaagacacactatacaccgggatacggcgtttatgcagttcgtccagataatttttccaaaactcgtacttgataaagaatgccatgcaagggtttgagatatccaggaacttcttcacattccgcggtttgtcaaacggcagatagcagacaatatccgctccccggtagtgcttgcgcacttcataaccggacggagagaaaaaagtaagcaatatcttataattcggatatttttcccgaatcatttctatcaagggacgtccctgctcgaactcaccaagcgaagcggcatggaaccagatatactgctcccctttctccacctgttggcgtagaagttcatataccacccaatgccctttcatcatcttccggggcttgcggctaaacggagcagccaaatggacgaaaaagtcataaatgactattgccaggttgtaaagcatagtactatgtatgtcgattacttcaaaacctctaccgcccgtttcatacgagccacagtctcttccttacccaatacccaggaaatgtcgaacatgtgcgggcctttgccttcgcctaccagagtcagacggaaagcattcatgatattacctgtatgataacctttttccgcaatccagtccattacgaccttttcctgcccttcaatactaaaatcttcaatgccggcaattacttccgccaattccgtcatacacttagccgaatcttctttccaacgtttctttactgtcttttcatcatattcggtaggagccacaaagaagaagctgcatgtctcccacagttcctttacgaaacttacgcggtctttcatcatcccgaccacagtaacaaccttctcgaaaggagcctccacaccgtgttctttcaatacaggcacaaacagttcggcaatctcttcattcggtttctgctggatatactggtggttgaaccaaatacctttcttataatcaaatttagcacccgacttactgcaacggtgcaagtcgaataactttataagttcgtccattgacatcacttcctgatcgttacccggattccagccaagcaaagcaaggaaattgatgacagcttcaggcaaataaccggattcacgataaccggaagaaacctctcccgatttcggatcatgccattccaacgggaatacggggaatcccagacggtcaccgtcacgcttgctcagtttgccgttgccttccggcttcaagagcagaggcaggtgagcaaattccggcatggtatcttcccagccgaaagcacggtacaacagtacgtgcagcggagcggaaggcaaccattcttccccacggatcacatgggaaacctccattaaatgatcgtccacgatgttagcaaggtggtaggtaggcagttcatcggccgatttataaagaaccttatcatccagaatagatgagttgataatcacttcaccacggatcaagtcgttcacacgaacatcttcgttcggttcaatcttgaaacggactacatattgcttgccttccgcaatcagtgcatccacttcttccttcggcatagtcagtgaattacgcatcatccctcgggtagatgcgtcatattggaagttagcaatttccgcacgcttggcgtccagttcctccggggtatcaaaggcgatgtatgcttttccattctccagcaaaacctctacatatttcttatagatttcgcggcgttccgactgacggtacgggccatgttccccaccgaagctcacaccttcgtcaaagtggatacccaaccacttgaaagattcgagtatatactcttccgctcccggaacaaaccggtgagagtcagtatcttctatacgaaatatcaggtctccgtcgtgttgacgcgcaaatagataattatacaaagctgtacgcacaccaccgatgtgcagtgctcccgtaggactcggagcaaaacgaactcttacttttctttctgccataatttgggttagtataggtaaatcgtggcaaaattaaacctttttttccacactattgtttttttttgtacttttcgcaaaaatttcaatgcgtatggaacatttgaagaagaaaaagagtttctcatggagagatttgctatataaatcactgctatttgtggctactgtggcactgattgtttatttcttaccgcgcgacgggaagttcaactaccagtttgatataaacaaaccctggaagtacgggcagttgatagctactttcgattttcctatctataaagacgaggcggtggtgaagcgcgaacaagacagtctgttagttcttttccaaccttactacgagctcgacaagaagatagaaaaggacgccatcagcaaattgaaggagaactatcatacgaacctgaaagggatccttccatccatagattacctgcggtatatcgaacgcacgctcaaagaaatctatcaagcagggattgtatcgacagaaaacatacagcaactgcaaaaagacagcacttcgtctatcatggttatagacgacaagctagccaacccgcatcccaccgaggagatttacacggtgaagaaggcttacgaatacctgctttcggctgactctacccatttcaaccgggatattctaagacaatgttcgttgaacgaatacatcactcccaacctcacttttgacgaacaacgcaccctgactgccaaagaagaaatgctgaacaactattcctgggcgaacgggctggtagtcagcggacaaaagattatcgaccgaggagagatcatcagcccggaaacttataatattctggaatcactgcggaaagaatccattaagcggaatgagtcaatggggcaaagccgcctgattctcggagggcagattctgtttgtgggtatgctgatgttgtgtttcatgctttatcttgatttattccggaaagactattatcaacggaagggcagtttgtcgctgctgttcactttgattgtattttacagtatagtcacggctttcatggtcacacacaatatattcaatgtgtatatcatcccctatgcgatgttgccgatcattattcgtgtgttcctcgattcaaggaccgctttcctgacacacgtcatcacgatattaatatgctccatatccctacgcttcccgcatgaatttatcctgacccagttggcggcgggactggttgcgatattcagtttaagggaattatcccaaagatcccagcttttccggacggcgctattagtcatattgacttatgccgccatttactttgccttcgagttaatgacggagaacgggctttccaatgacttctcgaaactgaatttgcggatgtacacctattttataataaatggagttctgctattattcgcttatccgctgttgttcctgttggaaaaaacattcggatttacctccaatgtcactttggtggaactatcgaatatcaataatgacttactgcgccagatgtccgagacggtaccaggaactttccagcactccatgcaggtagccaatcttgcggcagaagcagctatccgcgtcggtgcgaaaagccagctcgtacgtacgggagctttgtaccacgatatcggaaaaatggagaatccggctttcttcaccgagaaccagtcgggaggggtcaatccgcacaagaacctgagctacgaacagagtgcacaggtcgtgatcagtcatgtcacggacggattaaaactagccgacaaacacaatctgcctaaagccgtcaaagactttatcagtacgcatcatggacgggggaaaacaaaatatttctatatctcgtggaaaaacgaacatccggacgaggagccgaacgaagaattattcacttatcccggtccgaacccgtttactaaagaacaggccatcctgatgatggcggatgccgtagaagcagcttcacgcagtctgccggaatatacggaagaaagtataagtaacctggtcgacaagattattgactcccaggttacagagggctacttcaaggaatgccctattactttcaaagatattgccacaataaaaactgtattcaaagaaaaactaaagattgcttatcatacccggatcagttatcctgagttaaagaaataagcaggccggaacaggcatcttccaaaatatccagcacatactcgaaaccttcggccccaccatagtaggggtcggggacatgatctgcggggatacggttgcaatattccgtcatgcggtgaatcttcttccattcttcgggagagggagctttatctttcaggtcctcaatattacggtcatccataccgataatcagatcaaaattataaaagtcctctgtccgtaccgggcgtgaacgatgcaccagttgatacccccgacgggcagcgtgggcacgcatccggctgtccggcaactctccctgatggtaagacaggattccggcggagtctatcacaaactctttctccagtcccgcctcctctattaaatgaagcattacaccctctgccgtagaactacggcagatatttcccaagcaaacaaataatattttcttcataataaacttttaatacttgacaatatgccacaaggaaaccttgctccggtgttacgccggttagaatgagttcaaaatctgattcgcccggttcacggtgacagctgccgggatctccggcatatcccccaagttgaacggagccagcattttctcaatcttcttcagtccggctttatttccgttcttctcaaattcctgacgaagaatatttattttctcatgtgcctgtactccttcgatcaaacgttcgaaacggatacagctacgtgctccggggtataccagataagtatctccggctgcccaggtacggaaacgggaatcgagcaacggctccaacggccaactgttgtacgcccaacgcagataaccgtccagatgcttctttgaagaatagaaactcatccaggcagcttcggccgggtcggagaaagtaaacgtattggggtgtgcttccgtgcagcaagtataataggtagtgcgcttattctcggctttacggcggagacgtacatcttcgggatagttctgaccgatcacaatgcaataatcatacaaatccggctcaatttccgcatgataatttcctgccagtgaaactttaaaatccggatcagccttacgaatcactttcagagtcttctgcattacgtccattgggcgctcatccatagcaatcgtacaaatatcaaaccagcctttttctttgagatgttttgcaaaagaagcaagcattgccacccacatttcttcataagcctgttcgcccggtgcggtcttcacaaatttcaacgagttcgtagcctggtcgtaatactggaaagacagtttccagggaaccattgaataacagtttatctgcttgtcaatgccgacactcatcataaattccacccaacggtcaaaaatggtatagtcaaacgtccacgtaccgtctgcacgttttatccaagtcaccattgtgtcgaaataatcttccgtctgcccattccagggtttatgagtcaaagtagccgtaataatcttctgcccggcatttgccagcattttcatcagagggcgcatagcgtccagatgctcctggctccataaaggcacctgataataacgggctacggcatacgggctttgccacaaatccagatgaaaagcccattccgagggttggggaagtacgcgggaagaaaccgtaatctcaagattgaggcgctgtaacagattcgagccatcgttaaccaataactgtcctttataagttccgggaaccgcagactggggaatccagcattgtacccagataggctgaacagtacgagcaggcaaagccatcgttttcagttccgagtcaatcggatcggctaccaatagagagtcaaagtccaccgacttccgatagccgcacgcacctcttccgtctttgttcagttcgtccgtcatgacgtagcggacaaagccggctgtcaacgcatctcccgaaagagagttccccttcttatccttaaaatcggtaaagctgaaattcaagtccttcagctccgtgcctgtccacacgaccgcttgggcattcacacgttcgccgcgccagcctttcagagaggtgttcgtggttttcttcaaagccggaagctgatgtttcgcgtagcggacatcaattgttccccacgacacttgcggtgccgtgactgccgcccattctttttcggaaggtgccgcagggtcgggcaattcctgataagcctgtaaagggaacttcggttgtcctgtcggaacgccgcactgggttactccttgctgggcaaacacagaacccatgctaaggaaacaagtcagagaaaaaattgtaaatcgtttcatggttagttaattaaattaatacaaggtttattaataagggggaataatttcttttatcacatagggtctacatcatagtagactatcagggacttataacgctcatcctctatcatctcccgttgaatgcgcaaaagcagttcccgggcacgccccattggggcattctgttctatcttcacaacgatctttttgatgaacagtgtctggatacgggcaacaggaggtttatccggtcccagcacccggttgccgaatactgccctcaacttgccggccattaccgctgccatttgatccagcaacgactcattatgatttttcagataaacatataccaggcgataataaggaggatagtggaacatctgacgttccgccagttgcccgcctaccatatcttcatagtcattggcaatcacctgatgaataatagggtggtcgatactcttggtctggagtatcacacgtccgcgtttattcttacgcccggcgcgtcccgctacttgtgccattagctggaaggcacgttcgtaagaacggaaatcgggataattcaacatcgtatcggcattcagtattccgacgatacttacatggtcgaagtccaaacccttcgacaccatttgcgtaccgatcagaatatcggtctttccctgttcaaagtctgcaataatcttttcgtaagcagagcgggtgcgggtggtatccaaatccatacgcgccacggctgcttcggggaaaaggattttgatgtcgtcctcaatcttttccgtaccaaagccgcggttcaccagttccgtaccttcgcaagcgggacaggccttcggaagttgataggtatagccgcaatagtgacaggtcagttgattgattcctttgtggtaagtcaggctcacatcacagtttttgcacttcggcacccagccgcaagtacggcattctatcatgggagcgaagccgcgacggttctggaaaagaatcacctgttccttctgttccagggcttctttcatatattgtaccagcaaaggcgagaactgtccgaccattcgtttcttacggtgcagttccttgatatctaccgggataatctccggcaactgaatctctttatagcgttctttcagttggacaaagccgtattttccgtccgtcgcgttctgccatgtctcgatagaaggagtagccgttcccaacagtgttttagctccatacatggcagccagtacaatagctgcgctacgtgcatgataacggggagcagggtcttgctgcttataagtattctcgtgttcctcgtccacaatcaccagtcccaggttccggaaagggaggaaaacggaagaacggactcccaaaataatatcatagccattttctcccaactgtttccgccatatctccacccgttcggcatcgggaaacttagagtgataaatgcccagccgagagccgaaaacccgttgcagacgttctgtaatctgggtagtcagggcaatctcaggcaacaaatacaatacttgctttccctgacgaatagtttcttctatcagatgaatatatacttccgtcttaccactggacgtcaccccatgaagcaggcagacattcttttcccggaaggactgtacgatttcatcgtgtgcccgttgctgaaactcattcaacgtattcagttcgacgacctccttcacctgctggttcaaccggccgatctcatgatgataaatctcaaatatctttttctctaccagaccgttcagaatggaaggcgacacattggcgcgttgcaacagttctttcttggagacttctttcgggacttcatttcccagaatccccgaacattccacatatttcatcaacaatgccaactgcttcggggcacgcgacaggatatcaaacagtatatgcagccgtttttcatccgccgaacccgcaagccgcacccgcgcctccgtcttgggtttataagtacgcctcaactcctcctttacaaaaatcgcttctttatcgagcagcgacttgatgacagtcagaatattttttatcccgctctccttctccagcttagtgacacactgctgtgcatccacggcaagcaaatccagaatgcgctgttcacgttccggcaatggtgcatccgcttcaaaatcgggattatactctacaatcgtttcgctttcgagtttcaatcccgaaggcagcgccgccttataaacatccccttgcgtacagagataataatcggctatccactcccaaaacttgaattgaacaggcaataatataggagaagcatccagcaatgcagatatgtccttcacctcatactccgtcggagcacaataatgaacattaagaacgatagccgtatagaacttcttccgtccgaaaggaactaccacgcggcaaccgatcttcacttcttccgcacactcgtccggcaaagagtaagtaaagctctttggaagcggaagcggtaatatgacatctacatactttttcattgcaggcacaaagatataaaaaaagaggcttccgacagtcgaaagcctcttgttctactatgttaaagtaaattatccgctaaaaaatataagcaacagatacctgccaagtcttggttttataggaaccgccgccgtcaatatcagcagtgtcgcccaatgggatattataattagctcccacctgcaaatggttcagcaacttcaggccggcacctacattgatacctacttccgccttcttcttgtcgattccggttttcttttcaaagtcgaaataaaaatcaggaccggcagccagataaataccggccaggctacccaagccgatgttatacttcaagttaaccgggatatcaataccgttctgcttcacagtaacatccgcgtcggcatcagaaaccttgatacctctttgggcaaaaagcaacgcagcatctacccccaaccctacgattggaatattaaactcagccattgggccaataaagaagccggtaaaattatccttcttaaagttttctttcacattagagaagctcgcttttgacaagttcaaacctccctttacaccaaaatgtatttgagcctgagcaggcattgccataccaatacatacagcaatcaataaagcaccaaaaatctttttcataaatttacgtgtttataattcgggacaaagatatataattagaataaataaacacaatttatcggttttttgttcgctcaaagtcgctattgttcatccactcctattcccgcgccttctctgatagtttaatttcatttccggattctcatacagaatcttttgaaccaacaggcacgacaggcggtttgcgccaatttaggaagataatgataacaacagacatccac

SEQ ID NO: 3016 - DNA, 309 bp, Unknown
  gut microbiota DNA sequence
gctcagcagcgactattggatcgtcaaggcgaaacacgcattggtacggtaaccatttccaaagatgcagctgatcgattctttttgtcgctgcaattaggttccgatacaccgtttgttcctaagcttagccgcactaatcggcaaattggcattgacctaaatacagaaaattttctgactgccagtgatggtcgaaccatcgctaacccacgctactatcgaacaatcaaggggaaattagctaaggcacagcgcactctttcacgccgccagcgccgggctaaaaaagagcagcgttctttgcga

SEQ ID NO: 3017 - DNA, 2093 bp, Unknown
  gut microbiota DNA sequence
acgaaaccatatctataatttcttgaaacacaaggctgttgaatatgactacttggatgttgcagcagaaaaaatgcaaatggcggaacggggattgcctacgccggatgatgaattttgcgctcatgaacttgaactttttgttcagatggctcttgaacgtatgccggaacagcgcaggcgtatttttttaatgagcagggaagagggaatgacctcaccggaaattgcagcgaaattgaatatttcggttcgtacagttgaacaacatatctataaagcccttcaagatctaaaaaaaatcgttttatttttattttttttctatctagactaagtatgtatgcccggcaagttgtctcttatatgtaacacttgagttggtttagatgaaaaataaattagaaaaacagctacgttcttttattgactttgattattcaaagcgaacgatcgacaggtttcatcgttggatgattagttctgattctgccgaagagaaagagacagcacttcgtaatctatggttcaagacaaaaggaaaggctgagcacgatatggagtattcgtttcggcaggtattggataaaatcggaattgaatacactccaatggttacagatgtaaatcgctggaatttgtggaaatctgttgcggcagctgctgttattgtcgttctatctgtgacagctactttgtggataagctacaatcattttgacagagacaacattgcaatggtggaacattatgtgaataatggaaccagagagacaatcagcctgccggacgggactaccgtacatctgaactccggttcacacgtgttttatcctgaaaatctcgagggcaaaacccgaacgatttatttgataggagaggctgagtttaaggtagcaagaaatccgaagaaacctttcatcgtgcgatcatcaaacatggcgataactgctttgggaacagagtttaatgtgaaagcttatccggaagaagatgtaataactgcttctttgatcgaaggaaaagtacgagtagattgtaatgatacgattagttatgttttaactcccggttatcaggttgtgtataacaaatgtacggatgactgccaaatgctgactgcaaacatgaaagatgtgacggcatggatgcggggagaacttgtgttcgataaggttactctcaccgaaattgtgcggacgttggaacgtcattatggaatcacattccatatctcaacaaagaaatccaatcaagatcgttataattttgtttttagaaaagatgccactttagaagaaacattggaagtgatgaaggttgtcattggtcaattcgattatcgattggaagacagtatctgctatattatctggtagagaaaaacaataaatatttttttgttaaacttaaaatctaatatgcttatgtagaaaaatatccggaagaggctccaccctctccggatatgaaataatttttagccttaaaacaaataagcaacttgttgcttatttaagaaatgagaaaaaatacatgatttaaaactaaaaacgtcgtaaagatatgaatttatatctggaaaacactggaaaaggtatattaataacttttctactattaatcgggtcaatgctttatgcccaaaacaatagtaaaataacaataaaaaagaagaatatctcattgcaaacagctttagcggatattagggaacagaccaagatgtctgtatcttacaacagttcccaactacctaaaacaagaatatctttagatataaacaaccagtctttggatcaggcactgaaaactattcttgccggaacagggttcacatataccgtaaaagatacttatataatgattattccggagcagactgctaaaaaatctaaaagcagaaatgtggtgggtaatgtagtggatggaaaaggtgctccgctaattggagttactgtggtcgaaaaagggaccggcaacggaactgtaaccaatatggaaggtaactatcatatcactacacaaggtgccacacctgtattggtattttcctacatcggttatcagtcaaaggagatagttgtaaaaga

SEQ ID NO: 3018 - DNA, 50718 bp, Unknown
  gut microbiota DNA sequence
acaatggaaggtgatgtgcttcttgataccggatgcttctatccagactttcaacgggcgagaaatccaagaggcatcagtcaatccttcaaaaacaagtgcttcatcatcgtctggacgtatgccgcatagttgaagtgcctgttgaatgactggcttgtaatcgggcctttttgtcttttgctgaattactactgcttgccatgtacctttgcttgtttgctgaatttgtttccatttcaaagtttgaatatcactatgccgcaatccagtgagaatagagaacaagaacgcacgtttcaaaacatcatccttgcaaggagtatcaaccaacatttgcacttcattcatggtaagcgcaacacgaggcttctctatgtttgttattccctttactttcgcgcttatatcaacggtcagatattcatcaatgaacgcctgtttcagtccggctttaagtatggaaaaataggttgatgccgtgttttgtgagatagtacctttcttattccctcccattggagcacggagaaggaacatctttatatcttcaagcagtttaacggaaatcgccttgaatggaattggttgcccttgtgaatacattttcaataattcacctacacgcctccagttgactataatcgaatcggaactattgggatgacgtgtgcttataatacgattgaaatacttgataaaatcctgttcgctccgctcattctgtgcagcgatttcgttttccttatcagtgtataggatggcactatcgtattcatgctgccgtaacttccgcacattgtcggcatagatgcaagcctcttggtctatcgttgaacggcattggataattccattcaaatcacgtttaggcttatagttgaatgttccatccggcaagattcgtgctatggatgacttatcccaaatgggtgtggatatagttctgttgatagattccaccacacggcttgcccgtttagaacctcgcttatacactgggtatgactctataatcagataccactcttctttataattcgaccttctgagtttgacggtcactttggtattgggtaatgctttcttcataacgacttatacaatttatcaatttcagatttgggaacataaacatagttaccgatttggcgtgtaggaatagaatgacggcgcatgtgcttaaacacactgctgtcattgatatggaacttctttgcgatctctccgatggtgtaacaatctttgggttcaaaggacaatgcctccttttttctctttctactccctgcctttgttttgaagtgttcatccatatactgccgactaaggcgtatcagacgctgaccaaaattgtatgacggtatcaagccttgccgtatcatacgataaagaacgtctttactaattccgtaaatcagcatagcttcctttacggttagataccccttactggatggtattcgtctaatcagtgcttggcgtatcgcttctttctcttttgcgatttgtcttttcttatacgccctcttggaacaagcagggcaacaatacttcgacactaatgtcggaggagtaaagattttaccgcactcctcgcaacttctttgaatgatgtaatttcctcttggcatattcttctcgttttaaatggtttatatcaatttaagttgtaccttatcgccaaataagacgtgtcgcaaacatgtcgcaaataagagataaaaaagcccatagaaaacacatagcaaccatgacccccataaacgcaaaaagcgtgcaactcattgagctgcacgcttttgcttattgtttattatctgtatccttatcggaatcatttgacttcctcaaaatcagcatcttgcacattatctccatgcttagttccattatcttgctgaccggcaccgccattcatatcaggccccgcctgtgcgccaccttgttgtgcaccaccttgagcatacatttcagcacttgcagcttggaaagcagtattgatttctgccatagcagtatcaatagcagccaaatcctgagccttatgagcatctttcagtttctgcaaagcaacttcaatcggagccttcttgtcagcaggcaacttgtcacctaattccttcaactgattttcagtctggaatattacgctgtcagcctgattcaatttatcaatcttttcacgttccttcttatctgcttcggcgttagcttcagcttcagctttcatcttttcgatttcttccttgctcaaaccactggaagcctcgatacggatagcttgttccttaccggttgccttatcttttgcagataccttcaagataccgtttgcatcaatatcaaatgtaacctcaatctgaggaacaccacgacgagcaggagcaatacctgacaagttgaactgaccgattgatttgttctgtgcagccatcggacgttcaccctgcaatacatggatcgttacttcactctggttatcggcagcagtagagaatgtttcactcttacgagccggaatggtagtattagcatcaatcaacttagtcattacaccacccaatgtttcgatacccattgacaatggagttacatccaacaatactacacccttgatttcgtctgtcaaaacagcaccctgtacagcagcaccgatagcaaccacttcatctggatttacacccttagaaggagcttttccaaagaaatcttccaccaatttctgtacagccggaatacgtgaagaaccacctacaaggattacttcgtcaatatcagcattgttcaagcctgcatcactcatcgctttcttacatggttcaagacaagcctgaatcaatccgtgagccaaagattcgaatttagcacgagtcaaagtcttaaccaagtgcttgggcacaccgtttaccggcatgatatacggcaagttgatttctgtacttgtagaagaagacaactcgatcttagctttttcagcagcttctttcaaacgttgcaaagccattgggtcctgagtcaagtcagcgccttcatcgttcttaaattcctctaccagccagttgatgattacctgatcgaagtcgtcaccaccaaggtgagtatcaccgtttgtagaaagtacttcgaatacaccaccaccaaattcaaggatagatatatcgaatgtaccaccaccaaggtcgaacacagcaatcttcatgtctttgtgagccttgtccagaccataagcaagagcagcggctgtcggttcgttcacaatacgttttacttccagaccggcaatctgtccggcttctttcgtagcctgacgttgagagtcagagaaatatgcaggaacagtgattactgcttccgttacttcctgtccaagataatcttcagcagttttcttcattttctgaagaatcatagcagaaatttcctgcggagtgtacagacgtccgtcgatgtcaacacgcggagtgttgttatcgcctttcactactttataaggaacacgagtaacttctttctgaacctggtcccaattttcacccatgaaacgtttgatagagaaaatggtacgtgtcgggttagtaatagcctgacgttttgcagggtcgcccaccttacgttcgccaccatctacgaaagcgacaacagaaggagtagtacgtttaccttcactgtttgcaattactaccggttcgttaccttcaaatacagcaacacaagagtttgtagttcctaagtcaataccaataatttttcccatgatcgttatttttttatttattattattcaatgatttctttttgtccggttgtttctccactcctgttatggagtttcgtctcgaacggacgcttattaaaaagcaaaccgtgtgccaaaaagaaattatacgaatgcatgacataatatctgccaaaacgacagtttttaataaacttccttgccatgatagccataaagaaagttattcagtgactgacactaaaacaaatattatctattctggttcgataaagagaattaattcttaactttgcaatattacactataaaacaacgaactatttattaatatcggaattatacataaaatcaattaatgacatctacatgaaaaatttattatgtttacttgcattactactatgcactaccgtatttgcacaacctcaacaagttgtcgtaggagtttccggcaatggctatgtaacccggcaacaagatggtgcgcgaataacacaaagaggagttacacattggacaaatcctaaaagtatcgttagtatttacttctatttgcatcaaccgacaacagccgatctgtcactgtatgccaaaggacattccgaaatcaaagtcagttatggaaagaaggacttcaaagtcaatctacaatcggatgatttcaccaaagttcctgttgggagtatcgatatacgacaggcagggtatgtccgtatcgacttacaaggagtctctaaaagtggtgagagtttcggagaaattaagcagttgatagcagacaatgttacaggtaaaagtaattatgtgaaagacttctctgactattggggacgccgcggtccttccgttcatttgggatatgcgctacctgaaggtgatactgaatggttctacaatgaaatcacagtgcccaaagaaggcgaaacaatgcatagctactacatggcggccggcttcggggaaggttatttcggaatgcaatacaactccccgacagaacgccgtattcttttctcggtatggagtccttttgatacacaaaaccccaaagagattccggatgaccaaaagattaaactgttacgccaaggcaaagatgtacacatcggagagtttggcaacgaaggctcaggcggacaaagttatttgaagtatccctggaaagccggtaatacatataaatttctgatgcaaatcagaccggacgggaatggtaatacgacctacactgcctatttctatgcaacagatgagaaagaatggaaattaatagccagtttcttacgccccaaaaccaacacatggtataaacgtcctcacagcttccttgagaatttcagtccggaacaaggatatttatcacgtgaagttttcttcggcaaccaatgggcacgtagcaaagaaggtaaatggtcccgactcactgacgctacctttacacacgatgcaacagcgagtgcccaagtccgtctcgactatcaaggtggcaatactaaagacaatcggttttatctgaaaatgggaggcttctttaacgaatccgttccaatgggaactaagttctattgcaagccaacaggcaaagaaccggaaattgattgggaagcattgaagcaattgtaacaatcagcttccactattaattagttcatgaaacaaaaaaccggcctcactgcaacagatagcaatgaggccggtttcataaatatcaggctttattgatacagcctttcctatttcttataataattactttttctctaatacaataaccaatgcattattggcatcatacagcccaatgccaccgcctgccaatacatcgaatgactttacttcattcaacgctttcaggatcttaccttctgtctccatatcaggacaagccatcattgtacttgccactcccgggaaggaaatcgatttggcattgctcgtactagtttcaaaacctccgttaatcaggttgcatccggcattaccatgaatagactttttcttcacatcaaaagcgataaacggttgtttctccattcctgaaggaatcgcctcaccatttgcttctttaattttccattctccattcaacactgaaagtttcacatcagcctccttcttttcaagaactacaaccggacgattggaggcattgcaaagatacatcttccccttacctgctttcttatatcctttcacttgtgcaagagcactcaatacattcttctcggtagtcatatccggacacatcatccgagtactggccatagcacctaactcaaggcttcccggtttcgcatttacatcgaatgtgcccatcatacggttacatccgctattaccggacacacgaccggtagccgtatcaaatgcaataaacggaagggttctactttcgcccagagcaactttcgagccattgacttctataatattccactcaccattgatagatgacacaggaactgccttctcaaccgaacggcatgaagacattgcaagtgctgcacctgcaacgcaaattgaaacaaaaactttcttcatattgttataacgtttaagttaaatcgtggacaaagataccaaaaagattgggaaataacacccaatacaatataaaatatatacatttgccattgaatatacaacaaatgaacaatttacatagttcacttaaagaaataaatatgagaacaatcgtcctatccgtgattttattctgttgtggtatgtctcatgttaccgcccaaagtgattacattgtcactaccccctccgcccaggaaattcctgcaagtgaagaagaacagtttatcataaaacactttcctctaaaacctttatgtaaatggactcccggaatgaaattcatgtttgctccttccgcacgggaaatgtttcttcctacccttttaatatacaacaccgaaaaaggagtggataatagcctgatgagacacaaaatactcactttcaccggaaccgaagagaaggttcaaaaaatagcagatgaaacaaactacaccacccgcttcgttttcgaagatgaaggggaaaaatattattatgacataaagaatatgcggctggacgagatatgcgaaagaatgccccgtgcctgcatcaacggattagtttacctgcaagatgtagatacggcaaaagatctgctgataggaaagacaatatacatacaatccgaaactgtccgtgtggatgatgccaacagctattccggctatcgggatatacctatttccgtcaatacggaagcaactgtcacggccgtcggagtgggcagccaggcgtatcccgtgaaaatcatattcaaagacacacagggacattcctattatctggaagtcgccctctcacggacaaactccggtatggacatgagtgattttcaaggtgaaaagagaatgaaatacttttcaaattcgatcagttttacgaataagaagctggataatatcgaaagcctgaaaaacaggtacttgggggcaaccgtttatcctaaaaaaacattgtctgccaaaagagctgtctctcttgaaaacaaacaaatggagtcccgcgttcatcttccccggtacactatcctgacaataaaagaagttcggatgccctctcccggcagtctggctattttgacattaaaagacaagaatggaattagttacgaaatgaaggttgacttgaagtatgacgtaatcaccagaaacaacaattatattgaagaccttttcgggtttgaagatatacataaaaaatatccgggcattaccgagaaacgttggcaaatcatttcgcggggcgacctcgaagtaggcatgagtacggatgaatgccggctgtctatcggcgacccgatagaaatagtactgaaaaaggataaccgttttgagaactggttctataacggcaaaacattggaattcgagagcggcaccttgcaacgtttcaaataaaaaggagtatcggcgaatgattatctgaaaataatcacgtatatttgccaagctaacaattctaatattcttaatatttaattcgcaattaacgaaatgggtagagttcttattatcggtgcaggcggtgttggtactgtcgttgcacacaaagtggcacaaaatgccgatgtatttacagatatcatgattgccagccgtacgaaagagaaatgcgacaaaatcgtcgaggcaataggtaaccctaatataaaaacagcaaaagtagacgcagataatgtggacgagttggtagccttattcaacaatttcaaacctgaaatggtgattaacgttgccctcccttatcaggacctgaccattatggaagcatgcctgaaagccggagttaactatctggacactgccaactacgaacccaaagatgaagctcattttgaatacagttggcaatgggcttatcatgaacgtttcaaagaagctggtctgacagctatcctcggctgtggattcgatccgggagtgagcggtatctataccgcctacgccgccaagcattatttcgacgaaatccaatatctggacatcgtagactgtaatgccggcaatcaccacaaagcatttgcaaccaacttcaatccggaaatcaatatccgcgaaattacccagaacggacgttattatgaaaacggccaatgggtaactaccggtccgctggaaatccacaaagacctgacttatccgaatatcggtccccgcgattcatatctcctttatcacgaagaactggaatcattggtgaaacacttcccgacaattaaacgcgcacgtttctggatgaccttcggacaggaatatctgacccacctgcgtgttatccagaacatcggtatggctcgtattgacgaagtagattacaacggagtgaagatcgtacctctgcaattcttgaaagccgttctgcctaatccacaggatttgggcgagaactacgaaggagaaacctctatcggttgtcgcatccgtggtctgaaagatggaaaagaacgtacgtattatgtttacaataattgcagccatcaggaagcctataaagaaacaggtatgcaaggagtaagctacactaccggagttccggccatgattggcgccatgatgttcttcaaaggagaatggaaacgtccgggcgtaaacaatgtagaagaatttaatccggatccgttcatggaacaactgaacaagcaaggtttgccttggcacgaagtgttcgataaagatctggagttgtaggagatcagtcgtatattaaaaagaaagttatgattaacgtaggagataaagcaccggaagtattaggcatcaatgagaaaggtgaagaaatccgtctgagtgcttacaagggaaaaaagattgtgttgtatttctatccgaaagacagcacatccggttgtacggcacaagcatgtaatctgcgcgacaactattcggaattgcgtaaagccggttacgaagtaatcggtgtcagcgtggacaatgaaaagtcgcaccagaagtttatcgaaaagaacaatcttccttttacgctgatagccgacactgacaaaaagttagtggaagaattcggcgtatggggagaaaagaaactgtacggacgtgcttatatgggtactttccgcaccactttccttattaacgaagaaggaattgtggaacggattatcactccgaaagaagtaaagactaaagagcatgcctcacagattttaaatcaataattccattaattataaggtatggcaaagaaagacgaacttaattttgaaacagataataaaatggcatcaagcgaaaaactaaaagccttacaggctgccatggaaaagatagaaaagagcttcggtaaaggttctatcatgaaaatgggtgacgacagtgttgaacaagtggaagtgatcccgacaggctctatcgccttgaacgtggcactaggtgtaggaggttaccccagaggtagaatcatcgaaatctatggtccggaatcttccggtaaaacaacattggctatccatgccattgccgaagcacaaaaagccggtggtatcgctgcttttattgatgccgaacacgctttcgaccgtttctatgcagccaaactgggagttaacattgacgatttgtatatttcccaaccggataacggagagcaagcattggaaatcgccgaacaactgatccgctcctccgctatcgatatcattgttatcgactccgtagccgcattgacccctaaagctgaaatcgaaggcgatatgggtgacaacaaagtaggtcttcaagcacgtttgatgtcgcaggcattacgtaaactgacagcagccgttagcaagacacgtactacttgtatctttatcaatcagctccgcgagaaaatcggtgttatgttcggcaacccggaaacaacaaccggtggtaatgcactgaagttctatgcttccgttcgtttggatattcgcggtagccaagcgattaaagacggcgaagaggtactcggaaagctgactaaagtgaaagtggtgaagaacaaggtggcacctcctttccgcagagcagaattcgacataatgttcggtgaaggtatctcccactccggagaaatcatcgacttgggcgccgatctgggaattatcaagaaaagcggttcatggtatagctacaatgatacaaagctaggtcagggacgcgatgccgcaaaacaatgtattgctgacaatccggagcttgcagaagaactggagggcttgatttttgaagcattgaagaaaaaagaataagcggatctcctccgtctttttaagacggaactgcatcaaaataaagtgggaaaatatcgtatggtacgaatattctcccacttttctatatatcatttgtgtgtttttcttatacaaaatagatatatgccaacgtgctcaagctaatcactacccaaagcaaaactccctgtaacaatggcttaattccgactgtttttagcacatcaagagaaagagaagcgccgataaagaacatggtaattgtcaatgttttacgggcaattccgttgatcacagctcccaactgcggcactccgtcaagtaaataagtatttaccaccattgccaacacaaagaagaagataaaccagggaatactgatcttctgtcctttacttttaaagataaatgaagtggcaaaagccataggaattatccagagagcgcgagtcagtttgatagtagtagctactttcaaggcttcctctccataagcagcgcctgcaccaacaaccgaacttgtatcgtgaatagcaattgccgcccaagttccgaactgttgctgatccatactcaaagcatgaccaatcatcgggaagataaaaagtgcaatcgcattcaaaataaaaatagtacccagtgcaacagacatttcactatctttcgccctcaacaccggtcctacggctgcaatggcactcccaccgcaaatagcagttcctgaactaataagataggcagtgttccggtctatcttaaacaacttacgtccgatgaaccaaccgatcactaaagtaccgattacggaaataactgtaaactccataccttctttaccggaagccagagccgaatgtagattcattccgaatcccagtccgacaacagaatattgcaataaatatttagatgttttcttattaaatttcggatgtgcctgtccgcaagtcaacgcaaaaataagtccaagaaacaaagcaaccggaggagtcacccatgccgaccatgcctccaaccccggaatatagtctaaaaacagaaagaaagtcaaagtagaaagtagtgcaacataaatggttttgttgtttccctgcaacgtttttgtagctgttgaaatcatatattttatctttaattgttttcggggtgcaaaggtacaggaaacaatcaagacacactaatagtttctgattatgtattataacttttagttatagataatctattcagaactatccttacacagttataatatcttttccgaaaggtgataaagctaatgccgccaacttaaagtgctgtaaaccaaaaggaataccaataatagttatacacaacaccgccccaaaaagcaaatgtgacaaacaaatccaaataccccctagaaatatccatattacattcatcagtatataaagacaaccgccggaacgacttccgcttctaacttccttgccaaaaggccataaagcaagtcctgccaattttaatgtttgcatcccaaaaggaataccgatgatagtaatcatcattaataaacttgagataagatattctaccgccgtaaaaattccaccaagcaacagccacaaaagattcataaaacagcccataatagtaatatttaattatatatataaattccttttagtcatctcgtccgtctcattctaataagtaaaagcacgtttataatcgctttgtcggacatcaagaaatcattgtaaattataattttctatatccattatccattgatttttaattctttaagttttctatgagtatcagtcaaataatccagaatagaaatatttcacccatgctacataaatatcttgcgccaaaaggcaagtatcaagcaaatatccgggagtagacgcaaactctctaagtcccctataataaaactgcttatgccgctcgtctataataaacggaactacgtcatggcaaagacactcacggaacatgatcaatcgtcctactctaccatttccagatataagccctcccctttcgtttagcttgcttttcttccagaagatatatggtgatcttatccattaagttcttgtatttgatgatataagaacaaagataaaaaagaaatatgagattttatacagagtatgagcaaacttacccagaatctctggaataaacgaataaaatgggagaaatggcattgaatggcttatgaataaagcgtttatgatgccaaacgaagccaacggagaaaaagggaaaatgcaaagaacccctgcttgatggaaataaagggactaatatgtaggaggcaatataaccgtagtttatatgttaagtcggtagatgacatatctttcgcaaccggcatcattgtattttctttccttcatccgcattgttgcactctagtaaacagatcggtgcactcgggtagatagccctattcactccagtgcacaagcctgtttactggagtgcaacgataggaatttcttattgaaaatctattgatttcagtaggatattctttgattgtcagttagttataacgaagatgaacaatagttttgctacagtttattaagtgttgatgattggatgatgagaataacgtttgcaatagtatgagaaataccaatgatagtatgagaaatgcggtattttaagcgtgttttcttgaataaattatgagaaatacatgtaaacattttaattctcataatttatatgattagtaatcagaaggataactttttatatgagaatatgagaaatgaaattgaaaaatcttttctggtgccacacattactaaaaaacaagaccaacttcccgccattttgttgcatcgtaacgcattgaaatgctgggaagttaatctgtatgtaaaagtaacggaaaagccgattacagacttttactatgatgtcccgcaaaccgcataaagacttgggataatcccccctcctgcccttgcagttgcacaaagttaaattcacgctgcataggcattccctttatctcaattacacgcagattacctgcaacgagttctttatgtacggaacggatagatacaatccccatacaatcagtatgttcgaggaaaagtttaatgctttccgtactgccgagatacatcattacatttaaagaagacagtttcagattatgctgcgacaaagcacgttcgaagacatccagcgtcccggaacctctttcgcgcagaactaatggaatattcggtaagtcttccggagtaatctcatcctgaatatccagcttggtatgcgcgtgcaccactgctacaagttcgtcctgcaagaatgaagtatactttaagttaggcagacgaaagattccttccaccaaacctaaatctatccgatgttcctgtaaggctgtttccactccccgggaatttccattgattagagaaagattgacctgcggaaacttagctatgaaatttcccaataaaggaggaaggacatattgggcaatcgttgtactggcacccagtctcaattcaccaatatactcgttatgcaacaaatgcatctcatattccagttgcttgtaatcatccagaatcttctcactatgcttcaacagcaattcccccgcatcggtcagcgaaattttacttccctgacgctcgaacaaacgagcctgataataagtctctaactcctggatatgcttagtgatagcaggctggcttacaaacagttcttgcgaagctttcgtaaaactcaggttcttcgctacactttggaatacttttaaacgaaaatcagacacagggctaaattttaagtattaaatatataggtatagtcagcaaatataggaactgatattattgtagttcgtcagctttgatccccaatgcctgcatcacaggaaaagccaacatttcccatttatacttcaccggagcatccggttcgttcatgcggaactgaatcacttccttatcttttatttcattcagcgcatcagccactttcttcccgtattcttcattaaaggaaatcacaatcattcttttcacatcagccgaatcggcaacaatagacagcaaatccaagaataaatcttcccttgtcaccattccctccgaagggacactggcaaatgaatattctccataagggctttgaaaagcaaccccgttcagttctttctccagatcggaaggccggcaatgtacaagccgcccagactccttatcgtaaacaaaaagaaattggacttcatttttcccttccgtaatcccggcgtccaaagtaagataggtagtcagtatcgaaaggtctatctcttgtaaagaacgttgcaaagtatcttcaaagtatcctttcatatctgtaattacaaagttcagaaaagctgcatcaatcagcactactgtttcagacagttttatttgaggtttatcgttcatatcttatttacaataacattacagccgataaagatactacaatacttttatttatcctcctcatttcgcagcaaattcgtcagtcatacactggaaaaagaagccattttgtcctgtaagctccttataatcatgctattttgtcacatttttctacttggcaaatcttttgcgcccttttaagtgttattagaaacatgaaaaagaaaggagaacaacgatatgaactttaacaattttacaatcaaatcccaagaagcgatacaggaggctgtaaatctggtgaaaagccgggggcaacaagccatagaacccgttcacatcatgcagggggtgatgaaggtaggcgaaaacgttacgaacttcatcttccaaaagttaggtatgaatggacagcaagtagcggttgtcgttgacaaacagattgattcgctgcctaaagtttccggtggtgagccgtatctgagccgtgaagcaaatgatgtattgcagaaagcaacccagtattcaaaggaaatgggcgacgagtttgtttctttggaacatatactgttagcgttgctcactgtaaaaagcactgtatccaccattctgaaagatgccggaatgacggaaaaggagttgcgtaacgctatcagcgaattaaggaaaggagaaaaagtaacgtcacaatccagtgaggacacttatcaatcattggaaaaatatgccattaacctgaatgaagctgctcgtagcggtaaactcgatccggtaatcggacgtgacgaagaaattcgacgggtacttcagatattaagccggagaactaagaacaatccgattctgattggtgaaccgggtacgggtaaaacagctattgtcgaaggattagcacatcgtatcctacggggagacgtacccgagaacctgaagaacaaacaggtttattcgttggatatgggtgcactcgttgccggtgcaaagtacaaaggtgagtttgaggaacgtctgaaatcggtagtcaatgaagtgaagaagtcggaaggtgatattatcttatttattgatgaaatccatacattggtaggtgctgggaaaggcgaaggtgccatggacgccgcaaatattctaaaaccggctctggcccgtggcgaactgcgctctatcggtgcaaccacccttgacgaatatcagaaatacttcgaaaaggataaagcattggaacgccgtttccaaattgtacaagtagacgaaccggataatctgagcacgatttctatcctccgcggactgaaagaacgttacgaaaatcaccatcatgtgcgtatcaaagacgacgcaattattgcagccgtggagctaagtagccgctacatcaccgaccgtttcttgccggataaggctattgatcttatggacgaagctgccgccaaattacgaatggaagtagattccgtaccggaagaactggacgagatctcccgtaaaatcaagcaactggagattgagcgcgaagctatcaaacgtgaaaacgacaaaccgaaactggagattatcggtaaagaactcgctgaattgaaagaattggaaaaatctttcaaagctaaatggcaaagcgaaaagacgttaatggataagattcaacagaacaaagtcgagatagagaatctgaaattcgaagccgagaaagctgaacgcgaaggagattatggcaaagtagccgaaatccgttacggaaaacttcaggcattggataaagaaattgaggatactcaaaagaaactgcgcgatatgcagggagacaaggcaatgataaaagaggaagtagatgccgaagatattgctgatgttgtttctcgttggacaggtattccggttagcaaaatgctgcaaagcgagaaagataaattgttgcatttggaagaagaacttcaccaacgtgtaatcggtcaagatgaagcaattgaggcagttgccgatgcagtgcgccgtagccgggcaggactacaagatcccaaacgtccgattggttcgtttatcttcctcggaacaacgggggtgggtaagacagaattggcgaaagcactggcagaattcctatttgatgatgaaacgatgatgacccgtatagacatgagtgagtatcaggaaaagcatagtgtttcacgtctggtcggagcacctccgggatatgtaggatatgacgaaggtggtcagttgacagaagctattcggcggaaaccttactctgttgtgttgtttgatgaaatagagaaagcgcatccggatgtttttaatattctgttgcaagtattggacgacggaagattgacagacaataaaggaagggtagttaacttcaagaatacgatcattatcatgacttcaaatatgggaagttcctatatacaaagtcaaatggagaaactgaacggttctaataaggaagaggtaatcgaagaaacgaagaaggaagtgatgaatatgttgaagaaaacgattcgtccggaatttctgaatcgtattgacgaaacaattatgttcttgccgctgacagaaaatgaaatcaggcaaattgtcctcttacaaatcaagagcgtacagaaaatgcttgctgaaaacggtgtggaattggaaatgacagatgctgcattaaacttcttgtcacaagtaggttatgatcctgaattcggagcgcgtccggtgaaaagagctattcaacgctatttactgaacgacctgtctaagaaactgctagctcaggaagtagatcgaagtaaagcgatcattgtcgatgctggcggagacggattagtattcagaaattaaacacaatacaaaaaataagaagtcggtaggtttgccaagaaacttaccgacttctttttatatccctgtatagataatcctccgaacttcaggctgacagttcggatgactcatcactaaaacataagtaccctgtttagaaattgttatggtaagcaaaggtaaagcaaattggtgtttttcccttaattctccttgagaatcatataaaaataccattgtacctgataacaaattagtcaagcataactcccctgattcattatccaaacagatattcactcctttattcgttattgtctccattccctatataaagcctcctgttccctggaaggtgattaattataaaaaagcgtgagaactacacaatttatcatacttgaggtcactggataactcaagcatcgaataatatctttaaacgcttttgttgtccattttcattttaactgccatagacatcgtgaaaaatagagaacaacgacaaagatacataaaaagcaccattatttacaatataagtagaagatatttattttaataaaagattacccaaattatactaatttttttctgaatttacaaacatctctataaaaaaacatgataaccacattaaatgcgattatcatgttctttagtctcatttagacaaatgacattaattattattctgctactgtctcttcttccccaacttccgcttctggtttaaattcagtaagtccattagatatcaacgtattataccaggaaatcaatttcttgatatctcctacatgcacacgatcacgatcgaaattaggcaacacttcagccaagtattcacggagttgttccggactagccttcttcggatcaagagaagcaattgccgaattttctttctttttcatcgcttccaacacatcatacaaaggaacttccgcatcatctgtgtacattgcgatatctgccagagagataattttttcattaccataagcggggaaacgcttcttatcagcattgattgattcaacaatcaacatattttttccttgcgaaataagtttgtacaatcccggttttccggagatagacaagatagtcttcaacatagtatatattcttttatttattaattattttttagcgtcgcaaaggtaatgattatttttagatagcaaagaaataagctccaaaacctgcggaattaacggtgtttcattgtcatttactatcacaaaatcggcttgttcccgcttggcctcatcactcatctgtgcctcaatacgcttcaagaccaactcccttgatgaacagtcacgtttcatagcccgctctactctcacttccaacggtgcataaaccattacaaggaaatcaacttcttctctaaaaccggattcaataaggatagcggattccataccaaccagtccgttattcccgaaacggactgtccattgccggaaatcatcttttacccgtggatgaataatagcattcacttctttcacgtgctccggatacccgaacatatactccgccaataaagtccggttcagttctcccccctgaaatacttcctgaccgaccaaagcacaaagttcccggcgaatcactgtatcggtacaagtaatacgtttcgcttctgtatccgatatataaacaggaatacccattatctccagcaaccgggaaacaacgcttttcccgctaccgataccaccagttataccaaccttaatcaacatcggaaaaagaagatacttgttctatcaaaaagtctacttgttcgggtacaatacggatttgatttatcccattcggaaatgatttcaatttaaccgtatatttatcagaaccaagcttcaacagttcttcataagagacatttatcacaaaatcatcggctttaatactacgaaaacgcttcaatcctacctgaaaagttatctgaactttagaaggaaatgcacgtagggccttatccgccggaaaattaattccatgtaacggtacttcgactgttttctccgtataaatatctaccggaaatgtcgcctcaaccgaacttggaacgaactttactcctcttaacggagccaaagatattcgttgccgagtggtatccgaaatattctccagatttattttttgggtataagcagtagtaatcgtatccaaaatcccttcgggcgcatacaccaacacagaatccggattacaaattgtatccgaaacataatattgaagcccggcagttaccttcccctgaagacggacgggtactaacttggattttccctcggaatagatgtattctaatgtatccggctttatcgagagtattttagaagagacattcaactgacttagtatctttttctcaaaatcggatgcataaatcttcacatgattatttttccctttataatcgagaaaacttaaattgactggaaaaaaactttttcccaacatataattaagcagtacagtccccttatccttcacccgaacccgaagttcagaaggaggttccgaagtcagcactacattattgggaaggtcttttactcgtaccggaatagaaaattccgcttcataatcattatttaacgtttggagtaaccagaatccaccggctatcaggaaaaaaaacaaaaaaattaagaactccctgctcttatcgctaagcaggaagtccttaattttcttggatagttttaaatatgtgtaccttattttcctacgatcaagcataggcattgtttaccatttacttagattgattactagcagccgaagcgtcagcgaaaatagagtttttatctatctttatctttacgttagaagcaatttcaagtacgatataatcgtcagtaatctccttgattgttccgtggataccaccagcagtaataaccgattgattaacctgaagagatttacggaaatttgctatttctttctgcttcttattttgaggacggatcataaagaaatacatgataacaaacattgctatcagcatgatccacatcatacttccacctccggcagcaccagcaggagcttgcaataatacagtcaatacattcataaaaaatcagttttagtttctactatatggacaaaggtattagtttttagtcaacttaccttcttttttcaattgattaactattccatctaatgttccgttaataaagctaccgcttttggatgtgctatacaacttcgcaatttccacatactcatttaacgaaacactgaccggaatgttcgggaaacttaaaatttcggctaaagcagtttgcataatgatgacatccataaatgcaatacgatccagttcccagttctttgtattttcgctaacaagatggcgataatagtcggaatttaaaatagtacggcggaacagacggcgtgcgaattcctggtcttcgtcatccttaaattcaggaagtaattcctgattggcacccttcttttcatcgaaacgcttaatggtcttcaatacgaatgtatctacaatttccttatcatcgttccaatacagactctggtcctccaatacctggtcgagagaatcattattaaagatatatgtcttatagatttttctccataattcgcgatcagcttcatatgagttatcatcagaggccatataatccttatatatatcagtttctacaatcttctcatatagttccttcacgaagtcctgatcgtttgcccaagtccttttttgattggcaataaactcggacagctgcttattgacttccaattgggcaataaacttattttccacaaactttttgttgggatacaattcttctttcgtgggtgccaatttagcttttgccgcatcaatacgcttttgcgcatactctgtcaatgctatcatcagcattagcaaatagttgtaaaggtcatacgcctttgaaagactaaagaataactctttctccgctgagtctagatttttgctaccattctgataataggcatatactatctgtataatcttaagacgaataagaactctgttgatcataaattcaatttatactattgttatcgaactgcaaaagtagatatttttaatgagtttccacaaataaatcacattttttaatgcagtatttgattctctgcgctttttcttttgacagtttaaaaaaaatatccaattttgaagccgattataaacggaccgaaatatatggaagatttaaaaaagaaaatgagcgcagacatgaatgataaggagatcgtattctccaagtccattaaagcaggtaaacgcatctattacctcgatgtaaaaaagaaccgtaaagatgaaatgttccttgctattacagagagcaaaaaagtgataatgggagaaggcgatgattctcaggtgagtttcgaaaaacacaagattttcttatatagagaagattttcagaaattcatggcaggattgacagaagctatcgatttcattgatcgcaatgacatgaacgactatatcagccgtttaacccaggaagcagatatggaaaaagagcaagctgctattgaagaagaagcaaaagaggaaaaattggggagtgaaatcaagattgacattgatttttaagaagaaagctctttgatatatcaaaaaaagaccgtacctttgcaccgcttttttgcgacatcgtgtgataatccacatcgtgtaatggtgaattaagcaaactaacttaatttagagtaacacaattttttaaagaaatgaaatcaattgaagtaaaaggaactgcaagaacaattgcagaacgctcttcagaacaagcaagagctttgaaagaaattcgtaaaaacggtggtgtaccttgcgtactttacggaggtaatgaagtagttcactttacagtgcctaacgaaggtcttcgtaatttggtttatactccgcatatctatgtagtagacttgattatcgacggcaaaaaagtaaacgctatcctgaaagatattcaattccatcctgtaaaagatactatcctacacgtagacttctatcagatcgatgaagctaaacctatcgtaatggaagttcctgtacagttggaaggtcttgcagaaggtgtgaaagccggtggtaagttggctttacagatgcgtaagattaaagtgaaagctttgtataacgttattcctgaaaaactgacagtgaacgtttctcacctcggtttaggtaagactgtaaaagttggcgaattgagcttcgaaggccttgaattgatgagtgctaaagaagctgtggtatgtgccgttaagttgactcgtgcagcaagaggtgcagcagctgcagccggcaagtaatttgagactattcctgtaaagagatttactttaaacgcagattaatgcagatgaaagcagatgttaagtctgtactagtttgtattaatctgcgtttctttttctatattaatgaactgttttacggataagtaatgataaaatatttaattgtcggactgggaaacattggccctgaatatcatgaaacccggcacaatatcggatttatgacggtagaagcattggcaagaatcaataatgctcctccttttattgacggacgttacggattcacaaccagcttttcagtcaaagggcgccagttaatcctgctgaaaccttccaccttcatgaacctaagcggtttcgctgtccgctactggatgcaaaaagaaaacatcccattagaaaatgtgctgatagtggtagatgacttggcactccctttcggtactttacgtttaaaaggaaaagggagtgacgctggacataatggattgaagcatattgcctcaaccttaggaacacaaaattatgcccgtctgcgatttggtatcggtaatgatttcccacgtggcgggcagattgattatgtactgggacatttcacagatgaagattggaagacaatggaggaaaggctggcaacggcaggtgagattattaaaagtttctgtcttgccggaattgatatcactatgaaccagttcaataaaaaataaagataataactaaaatggctgaagcaagaatagacaaatggatgtgggctgtacgtatcttcaaaacacgtacgatagcagcagaagcctgtaaaaaaggccgtgtcaccataaatggagcactcgtcaaagccgcacgtatggtaaagccgggagatgtaattcaggttaaaaagccgcctatcacatattcattcaaagtgctgcaagcaattgaaaaacgtataggcgccaaactcgtccccgaaatgatggagaacgtcacaactcccgaccaatatgaactattggaaatgagtaagatcagcggcttcattgaccgagcacgaggaaccggacgtcctaccaaaaaagatcgacgaaatctggaagagtttataacaccagaatttatggacgactttgattttgaatttgatttcgatagcgaagactaaccgaattaacgcctaagcaaggtttcctttgttacatattgtcattttaggcacgaattacagaatgctcgttttataaaaaaacggtcacacaaaacaacaggataatccgtgcctgaaattactacttacagatttgcccttactgcatcaatcaattcctgatactcagcatccgtcaaataaacctttcccggattcatctggaatataccaccatagtcaggaccatccacatatttcggagccaaatgaaaatgtaaatgagataatttatccgaataagcaccataatttatcttttccggttgaaatgctttctgcatggcgcgggtaactcgtgtcacatctgccataaaagcattacgatcttcatcgctcaattcattcaaatcgtttgcgtgatccttgtaggcaacaaggcaacgtcctcgataagtttgttccttaaacaggaatacacgtgatacactcaactgcgcaatctcaatcatcagattatgcagcgtttcattgttctgacaatacagacattctttaggatcgcttttcatgatacaattattttatattttaacgaaacaaaaataggtgttctatttttatccgacctgtactttttcgcttttttgatcgattaattggtatacatcctctttctcacctaccacccacactacatctccttctacaagcggcacatttacatccggtaccatcaacgcaccgtcctcattttcaatgcccgctatcatacagtgatacttatcacgaatacccgattcacgaattgtcttacctagaaagacagaatctgcatctatgataaactgcctcaaagccatttcactcttttcatatacatcccagtcgatctttgcgccattttgcatagcctcattaaaaacactcaattgctcatccgttcctatcacttgtatcttatccattgggaacaaacggacggagcctccgggaatgttaatccttctctttccacgaagaatagaagctacatgtacaccgaacttctttcccaaattcagttccagcaatgttttaccagcccaagaagattctccgggaatttccatatcggcaagatgtaaatcatgagacaacaaacgtccggcatattccggtttcttttctcccagatattctgcacgcacatctcttgaacgaagattctgaaagaaacgtcgctcaattaatattgactgttttttcaaacggcgtgaccataccataagcaacacgacaagcacagcaacccctattattaagccgatagatgctttgaacaatcccgatattacaaaaataacgaacagtgccgctatcataatccggataacgatagtagaaactaagggagcacgattcgtacggctatcatgccacaaagtcacaaactcgaccgaatgatttttcttcaccataatagcacgcaaaaaaggagcaatacatagaataacaaagaccgctcccaacagtgacgcccagaaatggggtaagttctccttaaagaacggtaccacaaagcggaaagaaagagcaatgatagatatgctgactatcgaataaacaactgtaatacgcaccattgctatcaataactttttccacagattttcgtgattgagtgcggtttgcgatccggaagaataacgcatcaagaactttctccaggattccggcaagtgagcatcaacaaaagtggaagcgggttccgccagacgaatcatatagggagttagaaaagtggtaataacggaaactgccaccactatcggatacaggaaatcactcgtcacatgcaaagatactcccaacgaggctataataaatgcaaactcaccgatttgtgtcaaactaaagccacattgcatagctgttttcaagggctttccggaaagaattactccaaatgttccgaaaattgcctgtcccaaaattactgccagagtaattactatgataggtatggcatactccacaatcattgccggatctaccatcatacccaccgatacgaaaaagatagctccgaaaagatctttgaccggtttcactaatcgatctatggattccgcttcgatggtctcggctaagatagaccccataatgaacgcaccgaatgcggcggagaatcccgtattggcagccattaccaccataccgaaacataatgccagggatacgataagtaaagtctcctctcccattagtttcctgcaacgtttcagaaattcaggaattaaataaatacccactacaaaccataaaataaggaagaacaataactttccgatactttccaacatctccgtaccttcaaaattatgacttactgccatagtggaaagcatcaccattaaaacgatagccaatatatcttccagaatcaagatacttaacacaagccctgtgaactgtttttttctcaatcccagatcatcaaatgctttataaataatagtagtagaggacattgcaatcataccgcccaggaacagactatccattcggtgccatccgaaactcataccgactcctatccccaacaaaatcatacaaaagataatggtacaagcagctatgatagcggaaccacccacttttacaatctttttaaaactaaattcaagcccgagagcgaacaataaaaagataacaccgatatccgcccatgtcttaatgttggcactatccattactgaaggcgtaaacggcatatgaggacttgccaaaaatccggcaacgacataccccagcactagaggctgcttcaacttcttgaataacagagtcatgataccggcacagatcaatatcagtgcgagatcagctataagagtaggtaattgagacattagttcatcgtatttgatgacaaaattataatatttctatggcataaacaacatattaacggatatgtttcatagtaaccgtcataaaatcaattagccccggaaaacgttgacatatttccgaggctaacctataaaatagagtttaatctttattttctaaaaggtggtttcaccactactgctttcagtttacgtccgcgcatatcaatgcaaatttcagtaccgattttactatattccggtttcacatatcccataccaataccaattttacgggtaggcgacatagtaccggatgtaaccactccaatcttctctccttcctgattcactagttcataaccgtgacgaggaatcccccggtcaatcatttcaaagccgactaatttacgagttgttccttccgctttctgcttctctaacataggacggttgataaagtttttgccttctacaaatttcgtgatccagcccaaaccggcttctataggtgaagtcgtatcatccaaatcattgccatagagacagaagcccatttccagtcggagtgtatcacgcgctcccaaccccaccggtttaataccaaattcttcaccagcttcgaaaatagctgtccaaattgtatcggcagcactcggatagaaatagagttcaaaacctcctgcacccgtataacctgtattagagattatcacattgtcctcgcctgcaaactttccaactttaaaagtataatatggaatagatgataaatcaacatccgtcagtttttgcaaagcaagaattgctttcggaccttgcacagcaagctgacctatattatcagaggaattttccaactccgccccctctgtattatgagacacacaccaatcccaatctttatccatattggcagcattaaccaccaacaaatatttttccggttcataatgataaaccagtaaatcgtctacaataccaccatcttcattagggaagcaggtatattgtatcttaccgggagttaatgccgccacattattggaagtcactttctgtagaaaagccaatgcattcggacctttcacccaaaattctcccatgtgggatacatcaaacacaccgactaaattgcaaacagtcagatgttcatcaatgatgccggagtattctatcggcatattataaccggcaaactcgtgcattttagcacctagtgctatatgtttctctgtaaacggagtggttttcatgaatctcagtttttaagtattaagtattaagtttatatatcaggtatatccgtaattgaaaatcatctggaagctaccagctcggcgatcttcacaataacgttcatcgccttttccatattctgaataggaacaaactcataacgtccgtgaaaattcagaccaccggcaaagatattcggacatggcagacctttgaaagaaagctgcgcaccgtccgtacctccacgaattggcttcacattcggtttcacgcctacggcttccatagcagcaaaagcgatgtcaataatgtgcattaccggttctatcttttcacgcatattataatattggtcgcgcaattcaagagttacagtgccttcaccatattcggtattcatccgggcaaccaggcgttctatctctttcttacgttcttcgaatttagcccggtcatggtcacgaataatataagaaacagtgcattgctccacttcgccctgaataccgatcaaatgatagaatccctcgtagcctgtcgtatgttccggtctttctatagaaggcaacagagtgataaactgattggcaagatagatcgagttaatcatcttatttttggcgtaccccggatgtacattgcgtcccttaaaaagaatcttagcagcagcagcattaaagttttcaaactctaactctcctacttcacctccgtccattgtatatccccattcacaaccgaacttctccacatcaaatttatgagcgccttcaccaatttcttcgtccggattaaagccgatgcgaatcttcccgtgtttgatctcaggatgttctttcaagtaaacaacagccgatactatttcggcgatcccagctttatcatctgcacccaacaaagtttttccgttggtgacaatcaggtcctctcctttatgatcaagcaattcgggaaattgaacgggagaaagaattatattatcttcggcacaaagcatgatatccgaaccatcgtacttttctacaatacgtggagtcacatctttaccactcatatcaggacttgtatccatgtgggcaataaatccgattgtgggtacatccttatctatattggcaggaagcgtggcaaaaagatagccatgctcatccagagtaatatcctccaggcctaaagattccaactctgttttcaaatattcagcaaataccatttgcttcggagtactgggggtaatccctgtcgattcatcagattgtgtatcgaagcttacgtactttaagaatctgtctactaaagtcatgttatttaattacaagttattaattacaatttacaatttgatagtttatagtgccgtaaaggtaaaaaaagagccgtgaattacaaagcaattcacggctcttttttattgtataatatcttttaaaagtggctactaccatcaaagcagtgtgtacacactttacatttcggcaatccgatagcttcaatcaatgtttcgagagtattaaatttcaaagaagtcagaccgaagcgttcggcaataatgctaaccatcttctcatattcaggagagccggtggtagcatatttctccagattcttatcttcgtcaccttccaattcctttataatacggcgggtaatcaactccaacgcattcttggaagctgagaatccgacaaacggacaagcataaatcaacggaggacaagcaatacgcatatgtacctcttttgctccataatcatacagaatcttcacattatcacgtaactgagttccacgaacgattgaatcgtcacaaaacaacaaacgtttgccttggagcatggcacgattcggaatcagtttcatcttcgctacaagagaacgcatctcctgattgctcggtgtaaaactacgaggccatgtcggtgtatatttcgaaatagcccgatgataagggactcccttgccttctgcatatcctaatgccatgccgactcccgaatcaggaatgccacaagcacagtctacttccgatttatccatttgtcccattttcaagccactcgtgaaacgtacttcctcaacattcttcccttcataacaggaagtcgggaaaccataatacacccacaagaacgaacaaatctgcataccttcacccggcttacgtagttgtacaacatgatcgctgtacagacgtacaatttcgcccggacccagatatcgatcaatctcataatccagattcggaaaactggatgattcactggttgcagcatacgcaccctctttctttccgatcactacgggagtacgtccccactggtcacgggcagcaataatacttccgtcttccgtcaacagaagcatggaacaagaacctttgatatgcttgaatacattttcgataccctcgacaaaagttttgccttgtatgataagtaatgcaataagttccgtctgattggtgttgcttgaactaagttcggcgaaatgcatattctgcgagagaagctcatcttccaattctttaatattggtgatttttgcgacagtaacaatggcaaagcgtccgaggtgagaattaataataataggctgcgcgtctgtatcactaataataccgattccggcatttcctttgaacttatccagttcatcttcaaatttagtacggaaataagtactttccagattgtggattgatcggatgaaacctcgctcttcactataggtagcaagtccaccccgtttcgtccccaaatgtgaattataatctgtaccgtagaataaatcagtcacgcagctcacttgtgagactgttccgaaaaaacctcccatgtcgttctctttattgatgatgtttttaaaaaagatgtgcaaaagtacaaaaaagaatccgtctaataaaaaaagaactccgcaaagttttagttttctttgcggagcaacaactaatatttattaaaacatggagattaaaaaaacaatctttttcacctgaatgttttaaatcactattttgttactttcttatcaaccgatgtactgcaataatgttctccataatatatatccaatcacataaaacactaattacaaaacgaataatgaaagtaaagagaaaaaagcacagtagctatgccgaataaaacagattgactatacacgtatattacacattcttcctatatttgcacacaattattttatttttccaaagagttacaccaactctgatacaaatatctaaaatcaaatgagtaaagaaattatctatatttttcttggtggcggcaccggtagcgcattgcgttattgcatacagctacttatgcacgaacggattgttccctacaattttccgtgggctactttcacggtcaatatcttcggtagttttctcatcggactattttacgctctttccgaacggttccaccttcctttcgaagttcgcctttttctgacaacaggattatgcggaggatttaccaccttctctactttctccagtgacggcatagggctgttaaaaggagaattttacggtacattcattacctacaccctattaagtatagcaataggactgacagctgtagtggcaggcggttatttaggaaaacaattataaaaaaggaacctttgcaacatgacaaaaagaaatacagctaaacccgtccgtgtagtttctccgataatggaagaacaagaaaccagtgcaagcactttacaagaatggcttgacaaggaagaaacagtctccgatcttttatttagcaaaggaaaagaagaaggaatcaacaagtcctataaaagtttcaagaactgtactttccaaaatcagatattcagcgaatgcaaattccattcatcccaactgacagatgtccggttcgagaactgcgacctatccaatatctcttttgcagaaagctctttgtaccgagtagaatttatttcctgtaagttgctgggaactaatttttcggaaaccactttgaatcatattctgctacacgagtgcaatgccggatacatcaatctggcaataagtaaaatgaaccaggtacgttttgcgcactgcctgttcagaaacgggagtttcaatgactgccgcttttcttccgtcgcttttgatagttgcgatttggtggaagccgacttctcacacgccccactccggggaatagacctacgcacctcccgtatcagcggtataacacttaataccagtgacctaaaaggagctattatcacgtccttacaagctatggatttacttcctttgctgggtgttattatcgaagactaaaatccttcaaatttcattcgcctgcattcaaacaaaaaacatcgtcccgttgttatattataagatcggactaacgacatatagggaatagggccaaaaagaatacctatttatagtgatttctcactctctgtcaagtccgtacttttgcagaaatcttattcaaaaacaatagaaacgatgaaaattgaaaaaattgtagctcgagaaattctcgattcaagaggtaaccccacagtagaagttgacgtagtattggaatcaggcattatgggacgcgcatccgtgccgtcgggtgcttccacaggtgaacacgaagcattggaacttcgtgacggtgacaaacaacgttacggtggaaaaggagtacaaaaagcggttgacaatgtaaataaaatcatcgctccgaaactaatcggtatgtcttcactcaaccagagaggaatcgactacgcaatgttggcattggacggtaccaagactaaatctaatttaggtgccaacgctatcctcggtgtgtctcttgccgtagccaaagctgccgctagttatctcgaccttcctctataccgttatatcggcggaacaaatacttacgtaatgcctgtaccgatgatgaatatcatcaacggcggttcacatagcgatgctcctatcgcattccaggaatttatgattcgtcccgtaggcgctccttctttcagagaaggattaagaatgggtgccgaagtattccatgcattgaagaaagtattaaaagaccgcggtcttagcactgccgtaggcgacgaaggtggtttcgcccccaacttggaaggtacggaagatgctctgaattcaattctagccgctataaaagctgcaggatacgaaccgggcaaagacgttatgattggtatggactgtgcttcttccgaattttatcatgacggcatctatgattacaccaagtttgaaggtgcaaaaggcaaaaagcgtactgctgaagaacagatcgactacttggaagaactgatcaataaatatcctatcgactctattgaagacggtatgagtgagaacgactggaacggctggaagaaacttaccgaacgtatcggcaaccgttgccaactggtaggtgacgacttgtttgtaacgaatgtcgacttcctagcaatgggtattgaaaaaggctgcgccaactctatcctgattaaagtaaaccaaatcggttcgctaacggaaacattgaacgctatcgaaatggctcaccgccacggatatacaactgttacttctcaccgttccggtgaaacagaagacgctacgatcgccgacatcgcagtagctactaacagcggacaaatcaagaccggttctttgagccgctcagaccgtatggctaaatacaatcagttgcttcgtatcgaagaagaattgggtgacttggccgtatatggatataagagaatcaagtaagcatactttttactttataaataaaagaggataggttttaaaaagcctatcctctttttttatatatttgatgattcgcaaacgaccagaaacattttcatgcgtatcatataataaacaagaatgaataaacaatgataaatcaggaaaagacactggaactggtagaccggagccaacggaaagacacagcagcatttgcccagttggtcaccgaatttcagccaatggtattcaggcttgccttccggttgctttgtgacgaagacgaagccagggacataacacaggagacatttgtaaaagtctggttatccttgaaaacatataatcggaagaatcgcttttctacctggctttataaaatcacctgcaacgcgtgttatgaccgtttacgttcacttcgccattcgtctttgaacaacgagttcgccttttctgattctatcaacctcgcatcggacgacaatattgaaatatctctatccaacaggcaactgaaagaattgatattgcgctataccaacgaacttcctccccagcagaaacttgttttcatgctgcgtgatgtagaagaactggaagtcatagaagtgcaaactatcacaggcctatcacctgagaagataaaaagcactctatatcttgcccgaaagaatatacgtaataaaatgaatcaaatagaccccgacttatgaaacaagaagataaaaagtacgaagaatggttgacggaaatcaaaaacagacaacccatattagaaaatccagaagaactaacagcggctattctgaataagataaccgataacgctcctaaaaagaaaaagataagatatctcgttggtgcttggatatcaggaaccgcagcaacgttattgctctttttatttataaacgatgcttgttttcctccctccctttccgaagcagaaacgcaaaatggatatgtctatcagccaaacggcacttcatttcccttaccggagaactgggaagaaatgcaactcttggagaaaagtacctacctatcctctcaatacacgcagcaccggaagctccggcagacgcgaatacttcaaattataaaagaaaaccaattaagataaacagagtatgaaaactaatcattcaatcgcaacattactactgttactgtcactgggtatgacttcgtgcagtacttattatagaatgacttcacggatagacaccaatggaagtatgcatagagaggtctatgcacgaggtgattccgctttcattgcaggagataagacacataacccatttctgtttcaattagataccgattggcagatagtaaatctggactccaccctcaaatttaatttctggggagaagaagaaaaactgaatgtaaaagcctgccggaatattcccctgataaatggagaatatttctctatctccaatggaaaagaacagatgagctctttggcaatacctacggagcagttaaagaaacgttttaaatggttttatacctattatatatataccgctacttataaagaacttccggacaaaggaccggtccctcttgacaaatatctgaataaagaagaacaaataatctggtttcgtggagacaacgctgcctttagcggtatgaacggcatcgaacaaaacgacaaactagataaactcgaagctaaattcggagaatggtacaatcgcagccaatacgaaattatttgggaagtcattcgccaatttacctcacaaaaaggtgacacggtttacgtaaaccgcctgaacgaactcaaagaaacagtctataccaatcacctgtcagggaaagacagttgtggagacgcaggaatagatgatgtctgtgcgctttttgataaagtcggtcaaacaaactattactcggaactttataaagcccatgcaaaggcaatggacaatatgtgcgaacagaaaatcaagattgctgaagtattctatcatgctatacaatttgagttgacaatgcccggcacacttctttcttccaacgccagtctttcaaccaataatataatggtatggaaaatagacggtctccgccttctgactggaaattatgtacttaccgcagaatcacgagttatcaactattgggcattcgggcttaccttactaatcattctggcaactttgggaatctttataaaattatacaggaacagataacaaaaaaagcattcagacaactacctgaatgcttttttatccggattggcatccttcttttgagcctcttgtcggattcgaaccaacgaccccgagattacaaatcacgtgctctggccaactgagctaaagaggcgggtgggtaagcttactatatcgcgccgctacaaccaactacctttgctgcgatcaagccctggaggattcgaagggagctggccgtataggacttacccgttttgcggttgcaaaggtagacatttttattgattctgcaataggtgcaagaaacttttttcaccagccaacaactaaccggctacatttcaatcaattaaaatcataaaaaaaatattcagacagtaacttttgtagctttattaactttaacaaccatatttcccctaccaaccgagattatttgtacctttgtgcgcaatttataaatgatgatgacagaaaacagaagttatttacaaaaatatgccatgcactttggcacgtatatgggaatctattggatattgaaattcatattatttccgttaggatttcatatacccttcctttcattattattcgtaatcctgacgctggcagtgcccttcatcggttaccactacgtgaagatgtatcggaataaaatctgcggaggaagtatccagttttctcatgcagtactctttactatatttatgtatatgttcgcttctttgttggtagctgtggtacactacatttatttccaattcatagaccatggcttcatcgtcaattcttacatccaactttgggacgagttaatgaccaacactcctgccctggcagaaaacaaagatattataaaagaaacgatagataccgcccgttcactcacctcaatcaacattactatgcaattactgtcatgggatgtgttttggggcagtcttctggctatccctaccggactaatggtcatgaaaaaagccaaaccggaaaacaacggactgtctcaatcgtaatttgtaattcgtaaatagtaattaataaaaatggatatatcagttgtagtcccattattcaatgaagaagagtcactacccgaactctacgcttggatagaacgggtaatgcaagccaacagattctcattcgaagtgattttcgttaacgacggaagtacagaccgctcatgggaagtgatagaaaaactcaaaacccaatcggagtgtgtgaaaggtatcaagttccgccgtaactatggtaaatcacctgcactctattgcggatttgcagaggcacagggtgatgtggttatcactatggacgccgatttgcaagatagtccggacgagatccccgaactataccggatgattacggaagacggctacgatttggtttcgggctggaaacagaaaagatatgatccaatatcaaagacattgccgaccaagctattcaacgccactgcacgcaaagtctcgggcatcaagaatctgcacgattttaactgcgggctgaaggcctatcgcaaagaggtcatcaaacatattgaagtctatggtgagatgcaccgttatatcccttatctggcaaagaatgccggattcaagaaaatcggtgaaaaggtggtacaccaccaggcacgcaaatacggaacaaccaaattcggactgaaccgctttgttaacggatacttggacttgctttctctttggttcctttccaagttcggaatcaagcccatgcattttttcggtctgctaggttcactgatgtttctcatcggaatgatatccgttatcattgtaggtgtaagcaagctatacgccatgtacaacggtctcccctatagactggtgaccgattctccctatttttatttgtcactcacggctatgattataggtacacaactgttcctcgccggattcttaggcgaactgatctcgcgtaacgcaccggaacggaataactatcagatagaaaagaaaatttgattcacattcaaccattgattatgaagaatttaattcgtatctttctcatattactaattgtcggtggtgctatcagtatccacagttcgtgctcggacgaaaacgactgttcgttggcaggacgaccgatgatgtattgcacattcaagtccattgacaaaactctcgttccaaacgttatagcaaatgacacactcgattcattaactattacagcattaggaactgactctattattctaaataatgagaagaaagttcacaaagtgatgttaccattacgatataccagcgattctactatatttattctccggtatgaccctgtacgtaattgggataacgcagacactttatacattgtgcaacaaaacactccctatttccagtctatggaatgcggatatatgatgaaacagaacatcatcagcgccaagtttggaaataaaagaaacagtgcggaaacaatagattctatctatttacgaaataaagaagccaatacaaatgaaattgagaatctacaaatattctttatataccgagagcggacacctgacgaagagactaattagtctgcttctgctcttttgtattgggcttccgttgatagcacagcagcaacgcccggtccatacacccaaaagagatcagaagaaaaaggaagttaccgagatagatacaattccgttctataacgggacgtatgtaggtgtagacttatacggcatcggaagtaaacttctgggtggtgactttatgagttctgaagtaagtatagcagtcaacctcaagaacaaattcatcccgacagttgagtttggtatgggaggcacagacacatggagcgaaacaggtatacactataaaagtaaagcagcccctttcttccgcatcggtgtggattacaacacaatggcaaagaagaaagagaaaaacagttatctgtatgcaggtatccgttatgcgttcagttcattcaaatacgatgtatcgaccctgccggcagatgatccgatatggggggacaacatcggtaatcccagtctcggagacgactactggggaggaagtatcccgttcaatcatccgggaatgaaagcctccgtacaatggttggaaatcgtattaggagttaaagtacgcatttacaagaacttcaacatgggctggtcggtacgcatgaaatataaaaccagcgtttctacgggagaatacggagatccttggtatgtgcccggctacggaaaatataaatcgaacaatatgggaatcacttattccctcatttataaactacctctttagaatataatgacaggactagagatttggctgcttgcaataggtttggcgatggactgtttcgctgtttcgattgcaagcggtattattttaaaacgtacccaatggagaccgatgctggtcatggctttcgccttcggattttttcaggctctcatgcctttcatcggctggatgttcgccaagagtttcagtcacctgatagaaagcgtagaccattggatcgcttttgctattcttgcctttctaggcggcagaatgattttcgaatctttcaaggaagaagaatgttgccagctatttaatcccaccaagctgaaagtagtattcacaatggcgatagcgacaagtattgacgcactggcaatcggcatttccttcgcctttctgggagttcaagattatactcaaatcctctctcctatttgtatcatcggacttgtttcgtttgtcatgtcgctcatcgggctgatctttggtatccaatgcggctgcgggattgcccgaaagttaaaagcagaactatggggaggtatcattttagtcatcatcggactaaaaatattggttgaacatttattctttcaataaaaagaaaaagtttctcatcaaaatatagaaaagcgtatgaaaacaaagaaaagtttcctttggctggcgttcctgattctggcaaccatttggatattagccagacacaatcagcaagcaaactattacaatatcaaagggcttgtattcggaacagtatacaacatcacctaccaatatgacagtgacttgaaaccagagatcgaagcagaactgaaacgtttcgacttttcattatctccgttcaatgacagttccgtaatcagtcgtgtaaatcgtaatgaagaattagtgacagacagtttctttcaaaaatgcttcaaccgttccatggaaatctcccgtgaaaccaaaggtgctttcgacataaccatagccccactggccaacgcctggggattcggattcaagaaaggagctttcccggactcattaatgatagatagcctgctgcaaatcaccgattatgaaaaggtgaaactagaaaatgggagagttatcaaacaagatccccgcatcatgttaagttgcagtgcggttgccaaagggtattcggtggatgtcatcgcccaactgctcgaccggaaaggaataaagaattatatggtagacataggcggagaagtggtagtaaaaggggttaaccccaaaaacaacttatggcgtatcggcatcaacaaaccgattgacgactccctatccgtgagacaagacttacaaacggtactcgacctcaccgacctcggtatggctacctccggcaactatcgtaacttttactataaagacggaaaaaaatacgctcatacgattgaccccagaacaggttatccggtgcaacacaatatcttatctgccacagtaatcgcagaagactgtatgaccgccgatgcgctggctaccgcctttatggtaatgggactggaagaagccgaaacattctgcaaagcaaaccccaagattgacgcgtactttatttatagtggagacaacggagaatttaagacttactatacggaagggatgaaaaaatacataactactccccaataaaaagacaacgaaaatatacgaataaattagaggctctattttatgcaaatagagcctctatttatataaaacagacgctctgtttgggtaaaacagagcgtctaattttcaaacattcatatcggatttgacaaacaatatcttttcacttcataaacacaaaatacaccgccgctatcaggcaaacgaatgcagccaaatgattccagtgcagtgcctctcctttaaaaaaaacagtagtaaacaccgtaaagatgacaagagttatcacttcctgaatcacctttaactgcatcaatgtaaacgggcctccattaccgataaatccgatacgattcgccggtatttgacacgaatactcaaaaaaagcaattgcccagctaaaagcaattacacctatcaacggaagagaagcaaaccaagtatattcctgtttcatcttcaagtgaccgtaccaagcaaaagtcataaagacattggatacgataagcaacaaaattgtatatattcctttcataacaaccgattttaattaatctattttatccggtaataattcttcctgtacattcgtcatgcttccccaaagactgtaacgggcctccggattcatctcctccagttgccgcaaaatccctttcatatcgctccggctggattgtgattcgtaagggcaattctttacttgcttctgataactgtgtaaagccgccaactctaccaagtcagcttcgtggaccaaacacatcggacggataatcgtcatatcaaacttcttcatcaccaagcggggaggcatggtgctaaatgctccctgataagtgatattcatcagcaatgtttccagaatatcatccatgtgatgccccaaggctatcttattacatccatgctctttggcaactgtaaacaaagctttccggcgattccacgaacaaaggaaacagggagacttacgtgtatcggtagccggatcgaaggctgtctcatattgtacaaaaggtactccatacgcttcacaatgcgctttcaaatatgccgtatcactctgataagggatatttttcatcaccacatgaactgcgacaaccgaaaagcgaggtttatagatacgtacacgcttaccgagcaattcgacaagcgccaacgaatctttccctcccgacagtccgataaggattttgtctccttcttctatcagtccatattgcaccactcctttactgaaccgcctttcaacgcggcgaatggttttctcttcttccgtaaattgtgtcatatcttcaaaaatcggctgcaaaagtaagcgaaaagaatgatttaaagaagaattaacataatagaatcgccgaaaaagggtttatttctaataaatttgtacttttgaacaattgataaattgactgttgaccgaaaacgataccgttttctaccaaaccgtcactcataaacgctaagaacgatgaaaagaaaatatattttatttctaatttgcagtttcttccttgggggagtttctgcgcaaacactggaccaggcacgcaccttattcactaaaggtgactacgagaaagccaagcctgtctttaagaaatatgctaaatcccaaccgtccaatggtaattataattactggtatggcgtatgttgcctgaaaacaggagaagctgaagaagctgtgaaacctctcgaaatggctgtaaagaaacgggtagccagcggacagctttatctgggacaagcttacaatgacacgtaccgttttgaagatgcagtgaactgcttcgaagaatatatcaccgacttaaagaaacgaaaacgccctaccgaagaagctgaaaagctgttagagaaaagcaaagccgatctccgtatgctgaaaggcgtagaagatgtctccattatcgacagttttgtggtagacaagtctactttcctgaatgcttataaaattagcgaagaatcaggtaagctgtttactttcaacgagttcttcaaaactgaaggcgataacccgggaacagtctacgaaaccgaaatcggaaacaaaatctattatagcgaaaaaggcgaaagaggaaatctggatattctttcaaaaaataagctgttagatgaatggagtaacggacgtccgttgcccggcagtatcaatgattccggaaacgccaactatccgtttgttatggcggacggtgttactatttattacgcaagcgacggcgaagggctgggaggatatgatatctttgtcacccgttacaatacgaacaccgatacgtatcttgtaccggagaatgtagggatgccgtttaattctccctacaatgactatatgtatgtgatcgacgaatataataatctgggttggtttgcttccgaccgtttccaaccggaaggaaaggtctgcatctatgtatttatccccaacaattcaaagcagacctacaactatgaagctatggaccagcagcaaatgattcggttggcacagattcattcgttgaaagaaacatggaaagataaaaaggcagttgccgaagcacaacagcgcttggaagccgctatgagccataagccgcaggaacgccggattgcagatttcgagtttgtgattgatgataatacgacttattatcttctgaaagatttcaaatcggccaaggccaaacaactcttccagcgttaccagcaaatggaaaaagactatcgtcagcaagaagaaaaactcaataacatgcggctacgttatgcaaccggcaataaacaggaaaaaacaatattgactccggccattcttgatttggaaaagagaatattgcaaatgtccggcgaactggatgctcttgaaataaatgtacgaaacgcggaaaaaacaaaataataataactctgaactatggatatacttattatcaccgttctcattatcgccgcagtaatactgtttctggtagaactgtttgtcatacccggtattagtctggcaggaatctctgcactggtttgcatcatttatgccaattactatgcatttgccaatctaggtatggcagcgggattcattaccttgggaatatcaggagtagcctgcatcgggtcgctcgtctggttcatgcggtcgaaaatgctcgacaaactggctctgaaaaaagacattgattctaaggtagaccgtagtgcagaggatagcgtaaaggtaggcgataccggtatcagtaccacccgcctggcacaaatcggttatgcagaaatcaacggaaacatcgtggaggtgaagtcgatagatggcttcctcaacgaaaagacgccgattatcgtaagccgtatcaccgacggtacaattatggttgagaaacacagaaaataatattcacttaataaaaacatcaatggaatcatctttctacttgcctatctttctgatagccggaggtattatcttcctgataatatttttccattacgtgccgttcttcctttggttgtcggcaaaagtatcgggagtcaacatctcactgatacaactatttctaatgcgtatacgtaacgttccgccgtatatcatcgtgccgggaatgattgaagcccacaaagcgggattgaaaaacatcacccgcgatgagttggaagcccactatttggccggaggacacgttgaaaaggttgttcatgcgctggtatccgcatcgaaagcgaatatcgagctacctttccaaatggctaccgctatcgaccttgcaggtcgtgacgtattcgaagccgtgcaaatgtctgtaaacccgaaagttatcgacacacctcccgttacggctgttgccaaagacggtatccagttgatagccaaagcacgtgttaccgtacgtgccaatatccgccagttggtcggtggtgcaggtgaagatacgattcttgcccgtgtaggcgaaggtattgtttcgtctatcggttcttccgaaaatcataagtcagtactcgaaaatccggattctatctccaaactcgtgcttcgcaagggattggatgcaggaacggctttcgaaatcctgtctatcgatattgcggatattgacataggtaagaacatcggcgccgctttgcagattgatcaggctaatgcggacaagaatattgcgcaggcaaaagcagaggaacgccgtgcaatggcagtcgcttccgaacaggaaatgaaagccaaagcgcaggaagctcgtgcgaaagtaatagaagcagaagcagaagtaccgaaagctatggcagaagccttccgtagcggtaatctgggtatcatggattattaccggatgaaaaatatcgaagctgatacttccatgcgtgaaaatattgccaaaccggtaacaggaaacaccggtaatcagccgttgagcaaataatttattataaacgccggaacccggtttcaattctgttccaggatgtatactcttttttctgcggaaaaagaaagatacctcttccgaacttaaatccggttccggcgtttgtatttatagatacagtcttattgtaaaactaaaacctttcaataacatgaaaaagtactttccatcctctgaattgattatcaacgaagacggctctgtattccatcttcacgtaaaacctgaatggttggcagacaaagttatcctggttggtgatcccggacgtgtggcactcgtagcttctcatttcgaaaacaaagaatgcgaagtggaaagccgcgaattcaagacaatcacgggtacatataaaggtaaacgaattactgtcgtttctaccggaatcggttgcgataatatcgatatcgtaatgaatgaactggatgcattagccaatatcgacttcgagacacgagaagaaaaagaacagttccggcagttagagttagtacgtatcggtacgtgcggcggtttacagccaaatacaccggtgggaacattcgtatgttcgcagaagtctatcggtttcgacggattattgaatttctatgccggacgcaatgctgtatgcgacttggctttcgaacgtactttcctcaaccacatggggtggtcgggaaatatgtgtgctcctgcgccctatgttattgatgccagcgaagaattaattgaccgggttgcgaaggatgatatggtacgtggcgtgacaattgccgccggaggtttcttcggtccgcagggacgtgagctccgtattccgttggcagatccgaaacagaatgacaagattgaagcgtttgaatacaaaggtttcaagataaccaatttcgaaatggagagttccgctttggcaggacttagccggttaatgggacacaaggccatgactgtctgcatggtaatagccaaccgccttatcaaagaggcgaataccggatataaaaatacgattgatacgttgattcaaacggtgctcgacagaatataaaaaacaacaagataataaccacttaataagaaatggcttgaattatacattgtgatatatattcaagccattcttcttcacttattgattcacttatataatttccgactgtttaccgattcgctcctttctttaatcaataaccaatcgtaaatctctcttgatgatgttgcggatgttccagttcatcaatcatggcggccgcataatcctctacagaaatatggctgttccccacaatgtccacaatcatgtcatcctttcccagacgataacgtcccgtacgtactcccggtcgcatatccgctgccggagagaaaaacacccagtccacttctttctctttcgtcaggaacttcagataaaactctcccaaagcttttactccgggcaaaagattctcgggtacttcaccggaatccattaatcgcaagccgggcgcaataaacaatgaacctgcaccgcctaccataagaaaacggttgactcctgctttcttcactccgtcaataatagtcagatagactttaattgtctcatcatatatatcgggattattccatcccggattaaacgcactgataacggcatccgcccctttacaaacttcgtatacttcttcaagagaagacacatccgccttcgtcactttcagactctcattttctatctttatcttttcagggtgccgaaccacggctgtcacttcaaagccacggttcaaagtctcattcaaaagagctgagccaacaaaaccactcgctccgatgagtacaaccttctttacttccttcatattccaacaaaattagagtgttattattatcttaataacactacaatttccggaatgttgattccctttcagaaaattaattaaccaatataggattctatcgtttctctcagtttttccacggaataaggtttcgatatgacagcgttgcatcctgcctgaatagcctgctgctctatataaaatgcataagccattacagcgataatgggtaccgcaaaagacatagtacaaatcttttccatagcctgaataccgtccattacaggcatacgaatatccattaatatcaagtcgggcttttcacggataaagaatctcgtgactcatatttgctagaaaaacagactttagcttatcggcgtcttctgccaccgtttcgtctcaatcaattccctcgagcgacaaatccgatcactgatatcatgaatcagggccagcactttattcccttcaaaaggagcgatactcatggatattgtgaataaacaaatcatatacttccttggaatagttacgttcacagtatatgccagaagtttattcggatgtgtttcatcatttcctttataagagagaaaatggtcttcgagccaaataacttccttatgttctccgatacaacgaacccgtatctgtgaagtctttgattccgaggtaagcattgctgcaaaagacttttggcaagcatccatatcatcaggatgagcaaaccgatagaagtcattaatatccttaaaaacaattccggtttcttttaatccaagtgtacgaaaataatcatccgtaaaactgcattttcccgtaaggatatcatatttccacaaaattatttgatgcgcagcaagtacagaaagtatcttttgcaaattttctcttacgatctcaccattttcatttagtgaatataaatttgtactgactccatagtcatggttatttgttttgcatattttgttgtgtacactgctgaacgctgacaaatatgaacaaataaagtacaacttgtccctaatcttctgttttttacatagaaacccttatctttgcccattcaaaaagaaaatataatgaaccaagatactatttgtgccatcgctactgcccagggaggagctatcggaagcatccgtgtttccggtccggaagccatttctatcactagccgtatcttcaaacctgcaaaagccggcaaactatttaatgatcaaaagccatacacgctgactttcggatgtatctatgacggagaagaaatcattgatgaagtactcgttagtcttttccgtgctcctcattcttacacgggagaaaatagtacggaaattacgtgtcatggttcttcttatatcctccagcaagtaatgcaactactcatcaagaacggctgccgtatggctcaaccgggagaatacacacaacgtgctttcctcaatgggaaaatggatttaagtcaggcagaagctgttgccgacctgattgcttcttcatctgccgcgacccaccgtttagcaatgagtcaaatgcggggaggttttagcaaagaactgacagacttgcgtaacaagttgctgaacttcacgtccatgattgaactggaactggatttcagtgaggaagatgtggaatttgccgaccgttcggcattacggaagttggccgatgaaattgaacaagttatttcccgactagtccattcgtttagtgtaggcaatgctatcaaaaatggtgttcctgttgccattatcggtgagacaaatgctggaaaatcgaccctgttgaatgtactattgaatgaggagagggcaattgtcagtgatattcacggaacaacgcgcgatgtcatcgaagatacgattaatataggaggcgtcacctttcgattcatcgatactgccggaatccgtgaaacaaatgatacaattgaaaatttgggcattgaacgtactttccagaaactggatcaggcagagattgttctttggatgatagattctgtgaatgctgcttctcaaatagaacaattatctgaaaaaattattcctcgttgcgaaggaaaacatctgattgcagtattcaacaaagctgatttgattgaagaaaagcaaaaggaggatttactaactttactaaaagactcctcaaaagaatatacagagtccattttcatatcagccaaacaacgggggaacacggaagaacttcaaaaaatgctcattaatgcagctcacttacccacagtaacgcaaaacgacattattgtaacaaacgtaagacattatgaggcattaagcaaagcacttgaagcaatccatagagtacaagacggacttgattctcaaatctccggagacttcctttcgcaagatatacgggagtgcattttcttcatttcagacatagccggtgaggtcacaaatgacatggtacttcaaaatatctttcagcatttttgcatcggcaagtgatggcttgtaaacagccataactaactataaccatttagaataaagtcgctgtatttcagcgacttttatattttaacactttccagtccgtatttggagataacggtttttatctatatttttctatcatatttctaccgcgacagaaattcacggttagcccgaatgtcacagtgacgcattagttgacgtgtgttgacagtggtttacatgtattgacaaaaatcgggagaaataaggcgaaattatccccaatgtaaaggaggaaaatatggaagtaagaaagatttgccaatggtgtggaaaaccattcatagctcaaaaaacaacgacctgttattgtagccaccagtgttccaatcttggctacaaggagcgcatccgggaacgtaagcgacagttgaaacggtcgcaagaattattgcaacctcgacaagccgccgagggacaggatttcttctcttttgcccaagcagcaaaactgatgggcgtaactcggcaatacatatataaattggtaaaggaatcgaaacttcgggcttcacgcatcagcggcaagaagtcgctcatccgccgtgcggacatcgaactgatgatgaaaaccaaaccttatgaacgtataatgcccaaagaagatttcggcatcaccgagtattataccgctgaagaaattgcagagaaatataaggtcaacgccaaatgggtgtggacttatacacggcagcacaaagttccgaaggtacgaat

SEQ ID NO: 3019 - DNA, 484 bp, Unknown
  gut microbiota DNA sequence
tccgtcattgaaacccaaacgttcacgtaggaagtttaccacaggtataagcttctccacatacggaaagtagcgtctgacaaaatctgtaaactccgacagcttacggtgctgttgctcgtaagcgtttcttatctcctgtatctgttcggcttgttgtcgttcccgttgtcgggcttcgtcttcaagttcaaggatgcggtcttgcaagtcctcgttcctacgttccaatgatttcatttttccacttccgaaaagagaacccacactgcttgcaagggcggttgccgtatcggtggctgcgcttttgaacttgtcggtgcggatttccgcttttacctgtctcaactcctcctgcgctttggtcttcttctcctgcaatagtctggtttcggtttcaagggtttcattcttctttttcaagtcccgataatactgcatggtggtagtgtgccgtgcttccgagccccgtaccccacgttgc

SEQ ID NO: 3020 - DNA, 29616 bp, Unknown
  gut microbiota DNA sequence
gaaggtggtatgcctgccttgaatgtttacggtacaacagctgaagaatttaataaggaagttaaggcagacatgatgccattcgtatttaaagaagaaggctacctctatccgattcagcaggaatatttgaacaagaatccgaaattggtacagaatcctaattggtaattgagttgccataaacagacatatacatatcacactttcccttaattcccttatataggggaagtgtgatttactatacaaaacacaaaaaactgatatataaatgataaaaaattatttcctgctaggaagcttattatgtagtatgggtgccttttctcagtctaccgtatggaaacataccggatgggaagctcgcatttcagacaagggctatctggaacagattatctttaaggataagaaaggtaatgacaccattcctttctttcgttctgggcaaggtaactgtggtccttctttttatgctgaaatcagtggcaaagaaactaccgcagcttggatacctgacggatatctttcttatcggagcacgatagaccaggtggagtgccgtctaacgtatcagtcatggaaagggcagccggctttgaaagttactcttgaaaacaaagggaatgtaccttttcaaccgacaaaggcgggactgaaattgggaatcgatacttatatggataagtatccggactggtttggaaaatatttcccaacgctgatgcgcaatgaaaagacgcacttctacggttatctgcaaactcctgcaggacacgctttgggaattgtatcgccacagcctgtagcttcatggagtgtggcttacaatctgggttatcaagatccacctccacattggtttatggggcaccggatagagtcattaaatctggatttgatgaatgcattacctttgcccgaacgcaatccacaagatttgtggatgctgaaacaaggggagatcaagagctggactattgtgctcatggatataaatccgttgggggaatttgaacacgttatacataaggcgactggcataccgatgatctctattgatcggacgacttatgttccgggagaaaccgcatcttttgaagttctgtctggttctaaagatatcaaagtgttggatgataaagggcaggagttgaaggtcaatatccggacacagggagagggagtaaagcaagtgtcgtgtgtactgccggatgtcgggttgtatacagtacgtgtcagggacaatggaaaagaaacagaaggtattctttcagtacatcatgactggaaatggactatggaacaggcacgtcggaatgctttgaaatatcaccagaaagctacttcacacatagaaagttggtatggcttccattcttcttttattgctgcacaatattttccggatgaacaactggataaagctttacgtgatcgctttgattatttattcggcttgttacatgatcaacaaaagatggagcctaagtaccacgcttcacgcatacagaatacttcgggggcaataggtttgttagtagacaaatatcaagcttatggtgatatagccgacttacagaaggcttctcgtttggcagactggttgatgaacaattggcaacgtgaagatggtgcctatgtcaatcatcatattatttataccagcgttatctatgtagcgaaaagtatgctggaacttactttggtcgaacgtgagttaggcaagaagaatactgtatgggcagaggcggcggagcgccattatcaatctgccaaacgtgctatcgaccagttggttgcttcacaaggtgactttgaaacagaaggagaacttacttttgaggatggaatgatttcctgttctgcacttcagattggaatgctgggattgatgcagaaagacgaaaaggtgcgtaaacattatacagacgctatgttacaaattctggagagtcatgattgtcttacccaactgcgagtccccgatgcccgccggaggggtggaaccatgcgttattgggaagcacaatatgacgtgcagatgttgccgaacatgttcaactctcctcacggttggagcggctggcgtggttacgctacctattatgcttatctgctgacaggtgaagaacgctggttgaaagaaacttataatgcgatgggagctttttctcatctgattgattatcgtacaggaaatcttcgctgggcatttgttgtagatccgtatctgaaagtaaaacaggcttgcagtgctgatacacatgtgacacaagattcattgagttttggaaatccacatcctgaactctatgatacacgcgaatttattataggtgaacaatatgtgaatatggttagtgattggcagacaattaatacacaggataacgatgtgcacgaagtattcaagtgtattgctgaatctatgcttactaacgcctttattgtagaacgtccggacggctcggttgtcggatacaactgtattattgaaaagcaaggaaataaactgaaggtcaaagcaaatgagaagcaaataactaatcttcattgtaacttgaagcatccattcacagtcgtgtttgataaagtagataaggtgctggaggcaaattatttgggttgggcatttggaacggatatctatcaatagaataaaaggatatattttatgaatttcaaattccatatggcggtaggggaattgctctgctcatctcaagagagttcgtacatagtttgatcggcagaatggctgaattatggtggataataaataaaggcgtagaaagagaaccagttctcactctacgcctttgttattagataaattatgaatttacttcacttcccaagtatcattagtcatcaacagctcttggaaattgtggtatttctttttgcctttgatttcttcgatttgttctgtaactgcatcattgtaggtcggagcatctacatcgcggattacaccgagtgcaatcgggaagtcgggaccttccatcaaggccagtttcagttgaagtgtattgtcctggcagtgtgcatcgtggataagaatatctttttctgtgataccgttttcaccgagtttcactactttcagtccgaaaccttcctgcattaatccgaattctttgttttcaccgaacaacatcggtttaccatgttccagatagatcgcgttcttggcacgtccttctttggttgcaacgctggcatgagttccgtcgttgaaaataacacagttttgcagaacttcgacaaccgaagcacctttatgagtggctgctgctttcaatacttctacggaagcggcaccgtctacagcgatacagcgtgcaaagaaacgtccacgtgcgccgaaagcaagttctgccggatggaatgggtcttctactgttccgtaaggagatgatttactgacaaatccacgttcggaagtcggtgaatattgtcccttggtcaaaccgtaaatgcggttgttcagcagaatcatattcaagtcaatgttacggcggacagcgtggatgaagtggttaccaccgattgccaggccatcaccgtcaccggaaatctgccagatagtcaaattgggattagctactttggctcctgttgcaatagcagctgcacgtccgtgtatagtgtggaagccatacgtatttacatagtaaggtagacgggaagaacaaccgatacccgaaattacggcaatatcatgcggagctgttcccaattcggccatagccttatgcagtgaattcaggaaagcgtggtcaccgcatcccggacaccagcggggctggcctgatttataatcttgtacggtatatactttatcgctcatctcttattcctccaataatttagtaaatgcatctatcaattctctcgtaacgaaaggctgtcctttcacttggttgaactggctgatgttcagtccgggcactttcatgcgcaggtaacctgcaaattgtcccaagttctgttcagctaccacgatctttttatatttacgtaatacgtcagccgtgttcttcggtagcgggttgatgtattggaagtgggcgaaagccactttctttccatgttcgcgcatatagtccatagccagacggagatggccgtaagtaccaccccagcctacaatcagcaaatctgcatctttgtcgcccaatacttcgagctcggggatgtagtctgcaattttgtccactttggcttgacgaaggtgaaccattttattgtgattttccggttcggtagagattgcacctgtttcgttactcttttcaagaccaccgatacgatgcatgaagccctctgttcccgggatagcccaatagcgtacaccagtttcttcgttacgttggtacggagtccagtttcctgccatatcaggagttacatacggtggattgatagcaggatattcatccaagttaggaagtttccaggctgcagagccgttggctacaaaagcatcagtcaacagtacaaccggagtcatgtgttccaaagcgattttagctgccatatatgcagcatcaaaacagttggtcggtgatgttgcagcaatgacgggcatcgggctttcaccgttacgtccgtagagagcttgcagtaagtcggtctgttctgatttcgtaggaagaccggtagacggtccgccacgctgtacgttgacgatcactagtggaagttcgccgataacggcaaggttcattgcctcacttttcaggcagacgcccgggccggaagtcgtagttactgccagggcaccggcaaaagctgcaccgacagcagatgcacaacctgcgatttcgtcttcgcactgtacggtttttacgcccagtgatttatgtttggctaattcgtgcagaatgtcagtggccggagtgataggataagaacccaagtagagttccagaccagctttctcggctgcagctatcaagccgtatgacgttgccttattaccattaatatctgtataaagtcctttggattttggagctttgctttcgatcttataagtagagacagaagcgtgagtgttggctccgtagttgaaaccgtcgttcaataccttgatgttggcttctgcaatttcgggctttttggcgaatttctcgcgcagcattttctcggctgctgccaggttacggttgaacaaccaacaaactaaccccagcgcgaacatatttttacaacggagaacggatttgttgtccagtcctgaatccttcaggctttctttacacatggaagaaataggcacttcaagtacttcttgcttaacacccaattcttcgaaaggattgtcagtcttgaattgtgccttttctaaatctctggcttcgaatgagtcggagtcggtgatgataagtccttgcggtttacagaatttgatttgtgtttttagtgcggaaggattcattgctaccaatacgtgacaacggtctccgggagtgtaaacttgcccggcgccgatgtgtacttgaaaaccggaaaccccggttaacgaaccttgcggagcgcggatgtctgccgggtaatcggggaatgtacagatgtcatttcctaccgtagccgacatgttcgagaagatgttgccggccagctgcatgccatcgccggagtcgccggagaaacgtactacgacttcctccaattctttaaccatcatttcgtctgccataatttttattactatatttaatttaaaaactatttttactttcaatttgtgagcgcaaaggtcggaaagttaatcgaattatcaaaataaatcagtctttattgtcctattgacgctgaatatttgaagtgtctggaaggaacctttatttttattcttgttaaatcaacagaaaccgttatctttgcaagcaaatttataacggccttgtagttcaacggatagaatagaagtttcctaaactttagataggggttcgattcccctcgaggctactacaaagaggaatctataggaagttgtgttgtaggctttcatgctgtatcaagttttaagttttacaatagcttctttcaagattaacgtcttatagcttatatttgttttaataatcaatagaaaaagcctcttccgaacatccggaagaggctttttctatttctggactttattattcttccgtagctgccggtactacaacttttttgttcttcatcatgttgtatgcaatcggagatgcaatgaacagtgaggacaatgtaccgataacaacaccgagaatcattgcgaatgcgaagctgcggattgaatcaccaccgaggatgaagatacacagtaacacgatcaatgtactcaatgatgtattgatagtacgtgcaagtgtagtgttcaaagagtcgttgaacaactgacgtttgtcacgtttcggatacaggccgaagaactcgcgcacacggtcgaagattaccactttatcattaatagagtaaccgatagccgtcaggatagcaccgataaatgtctggtcaatttccagagagaacggcaggatgccccagaacagtgagtaagcaccgataatcataatggtgtcacaactcaaggccacaatagagccgatactgtaagcaatgttacggaaacggagtaggatgtacaggccgatagcaagcaatgccaatacaacagagtagatagcacctgtcttaatatcgtctgcgatacttggacctactttctgtgaacttacgatactaccaccggtatgattgtcacgatcgatgaaagtttccaaagaaatgttttgagtcagtaccggtttcagagtttcatacaagtatgattcaatttctgagtccacgttgttacctgcatcttcgatgcggtagtttgtgctgatacgtactgttttcttatctgtaccgatagcgataacacttacgttagcatcaccgaacttgctggcaattagctcgcgtacttgttccggttcaaccgggttttcgaactgtaccttgaagttacgtccaccggtgaagtcgatactctgactcaagccacggattgcaaatgagctgatacaaacgataattactgcactgacgataataagggacttcttgttcgtacccataaaatcgaaacgtgtattggtcatcaggttctttgaaatcttagttgtaaatgtcagccccagccacttatctttactcatgaagtgttcgtaaaccagacgagtcatgaacacagctgtaaagaaggatacaaggataccgataatcaatgtcgtagcaaaaccacgaatcggaccggtaccgaagttgaataggatgatacctgtgatgatagatgtcaagttagagtcaaagatagccgagaatgcgttggaataaccgtcagcaagtgctttcttcactcccttacctgcgcgaagttcttcttttgtacgttcatagataagtacgttcgcatccactgccatacccagtgacaacaccataccggcaataccggacattgtcagcgcagcctggaaggacgaaaggattcccagtgtaaagaagaagttgaggatcaatgccccattggcaaccatacccgggatgatgccatacatagagcacatataaatcatcaacagaatcaaagcaacaacaaatgagaagatacccgcattgatagattcctgacccagtgacggacctacgatatcttcttgtacgatgtgagccggagccggcatcttacctgatttcaatacgttagctaagtcctttgcctgctccggagtgaagtgacctgtaatctgtgaacgtccgcctgtgatctcagtgtttacgttcggtgcagaatatacatagttatcaagaacgatagcgatagcacgaccgatattctgtttggtcagttgagcccaacggcgtgcaccgtcagaattcatagacatgctgacagccggtttgctgtactggtcgaattcgtctttggcatctgttactacgtcaccttccaacggagctttgccgttgcgttcggtagatttgattgcatacaattcgaaagtctgaccttttttgtcaaattcggaaggagaaacaccccatttcagacggaggtcttttggaagttctgctttgatttccggcatagccagatatttgttaatgtctgcagtgtccttgtagtttgcatatccgataaccgggccctgcccactagagtttaattgcagtatagacagcaaaggatactgtttcttgatctcttccatgttcgcagcagttgcatcatcttgtttggcgtctcctttcagagcggcagcaaggctgtcggcagcacttacggctttcttagtcggagttgcttcggtaagaacagcagcttttgtagtgtctgttgtaacagaatcagtagttgtttcctgagttaacactgcacgcaatttagcgtctgctgactgcatagccggaagaatttctttggcggtatatgtttcccagaattccaggttagccgaaccttgaagaagttttctcacacgttccggttctttgatacccggcaattctaccatgatacgtcccattttgtcttccaggctctggatgttcggttgaaccacaccaaagcggtcgatacgggtacgaagtacgttgaatgagttctcaacagccgcttttacttcttctctcaatactttttcaacttccgcatccgttgatttctggctaactttgtctttcaactgttgtgtagcgaatagttcggaaagtttcgcgtccggagcaattctgtggtattccttgacaaacagggtaattacatcatcctgactgttgatagcctgttttgctgctgttgccaatgcgttattgaaagcttcgtccggcttgttgtcagccagtgctttaataacatcaggtacagaaacttcaaggataacattcataccacctttcaggtccaaacctaaactaatctccatttcacgacattgtttcagcgtccagttacccagccagaccttctcattggagagagagtcaaggtagtcttgttctactttcatgtcgccgttcgcaatttctttcgccttgttgttataatggcgtgttacgaaggagaaggagaggtagaacacgcataccagcgtgagtaataccgcaaaaacctttacaaatcctttgttttgcattttacttttaatttatgatgattacttttttaatttaattttcagttaaattctgtcgtacacaagttctttttgccgcatacaaggctgcaaatatagtttttttttcacattcatgtgtaataagccctcaaatatttgatgtttaagggcttttttaccgatttatttcattcctctgtttttcagcagtggctccatgctcggttctgtgccacggaaatttttgtagagagtcatcgggtcttcgctgtcacccttctccaacacgttccgacggaacaattcggcggtgtttttgtcgaagattccatgctctttgaaagcttcaaaggcgtcgttatccagtacgttagcccacaggtaactgtaatagccggctgcatatccgccgatgatgtgattgaagtaagtcacacggtaacgtggggcaatttcagagataagattgagcttgtccatagcttctttttcgtacgaaacagcatctaaattctttacatctttcagcatgtgcaggttcatgtcaaggatagcggcagccagcagttcggtagtcatgaatccctggttgaatgttttctgctgaagtattttttcgatgatttcatcggggattactttaccggtagcataatgcttggcatacattttcaacacttccggttcggttgcccagtgttcgttgatttgagagggaagttctacaaaatcacgtacaacattggtgccggaagttcctttgtatttgcattgggtgagcaagccgtgcagtgcatgtccgaactcgtgaaacagtgtttccacttcatccattgtgagtagagaaggggtgtcacctatcggtttggtaaagctgcaaacattgcatactagcggacggattggcccactttgttcgcggtagttgctcatccatgctccgccgctttttccaggacgtggaaagtagtctacatagaagataccgagctgggaaccatcggcgtcttttacttcaaacacttctacatcagggtgataagtagggatatcttctagcttgcttagggtgataccatatagtttattagctacggcaaaagcaccttcgcggacattttccaatttgaagtaaggtttcgtgtcttcttcggacaggttgtatttctcttttctgagtttttcggtgtagtaccaccagtcccatgcttccagtttttcacctttgccttccttgtccataagttgctgaagttctgcggcctccgatttcgcttttggcagggcgtagctccatagattattcaggaggtccattacgttattagcatttttagccatggtttcgtctaacacgaagttggcatagcaatcgaagcccaataagttcgccttttccagacggagggaaatgattttgctgattacttctttattgtcgttcttatcgttattatttccacggttgatatatgctttatacatcttctcacggagtgggcggttttctgaatactgcaggaagggcaggcggctggcgttatgtagagtaaacaaccattttcccggttgtccggcagctttagcctcttcggcggcactttggcagaaccattccggcaggccggcaaggtcttcctgcttgtcaacgaaaagttggaaagcattattctcgttcaatacattgttgctgaaggtgataccgagtgtagaaagttccttgttgatttcacggagacgggcttgttgttttgtgtcgaggttggctccggagcggacaaagcttttataggtcttgtctagcagtcgttgttgttctattgtcaggttcaatgagtctttttgttgatagacatcgtttatccgtttgaaaagtgtctggttcaaggaaatattatcttcgtgttccgaaagaaccggagccagtttgatagacaactcggtcagcgaatcggtcgtttctgcgtctgtcatattgaaaaagatagcactgacacggtctaaaatgggagcactgttgtccagcgctacgattgtattttcaaatgttggaacttccgggctctcgatgatagcctcgatgttctgattttgttcttcgatacctttcaggaaggcgggttcgtaatgttccagtttaatcttatcgaaagaaggaacaccatactctgtttgaaactctgtaaagaaaggattactttctgtttttgtagtacaggagtacatcatgcaacttgcagctaaaatggttagtgttttttttatcatcataagtgttttatattagagtttacagttcttatcgcttgctgatatggcaccagatagggtagtggtccgaagcctttatagatcggtctacggtgcagttataagctttcaggttagggcttatcaggatattgtcgatacggaaatagaatttgttctgattatacgagattcctaatcctttgccggattgggtaaatgcgtcgtccaatttttgagtcaggatacggtgagtatacgagatagagccgtcgttgaaatcaccacacgctataatagtcggatatttgctttctgtaatggctttgtttacggagtctgcctgcgaagcgcggatggctgacgcttccgctaattttttgaccagttgccgaagtccggttttgaccttcttggcgttcgggtccttaatcatatcctcatacattccccggtcttccttggtaagtttgttggactccaaatggttgttaatcagagtgactgtgtcattattcactgccagcacatatttgacggaaccattgtatgtactttcataatcaatgggagatactgaaagtatgggatatttagaaaaacaggcaagctgtacgtcgcttctgttttgtcggcgaacggaataatagggatatgctttcaatgcttttttgatgtctgcttctgtcagatatttcttattctgcgctgcattatattcttgcaaacagataatatctgctttgctgttaaccaggtatgataagattggattctttccgtctttcttttccaaattgctgaaattcattacattataagaaagaatttttatacttccttccgggattgtcttggtagtggaattgaaaggaatataggtccttatctgcggaaagcaaaccaaaaaaccgattagcggtactaaagcataccggtaattgatgaatacccagaaaatgataaaagcgatattgattaccaaaaatagtggaaatgcaagccccagtccggaggaaagcggattcaatttcggattaagataaggactgtaagcgctcaatatcagcgttcctacgaagaaagcgttgatagctaatatcagatatgcgacaattttgccaatatgttccatcttattatcttttgcttgcatcgaacaagcttttcttttcctccgtcgtcagactgtcgtaaccggattttttcaatttatccagaatgcggtctatttcgtcggactgtgcttttttatgggcgttgtaatcataatctttttcacgactggtcgtgcctcctccgtaatgtactttcattttgggtttgtgtttccatgtctttttctggaatagagagataaaagcgtccagaagccagttgatccatgcggtcagatccgcccctttgcttaggctggcggcaaaccaaagtccggcaagagcaccgcccaagtgagcgatatgtcctccggcattgcttgacgtgatagataatacgtcaattcctataacaacgagtgccagatatttgagacggattgcgccgaaaagaaagagttgtacccggtaattgggctcacggtaagcagtggcagccacaatcgccaagacggaagccgaagctcctactagtgtagaaactgctacttcctgattgaacaaaggaaatacattgtaagcaaccatatataataaacctccgaggatacctcccaatatgtacaaacctcttaaatgctttgctgaaaaaaagtgtagaaacaagcttccgaaccaatacaaccagagcatattgaataggatatgcagaagaccggcgtgcatgaacatataagtgataatcgaccacggttgatgaaagaaccgaataaaggaagccggtaaagcgaatatgccgaatatatcgggtatactgtgctgaaatagttgcaagaaaacattgattaacgtgccaatgataaaaatgcttacgttaatgtaaatcagctggataaatatattccctcttctgaatgtctcttttaaatcagttataatatgtcccattgtttttacttttttttctccaatacaaaatcagaataagcccgaatagcattccacccaagtgagcaaaatgagctacattatctccggcactgttggctagtcctgcccataactcaatcgcagcatatccgataacgaagaatttagccttgatagggaaaggcagcgggaagataaacagttggttgttgggatacaacattccgaatgccagcaaaatggcgtaaacggctcctgaagcacctacggtagtcatcatgttgagatactggtccatagaaatgatgccgtaacctattaagttcacttccgtgtgttggctcagttccgttatgtactgaatatattgaaccccttcctgaatgagtcctgcaccgataccgcaaaggatatagtaaaacaggaaacgtttgggaccccaggtttgttcgagaatcggtccgaacatgaaaacggcaaacatattaaaaaatatatggctgaacccgccatgcataaacatgtacgtgatgagctgtgccggattgaaatcacttgcgaggaaaaaatgtaatcctagataattagctaaatctataccgtaacgttgggctacaagcgttccgaaaaatactaatacattgataattatcaggtttttagttacagttggcatcattttaaattctgaatatttagatactagatgcaaaagtacgaataaattctgttttaaagcatgaaaaagacttcctattagctctttttcaataaattgctgcgttttttttatgtttttatttgatatgttgttttgttcggctatatttgtagaatcaatcccttgtaggataatcttttgtgtaacatatatattaattaatcattttacgtattatgaataagtctgaacttattagcgcaatggctgctgaatctcaaatgagcaaagccgatgcaaaaaaagcacttgatgcttttatcacttcagttactaatgctatgaaagctggcgacaaagtatctctcgttggttttggtactttttctgtaagcgaaagagctgaaagaactggtattaacccttctacaaaggcaactattactattcctgcaaagaaagtagctaagtttaaagctggtgctgaattgtctgcagctgttgaataagatatcatagttgaaagaaattagaaagaggagacgtatacgtctcctttttttgtatctttgcgcgcaagaaacaacttgattatgaagatagaagataaacttgtagcgtccgtcattagcggactgaaagcactctacagtcaggaagtccctgaaaaaatggtgcaaattcaaaagaccaaaaaagaatttgaaggacatctgacgctggtcgtgttcccttttctgaaaatgtcaagaaaaggaccggaacagacggcgcaggaaatcggtgaatatctgaaggtgaacgaaccggcagtagcagcttttaatgtgataaaaggtttcctgaacttgactatcgcatcggctacgtggatcgatttgctgaatgaaattcaggctgacgaacaatatggtctggtgaaagctaccgaaacttcgccattggtgatgattgagtattcttctccgaatacaaacaaacctcttcatttaggtcatgtgcgtaataaccttttaggtaatgcattggctaacattgtggcggcaaatggtaataaggtagtaaaaacaaatatcgtaaacgatcgtggtatccatatctgtaaatccatgctggcatggaagaaatatggaaacggtgaaaccccggaaacttccggcaagaaaggtgaccacctcgttggcgattattatgtatctttcgataagcattataaagcagaggtaaaggaacttatgactgagtttacggcacagggaatgagtgaggatgaagctaaggcgaaagcggaagctgcttctcccttgatgcaggaagctcgtgaaatgttggtgaagtgggaagccggcgactcggaaatacgcggattgtgggaaatgatgaataactgggtgtatgctggatttgatgagacttaccggaaaatgggtgtcagcttcgacaagatatattatgaatccaacacttatctcgaagggaaggagaaggttatggaagggctggaaaaaggtttctttttcaaaaaagaggacggatctgtttgggcggatctgactgctgaaggtttggatcataagttgcttcttcgtggcgatggtacatctgtttatatgacgcaagatatcggtacagctaaacttcgctttgcagactatcctattgataagatgatttatgtagtaggtaatgagcaaaactatcattttcaggtgctttctattctgcttgacaaactcggttttgagtggggcaagagcctggttcacttctcttatggaatggtagagttgccggagggcaagatgaaatctcgtgaaggtacggtggtggacgctgatgacctaatggaagaaatgattgccactgctaaagaaacttcacaggaacttggcaaattggatggtttgacacaggaagaagctgatgatattgcccgtatcgtcggtctgggtgcattgaaatatttcattttgaaagtagatgcgcgtaaaaatatgacgtttaatccgaaagagtctatcgacttcaatggtaatacaggcccgtttattcaatatacttatgctcgtattcagtctgtgcttcgtaaagctgccgaatcgggtattgtggttcccggacagattcctgctggtattgaattgagcgaaaaagaagaggggctgattcaaatggttgccgactttgctgctgttgtcaagcaggcaggggaagattacagcccgtctattattgcgaattatacttatgatttggtgaaagaatacaaccagttctaccatgacttcagtattttgcgcgaagagaacgaagcggtgaaagtgttccgtatcgctctgtcggctaatgtggccaaagtcgtgcgtttgggtatgagtttactgggtattgaagtaccttccagaatgtaagacattctctgaacaaaatatctttctacggggtttcttcattatgtatataatgaaaggaatcccgttagatcattttataaatatgttgcgtgtcatatgattcccctctctctttgtttgatagagtgtataccgataggggatttaaggtaggataaagtaaaaaagaaaggcagacaaagttcaagccttgcctgcccgattctgtttcttatgctgataattgttatttcttaggatacttataccagtctttagcttgtgcaccattagatttaacccatgtcgcaaacttcggatacgattcgtctattcttataccttcctcggggatcgggaattcactaaccggcatattgagtgcaaacggcatcagatctattgaaacataatataaatcttcttctggcctggatacgtcttttcctgttcctaataatgaaagatcggctttatcagtaggaggatattttaccaagtgcacttctctacctctggcttggccagatcctacgaagataaacggattgtaaggtggcaatatacttttcgaagtaacatcatttacttggatagttacagtgtatttcctggctttttcttctttattatcaaatattgccatattatcaaatagcaagattgtaggatgtgattgactagcctctgtttctccgggcatatattgggatttgggcgcatacgaagggctttcaatagtaactttgctaatatcgctattagtaatgttatgcaattgataaccaaaaccattcactaaataacctccacgatgtaatggagtgaactcgtcaacaaccttatagatacgattagtcagtattgatttatatactttactggtatatcgtatcattacgtcattcatatcgtaatctccctgctccggccataagtcttcgaatgtcaatatcccggaataagaagtatagttgtcttcatcagttggaccttccggatctgttggtaactcgggaattacaccttcatcaatagcatctttttcggctatgtgaacatagaaaattgcatcacagtaatcgaggtctatgttgtcctcaaatccgatagcaacaatctgattagatttactgtcccgtaacgatatggttctttgtctttgtacgccatcctttcccggttcattcaaaattgtggtggagtatcgagggcccatcccttttacgagatcgccttgtgaatctccgtttgaaggtgtgcttctgaatcccataccttgcagataccagccaatagtgacgcccttaggaaatttgtcttcaaattttcccgtgtcttcattccagtattttagtttaacttcatcaccacagactaaagctcctactccggctgttttataaataggagaagcatttgggaatgctaatatccttttgatgttttctatggtcggtatttcgctggtcggataagtgtaataccctactgtattataccatgcggcactactgttaacaaatactagactaacttctgtatctttagtgatagggatatctgatatcatatcaccattaaagaactcaggatagttatcatgaatgttccttcctcccgctttgtcgaagatgctttttatattataaagtacatcagcaggaggaatattcttttcttttgataagttattgggacgtccgttgtcatcccagtccataccaggcagcagtgtccagacatccaaatatttgtgctgattggctgttgcccctctgcttatcggggttgatgctttttcaagcagggacttaacatagtcattttggttgaaagaaatacgatgatcggcgttaattgttagttttaccggagatgctgtacctagatagtcggatgatagccatacttctgagatatcagccggtatacttattccatcttcactaaatttaccatgtttgtcagttgcagcccgataaaagggttctacttcttttttcttccaactaccatctttgtcatttacttcgatcggatcttggtcataaatctcaaaaagaaccgtatattcttccttaaagccatagtcaatatctaaggctaaactttgattcatgtcgaaatcaaagaactgttctttgggaatcttctcgggttcttgaaataaatcacgttcattgtctacacaactacatatcaatgggatacaaaatatgcccattaatgtctttacaaatattgtttgtttcatatgttaatgaaatataaagatattaatgggcaaatatagaaataaaccgaaagctttccaaaagatatttacttcttttttgcaaatttcttttttggtgctgaggtaacacctttctcgtcctgtatcctgattaattccatgcaactatgcaggcttaaatcttgtgggacaatatctttaggaatcttatagttattacctttatatgctatatatggtccgtaacgaccattcagaatttccaattctggttcttctgcgaacttcttgatgtggcgttcggcttcctttgtgcgtttctctagaatcagttgttccgcctcttctaaagtaatttccatgggatccatcgttttcgggagcgatacatacaccttattatgtagtacatacggaccgaaacgaccaatacctacactgactgtctttccttcatattcgcctaacgtacggggcagcttgaacaattccagcacttcttccaatgtgatcgtttctatggactgaccttttttcatttgtgcaaaacgtggcttttcttcatcttccgccgtaccgatttgcgccataggaccaaaacgtccgatttttaccgaaacaggtttacctgtttccggttcctcacccaaaatacgttcgcctactttatgttcagtctttattgccaaagtgttttctactgacgggtggaattggtcgtagaaggttttcagaattgaagtccatttcacttctccttcggcaatttcatcgaactctttttctacactagctgtaaagttataatccagaatatcagggaaatattcggtgaggaaatcatttactaccgttccggtatccgtagggaataacttggccttttctgttccggtaatttcagtatgattttcgtctttgacttgttggtcttttaatgtcagcacattgaacatccgttcttctccgtctttattgcctttttccacatattcgcgattctgaatcgtggaaatggtaggcgcatacgtagatgggcgaccgattcccagctcctccaatttacgtacaagacttgcttcggtatagcgcggtgggcgttgggtaaaacgttcggttgcaacgataggaccgtgttccagtttctgaccttttttcagaggaggcaacagattactttcatcctcttgttcattttcatcgtcataagattcacggtatacacgcaagaatccatcgaatttaataacttcaccgatagctgtaaagacttcactactactgctaattgatattgtaacagttgtcttttccagttccgcatctgccatttgtgaggcaatggtacgtttccatatcaagtcgtacagttttttctcctgcgctgtcccttcgatggactggttttccatataggtaggacggattgcttcatgtgcctcctgtgcccctttggttttcgtttcaaagtgacgaggatgcacataacgttcacccatcattttgatgatagcatccttactgcctatggttgcaaattccgacaagttcacggagtcggtacgcatataggtgataaatcccgattcgtacaaacgttgggcaatcatcatagtttgcgccaccgtatagcctaatttgcgtgcagcttcctgttgcaatgtcgaagttgtgaacggagcaggaggtgttttctttaacggacgggtagtaatatcttcgatagcaaaattagctcctttacatgcgttgaggaatgcttctgcttctttcttcgttttgatacggtgggccagttcggctttcatctccactagtttcccatcagtgtcgggcacaaggaaaacggcggtcacacggtaagctgcttccgatttgaaagcatggatttcgcgttcgcgctcaacaatcagtcgaacggcaaccgattgtacacgtcctgccgaaagcgccggtttcacttttctccaaagtacaggagacagttcaaaacctacgatacggtccagaatacgtcgtgcttgctgtgcattcacgaggttaatgtcaatatcacgtggttgttcgattgcttttaagatagcacttttcgtaatttcatgaaatacgattcgttttgtgttttccggttttagttttaagacctcatacagatgccaggcgatagcctctccctcgcggtcctcatcggatgcgagccatacggtttctgcctctttcgcttctgctttcagtgtgctaaccagagcctttttgtctgccggaatttcataattgggtttaaaattcttctctacgtcgatactgaactcttttttcttcagatcgcgtatatgtccgtaacttgaaaggactttgaaatctttcccaagaaacttttcaatcgtttttgcttttgccggagactcgacaatgacaaggtttttctgcataattctttcttttataatggcttgtaccacaatatttgggcacaaaagtaaaaaaaaagattctccctaccttataatataaggagaatctaatgttttttagtaaaataacgtcagcccgatataaatcagttataactataaattttctttttcagcgtataggagtattcgtaggaggtggaagaacataccaacggttatgttaaattcatgtttaaataggttcgaaattaattcgtattttatatacggaagaaaaagtactctacttataattagaatttgaaataaaatatgttaagttaataatctgcttcatttgaagtaaggtcaacaattaatggatttgttggtttttaacaatactgcaaagttagatgaggtgtggaaaacagatgtgcaatattctccaaataaggtgcacaaaatgctataaaacgctttgtgatagtacaggaagccacttttgaagttgtgggtaaatatgtttacattcactaggaaaacctatcggataaaataaaatgttggttagtatagattaatatctgtatattctacgtacatttgtctcgttagtattttagttttcgtttaacaactgttgaactatcgatttatatatgttgaactatcgtttgacagttgttgaacgaaaactgactagacgatgaagtaaatagtatatgaggatgaaaagaataatcttccccaatgaaaaacaaatgagtaatgagtgttaattatgacctttacgaaacacctaatcctgacaaggaaggggaagtgttgcctttacatgcacgtgtgctattgaagggtagttatactgccgaagaatttgcagatcaagttgtagcatttcagcatatgcctcatgcgcaagtggtgggtatcatagaagctatctcgaaagaattacagcatttgcttttgaaaggattttccgttgaattgggtgatattggctattttactctttctttgagtgtggacaaagaagtgactgagccaaaatacttgcgttcaccatcagtatctcttaaagacattaatttgagaataaaccgtcagtttaagaaggatgttgagagtgaattggtattgcaacgttatcattctccctttcgtgtgaagaatccgtgtattaaccgacaggattatgcttcacttgtcggaaagacaaaaacacaggcattgaaagatataaatgcttttattgggcaaggtattttgaggaagtatgggacaggacgttcggtggtctatataaaggctgaataaaataataaaagaatttttgcgatagattagaaagataaaatctgattgataaaactagttccggcttaatctattacacacgtcaatgtagtcagattaagccggaactgattttaactctttaataaagagtacatctatattctatcactctttactcttgcataataacttctcctacgactttgattaatttgagttcttcctgatatgcatcctgaaatagttgccagatcataactccgccaaaatcattatccattacatactggcattttttccggatagttggtcgtccattataatatgttttaccgaattggtcagcatcggctatttcttttacatcatacgtctttccgaaatgagtaagtattccattaaagcggatagctcctacttcatccttattgacatcattgtcccatgaatagccatagaatggcagaccgccgacaatctttgattttggagcttggaacttggttatccagtagttcatatcatttacaaaatcgttgtaagaggcatgttgtcccggtgtggacgagtttcccattaccctgtcatagctcataatattgatataatcaaagtactcctgccatttagtggtatagtctttccagcagattacagcacaagtcattaacatatcggcacttttggcttcgtgtaaagcttcggcgaaagctacgagtgagttcgtgttccagtggttataatcttcgtagtcaatatcaaatccgtcgagctggttggcttgggtgaaattcacaatgttggaaactaatgcgcttcttgtttctgcattgtcgatagcagctgcaaattcaccattactgtttttgttaagagaaatcagcacctttaccccgtgctcctttgcttttgtgcggatttggcgtagtttattttctggtaccttgtctgtatttagcgtaccgtccgatttcacatgtgcgaaacttacgttgatgtgtgtcagatactcccagtgaatattatcgaattgcgcatcaaaatcaaagtcatgtgcaggcaaataaccgataacgaccttatgtgatgtctccggctcttcctgtaattcaggaagcagaaccgtatattcggaggttagttgatagtcgctgcttgtcacggtgaactgctgttctgtttcccaacgtttcactttctggggatcgggggagatacttgctccccctgataattgataattgactcctgtgattgcctttctgtttgtaataccgctgatacggattactttgttttcatcattgatgtttcctctgtaataagtaccaccgcattgtaatgtgaattgtgcgattttggcttccggtttgccggctattgcttccgagtcgttgcaacttatacatacggaagttatcagcataaatataatttgtagtaatatcttcattttctttctttttgagtgattaattgttattcgtctccccattctattggagcggtgtattcccaccagtcgtaggtagctgttcctttagctacccccagaatgatttgggcgttagtcccataagctactccggtgtaggaagggatagaacgtagtagtgctccgtccagatgccattccagtttcatgcttccactgggggtaccttccagaatgttcatttccacggtgtattcggacttcttgttgttgaatggatattgtatgacaccaccgtcggaagtactgcaacgggcattctcaccttctcctttgaagagcatccaccgtatctctttttctccgtagaggaagtaaagctggcattgggcatcgttgctgcttgcgctgatgtggaatttgtaagagcccggtttcatgccctcacgggagatacggcaattggttccttcataggcaaagtttactgcgccgtctgcgaataccggtttgccggcagtaatagtccattcgttatccacaaaggaatgacgttccgcttccactttattcccttgttttagagcgatgactttcacgataggttcgcttccggcctgtgccttactggagattcggaaagttgctttcagtacggacgaaccggtgttttcctgcaagttgattactatatcatccgttccattgtactcagtttttgcaaatgaataccattcatcttcttcattttctttttctactatccattctccgttggattctacatggagtgtgactgttgcatcattgtaaagtgcacgtaggctttgagtggtcggagtgagtacaacacctttctgtgtacattcaacgtttgccacttctttaccgtgacggtcatatatgactactatcccggagcgttgttcccctttgttttccaaggctttcagtgttaccatgccgtcgagtgttccgttttctccggattgtatagagagccattcgtcgccttcggtgactgctgccgaccagttctggttggatttaacattgaatgagcaggtcgtttcttctttttcaagcagtaggtcgtctgcgttttcgagcgttaagtaagctatgcctttttgtataatgcttacctctttgccaatccagtaatcacttttgatagtgacggtatctgtacgatcgtccaatgaggtattgggggtataggtgatttgtacatcatagagttcattggcttcgccctgattcggtgaaatagtgcaccagtcactgtgattgctgtaaacaatccatggatcggttgattttacctggatagagactgtttcttcaccggaagcggcaatggtgtaactgtccgctgctttgtagcgtaaatctacccatttgataggttcgtcgtctttacaggactggacagaccacgagctgatgaggattagcgtacctagtaaagtacgccaattcattatgttatgaacaagttgttttttcatatattcgtcttttcaatttttattcaatattggtgacttcgtatgaagtgatagtcattgtacctttttttcctgctgttcctgcgataaagccaaaataagggaaattaccagccgaacctgttgtttcaaagagattctcatattctggcgttgtgatgatttgggtccaatcagtttctccctctagcttaataaagacctctattttagcttttgttttattatccggagtagaataagtgtgagagacctttagagcttttagtttattcaggtcaaatggagtacatttatagtcgtcattcgagcttccacctctatatttgaaagtccaaggattggctccaacccctaaccaaaaattccatccgggaattggtgaggcaacacaattcatatttaaacagcgattatcatccacttcaatgtttgagaagtgccatttgtgaatagctaatttccgaggtttattgatgtaataacgacaattggcatttcctgtttcttcagtgaaagtgattgcgcctgttgcttcatctatggttccgggagttccatttaattcgtatgaacctccagcctgccttacttccagagtcgttgcttctatacctaatgttttatctgtcggagttaaagaaattacagctttccgggtcgtgaaatagatttcagattgactggttgctgttatattaccgtctatacttttttcaacttttagccaagtggcgtcagatgatacttgccaatctacgtttgcaagtacttgataagtttttgtttctttatcttgaccaccgtcgaaagttacatctgtggtttctgcgaattccagcataatcccgttttgtgtggctgtgatttctgtttcatatccttcggaaacaatggtcagtgtggctgtacgtttcaaacccgtattgggtttagctgttgctgtaatggtaaccttttcgccgttaccttctccctcttctttgtcaagtgtcaaccactgattggaactggttactttccacgctttattggaagtgatggtaaaggtagcttcaccaccttcactcgggaacggatcatcgaatccttgtacgagcagtgttcctttcgctgcttgtgtgatagtgaccgttttgctctcctttattctgtctgcggtgatagtcaggatagccgttcgctcctgttcatccggattttcttccatgatgacagagacttcggcgataagtgaacttgctgagctcattgccggagtaggtacgcaccaattcttgttgctttcaatcttccagggagtattggaactgatattgaaaataatcgtattcggggatttggctaatacggcatattccgattgggcgtctgtctctaatagaggaggaaattcggcttgagagtcgatgttgaattcctggcatgaattcaggctgaatgtacatactactgccaaacagcataatattgtataaaatgatagctttttcatatagcgtattgtttttttattgatgatataaatagattaattggtcaccaccccgtattctgaggattcaggtttttatttttgaataactcgctttgcggaataggatagagatacatccgttggctccatgtcctacttttataaagcgttcgttggaaattccatgtgccgtccgttgctctttcgatgtttacgccgtagagctccttttgggtgtcctccccaatttgccacctgcgtatatcccagaaacggtggtcttcgaaagcgaattcaacacgccattcattctgcaacgctttcataaattcgttcgggtcggtaatggatacggttggcatgccggcatttatcctgacttcgtttagcgtccattccgctgatttcgggaaatcactgttggtatattgtgggttcttaaatgccattaccatagattctgcgtaggtaagcaatgtttccgcatagcggtagacaatccagtgatgtttgttgactacttctttgtccgcttcgaaactggtagtctcttggatatatttccgtaagaagtaaccggttggcgaaccaccttcggaaacagatgtataatcacttccacccttatataccgcaatttcggaacctttgaatgtcataccattggccagaattgtgcgtccgaagcgtggatcacggttggcgtacggattttgcggattgaaggccgggtcttcacatttccaaccattatcggtcagggtgacaggataaccattaacggtttggaaggcatctactagattctgtgaggggaatgtggcagtggccggtgtggagcgtgttccttcggtgaaccgaatcgggaagttattacgctcgaacgtggcgctatcaccgttcatgtgaaataggacgacttccggtgaagaaatattatttgctttctcattcggatcgagttggtataagtctgtcttgataatgtcataggcagctttggcggatgcttcccatttctcttggttgttggacgggttgtgctgtttgcttgctgcatatagcagggcttttgacttcacggccatggcaaagcctttggtgattcgtccggtttcgttattaggctgaccgacgtatgttgcgggcagattgtttgcaccgtcttcacattcggatacgataaaacggatcacttcttcaaaaggggttttaccgatagcgtttgcctcttcggtcgtaagagttttcaacggcatggcgatgtctccgtatctgcgggcaagctcgaagaagtagtgggctctaagcacgcgtgcttcatacgggaagtaacccagttgcttcatccagttctcataattggtgttatactcatagcgcgacaggtctacgtcttccaatgattgaaggaattcattggctgcgcggatgcctttatatagtgtccagctatcatcgcgggttttaatagccgaccagttgccattggtcatatcctgtatgttgcctcccgttgctccgaattcggcatcatcactggcgcaatctctcatcgctcccccaatgacgccaaaatcttgcggcataaaggtatatacatgggtgagcatttgtttggtcttatcgaaataccggtaaatatcttcccgggtatttaatccgttcgtttcatcgtaatccagataattgcaggatgcgaatgcgatgatagaactgtatgctattatgatatgtttaattttcatatatcttaattgtatttcgggttaaaagttgaacttgattcctgcccagtaagagcgtgtggaagggtatatggctcccaattgttcggggtcggcaaaaccgatattgtccagtgagaagaggttgcttccttgcaggtaaaccttcatgtccgcaaaacgtatcatctttttggggaatgtatagctggcatacaggttccttagcttgatgaatgaaccgtccctgtaccacagtgaattggcgcggtagttgttggcgttggtgagggtggtgaggcgtggcatggttgcttgggatgcattctccggtgtccatggagtttcgttattcaggaatgtctgtgagatatttccgttattcaccaatggttggtatagcggtgaattcagcaagctggtagtgacacccgtcattccctgaaaatcggcggaaatctcgaagttcttataagaagcggtgaggttgactccgaaataaaaccggggtacactcgagccgaacatctttactacgtcttgttcatctattctgttatctccattctggtctttgtacttgatgtcacccggacgtacggtagagaatgtctggacggggctgttgttaatctctacctggtcgtggaaaaagccgattgcttccagtccgtatctctgccctacccggtttcctttggtatacaaataatcatattgctggtattcctgtccgtcattgatgattttgctgttgacgtaggagtcattggcaccgatactgtaattaaaatctttgcctattttgtcgttccatgagacagaggcgtcaaagcctttgtagtcttggataccggcattcagtttgcttacaccgataccgatgatattggaaacagaaggtgacccattgataagaatattgcttcttctttcgtaaaatccttccagataaacggacaggcggtttttgaaagcgttcagttccattacaggaactgttacatcgaaagacaaatgctgac

SEQ ID NO: 3021 - DNA, 71983 bp, Unknown
  gut microbiota DNA sequence
tgattataaggctttgtcgctgatgtatgaaaatggtaattcacttcaccgcttggtagacgacttgttgagtgtgcaaaagattgaggcggggatgatgaaattatgtctttccgaagtgaatgtcgtggctctattgaaagaaacggcgaatactttccggcaaatggcggtgtcgcgaaagattgatttcgttcttgatttgccagataaatctattcctctatgggtggatattgagaaagtcgcttctgctgtacgcaatttattgtcgaacgcatttaaatatatggaagcgggaggtaacatcactcttgctgtaatggagaatacaatggatgaaaaggattattgccggattgtagtttccgatacgggcagagggattccggttgaattgcaacatcgggtattcgactcgtttgttaccggaggggcggccccttccttttcgactaaagtcggtattggcttgcgtattgtgaagaacacgatggatatgcatcacgggacagtagacttacaaagcgaattgggaaagggaagtagctttagcttgaatttcccgaaaggaaaagcccattttgccgacgataactgtgaagaaacggtctatgaaccgacgacggatgacaacgcaagtccgacggatgaacctgtcgtaccggaacaggtaaataaagaagagctatctgctgcaaggtataaaacaactttgctggttgtagaagataacccagatatacggcagtatattgtgagtcttttccagaataaatataatgttctggaggctgccgacggtgaagaaggggtgcagcaggctatgcgacatttgccggatttgataatctccgatattatgatgccaataaaagacggttttgcctgttgcaaggaaatcagggagcaggtggagacagcacatatccctattttaatgttgacggcaaaagcggaagatgcggatataatacggggagcgcagcttggagtggatgattatatgatgaaaccctttaatccggaaatactgaaagctaaagtcgaaaatctgattctgcgcagggaacatttgaaacgaatttatacaaaatcgttgatgttgaagcaaacggcgcaggaaacagagggggatgatttcatgcaaaaagtaattaatgtcatagaagccaatctggctaatgaggattttagtgtgcaaatgcttgccgaacggttgaatatgtcgcaaccaactttatacaggaaaattaaggaacgaagtgagctttctattattaaagtgattcgtagtataaggatgagtaaggcggcttcgcttatcatggagcataaatactctgttttggaaatatctgaaatggtcgggtttaacgaccctaatacatttcgtaagcatttcatagagcaatttggtgtgcttccttctaagtatgatgaacggagtaagggagaagagattgatgaacaacagagacagtaacgatacatttattatataaatagaaaatgctcattccgtattgtgtggaatgagcatttttcattttgctatgatttatctttttgctgactttagaaccggaaactcaccccccctaggaaattgaatccttcggcaggataacctaaatagtattgatacttcttgttcagcagattgtgtacttgcgcatagaccgatactcctttgaacacattatagcttgccccaatgtgcaaatcattgatagcagccatttttgcgtatccttccacttcttccctgttgatgtagtcatagctgagattgatattcaaggcggaaatcggatgaatacgaacgttgaaagacatttcgctggcaggttttacagccaacagatattcttctgttttgctgtcccatttacgataagtgtacttggcagataaagacacgatttctttatagtcgtaactaacttcacctccgacataaagattgtctgtattatcttgcgagaaattcagataagattcgaaatgggtaacactcgctcttccgaaagctgaataagataagtcatttttcaagttctggtagcctccgtatatattgaaccatactcccggataaggactggccttgaatccgagcgtaccattaatttgttcgtatgtatcgtaaggacgttgcacatatccccaggtggaagaaagatgggcgtccggcagttcgccataaggacaaatactctccaatctgcggaaatcattgagaagtttccctcctgttgctttggcataaactacatagctgtcagagaatatgtattgtgcagtgatgtccggtgatacgcggaatgttttgtcgaatccgaaagataagtccacattggcgccgacgtgtaatttccagtcatcattatccagttcgtaataaggattcagaaggagggttgtataattcttgaagtattcatctccagtggagatattctttgtatatccgctgtataagaaattgttcatagctaatgcaatagtaaccgattgctggtcgttgatcgctcctgtgacatctcctttggtacgtatgattgtttctttaagcgatgtattgtctgtatgttcattgagcatattgtgctgacgttcgtacatcaacagattcgtctcggcattgaaacgcaggggagcggtttcatcgatgaaatgaatgccggcatgaaaatctccggatgtaaacttttgcttgctgttcgcacttcccggtttgaagttaaaattactcagtccgaagttaccggcaatattcaaatccagcttgttaaactggtgtgtataatctacgttggcacgtgtacggtaatagaatgcattccatttctcgctgtcggtgaaaggaatggtcagtttaccgtccatcccatccatttggaagcgtacattcagtttgtctttatcagacaagcagaataaataattggcgagtacatcgagattgccgtaattgccataaccggcacgcacatatccgggagtgctgccgggttgtgtttcttttccggtataggggcgcatcagacctgctggaacggaggtcgccggaaagaatgtcgtggcgtattccacatttttcttgctgactgtcggttcttccactttgggcaggacgttcactttcgaggcgtccataatatccggattatattcttgttccacaacgacagtacggttcatggtcgtatctttgggttgggtagtctgggcttgaagagctgacggtattgagattgccagtgtaagtcctcctattatataaaaagctcgtttcatatcatttctgttttttagattctcaattttcagttttcagtttctgaagtctgctttcaatcatactctcaatatcgtcgttaccttgatagttctgttgcaggctcaataggtattggcgtgcgtccagatctttgcctgtcgcatgataaacatcggatagaaggacaaagctgcgtgccagccagtaagcgtgaggggtactctgttcgatgtagttgagaagttctttttccgcagcagcatattctttggcatcgtaaagcccttgggcaacctgatatttcgcttcggcaccgtaagggttacgtgtgtccttagccaattcgcgataatcgtccattgctttcttgccagctttttggttagtataagctttggcacggtaatagagcgcttcgtttcttagttccggactaagcttgggctctaccagtaaatcggtagcggcatggattgtttccacatcgtctctcaacaggaaggcacaacgcaggatacctgtttcggcaagctggcgtctttctacattggttgctttctctttcagcattttgtaacttgccagtgcctctgccgtattttgttggttaaactgtacttccgcccgcaggataagtgcttcttccgcaaatggattattcggatattccaataacttgccggagtggaggagaatcatatcataattcttctgttcactgccgatcagacagagatagtaatgtgcattcagactgaaagctccttcggggaaagtctgcaggtatttgttgaggcttgttttggcttcttccattctgcctttcatataaatcttttcggcagcggtatacgtaagcgaatcctgttcgttggcgtcgaaacggatatgtcccggcatggcattcgctaaagcggcaaactcatcaatgcggttcaagtctacataaatagacttcaagtcacgcatggcgaggcgtgcttcttcgctgcccggatatttctcgataacttgcttatatgcttcgatcgcttggttataatctcctttctgataaaacagcaaaccgatttctgcggcagcttttcggctgaccgggctttcgggatatttgttcagcagttccttgaaggaggtgatagcctgattgttgttatccattagcacataggaacgccctttctcataaatggcgtttacagcataaggtgaagcgggatatttgccgaccagacggttcaataaagtgattttaccggtgtagtccttctgtaagccggatacgagagcgagttgatagaaagaataatctcctgaaggagtattcatttgctcggcttgcgaatagtaatgtttggcttcttcaaagttacgtacatggaggtggcagtcaccaatacggttgtaagcgtcggcaagcgccgttgtgttttctcctttttccaattggatatatttttggaaatagttgcttgcctgtgtatagtctttccgatggaaagcgatatagcccaagttgtaattagccaacgcgtacatttcgttattgggctgggtggtcagttgcaggtaggcgttgaaatcgcgggctgcctctaccattcggttgagacgataatatgactctccacaccagtagtaagcgtctgctttggtctggcggttgtattgtccgatagcgatagactggttcaggtatttaagagcctgttcgaagtcggcgttggcaaaagattgtgtacctaactggaataatatcttttgtttggcttccagtatctgggcactcggtttggcaatccggtcgatagattttaatgcggcatcgtagctgcgggtattcatataaacttctaccaggtaactgcttactttttcggcgtatggagaggtcggaaattcattcaggaacttctcgaaagcagtgacagactcgccgaaggcagaaaaagaagtttcgtgcaggcaaagcgcatagttataagctgcctgttctttgatttgcatattggcattggatgcagcagcctgttcgaaagccatacgcgctttgttcttttctgccaattgcaggtaggaaagtcccatgtgcagataagcgttctgtgtaagggcatcgttttctgtggttactttgcctaacgtctctgctgctttggaataaacttttgtttgatagtaagaaagtcccagcatataaagggcatcacggcgcgggacggcgtgctctctgtccagataattgctgaatgcttctacggcttggggatattgcccgaagtggtagtaggcatctcctaggatgcggtacatttcggcggcgtgctcgttattcgggtaagccgacaggtaattctgtgctacgatttgtgccttatcataattcttgagctgtacataaatctcggcgatataataagggacgagtgccttgtatttagcattgtcttgtagcggcaggaaacctttcaatgcttcgttatagcgtttctgtgtgtaacggatataagaaatatagtaatcacagtctgttgcatacttgggactgttggcacgtaaggtttcgaaccagatagcagcttcccgcaaatcgtttgttttcagataacaggtagccagttgataagtgcggtcgtcccgttcctcattgtttagcaaatcgaggtcggtagagttgaagagtgccatagcctcatcgtattttccttcgtagaagtagcaggaagccagtaacgagtagatacgattggcataaggagtatcgggataatggtcgagatacttgcggagcaattcgatacggttcttgtcgttcaactcgtaagctgaactgaccaacatatactccgcatcttggagtaggctggctgttggcttttgctttacaaatgcctttagtgccggcagggcagcggcataatttttttcctggaaaagttctttcccttctttatagaggttgtcagctgaagtgaatttatcacctgtctgggcaaatcctataattggtgcgcaacagatagccgcacaaatgagtctagtaatttcttttttcataatagggtgtttatgcaaaagtactatatatcttccaataacgtattttaatggctgttaatttaaagctcattaaaatattagacagaatggaaggggatatgtttccgtaatttgttatattttaacgaattatctgtcggataagaattttttaagtcctcgacggatagaatccagtccaaaatcttccggattgatctcggagagaggcaggaagaaagaatctgatacatcatccattgccgagaagtggcttatatcttctacggtacaaagaaagaacatatcaagtgtgtgcacgggaaaaccggaatagatgtaaatattgggaagtgagaattgatagacggcttgttgcactttcaatccggtttcctccaatacttcacgggctacgccttcttcgccggtttcgttcatgtcgataaatcccccgggaaggtcgagcgtacctttggcaggttctttggcacggcggcagacgagcagctcgttttggtcgttcaggattagagccacggtagcggaagatggattgaaataatagacaaagccgcaatctgtacattttttggacttttcattgttgacttcgaaatgagaggaaccacattcgggacaatattggaacaggtcaagaggatgtttcataattcttttgcagatactgcattttggttttttcgattacaaaagtacctaaaaaagcaaaaacgacaaactttgtgagtgtatcgtttttgcctgccttttctttttccctcaaagaagacgttcctttgaattattttacttggaaattttctaaactttctccaacgaaagatgctttatttgaattagtaaccaacattgtactgtgtattttattatatccgtattgtttgttccatacatctttgttagctaattgtatactgtattcccaacgtgccgaaatggttggtctggggtcgggaagattcaaataaatatcatattcaccgcttggcattgattccggtagtccgaatcgagcctgaatgttaatctgctcattcggaaaccagaaacgcggatcttctttaagtttgatcttatacttgttctctttcttctttttgtggacaaatacaatctcgacatctctcggattaaatggggcagcccaacctgtattctgtaactttaacaccacttcataaggacaacctatttctcctttgggagtaaaatatccttcggagagagtgaagcgataacctaaacgcttttgtatttccttcatgcattgttcgtcctcccattggttgatgactgcgggatgataatcaatattaatatacgaccaatggtatttggcaaagtctgttacagcattctcgcagttcgaatattccgacagtttacaggtttctcctcccatggctacatattttgtttcccattcccagaattttctgtaatcaggattctctccgaaagttcccatgtcatctatgtcggccagaaaacagtcgttgtgaaaagctatacgagataagtcggatttattataagccgttttcctggtaatggtgtcggtgtagttaatattgaaagtaaataacttggctaccggataccgtacacttatcattctgtccttgggcattactttcagaagggcatccagtaccttacggcggggagcatactctccctttttaggctggtagttataatggtcggtataataccattctccccataccccgacaaatccggcttcgagtacacatatcacatccgaaaattcttccagaataggttttagttgttggatatgctgttccgtgagttcccagggagcatcccatggcttctcgttttcggacgaagtatatgcaaagcgtaatacggattttgctcctccttttctgagagccagcatattgttgcgtatccgttgcagatattcttcggagatcaacttatctttgaaatctctcatatagtaggcggtgaatataaggctcatgcctttctcccgacattctttcaagaaggcgggggtaatggagtggttattgtccgtggcatattcctgatgagtgaagaatcctctctccgggttacaaattatttcctccgagggttggtatgttactttctccagttgatccggcgtactggaagcgggagattctgtttcttctttggagtttactttgtcattgcagaaagtcaataacagagccggaatacaaaaaagagataagaagagtcttttcatgggatactatatatgaagtgtgaatattcgggattatttaacttctacaaaccagggaagccgtgaaagagggacatcgagggtatacgttttacctcctttatagacttttcccagatcatctttccatttacctttggggagttttactgtacgtgtattgccgctggacataatgggggctaccaggtatttatcccccaacatatactggtccctgcattcttcaaatccctgattagggaaggcataatccatgtgacgtacaatgggttctcctgtaatagaggcattttttgcctgtgagagtatataatcacccagttgctcatgccatttggcatacttgatgcacgtttccaggttctctttatttagaatccgccagggggctaccgaaaactgcatcatcggcatcatggaatgtatctggcaggaacgtacaatcaatgtctggtcaaaaccggacgcatcaataccctgaaaactggaatattctccgcctccaatcatgtcgggacaggcatacgaatatcccaacagaccggcggctatcattgagggtaccagacttgccactccgtcccatgagtatttcttgtcgcccaggcgttgcactaaaggctggccgcctaatttccaacaggcgcggaattcgttatatggaaattcgagccccaacttggcccataaataagtctgttcggtatcatacgattggcggtcgaaaacatctacctctttttccggatatctttccgggtctcctgcatcgaatttgaaaccgtcgatatgatagtcttgttgcattttcttgagcgtactccgtaaatggttataagcgtcgggattgctcaggtcatagcaggcactggaaccgttccaccaatcgagaattgccggctggtcactaccttttctttttaccagatatccctttgtctttagatacctgaattcttcgctatcgggtgacacaaacggacttacccataacatcactttaaatcccatggcatgaagttcgtcaaccattgctttggggttcggaaacttgtccgggcggaagttgaagtttccgtaatctttttgccagttatcgtcaatcatcagtatgccggtaggaaatccgttgtcgataatacttcttgcatatttcaggatatcctcttgattctgattatatataagctctatccaggtattgtattgcggttttgagaagaacagttcgggcggcaatataccggtgggtgggaggtactttccggaagcggccaggtaagcctcttttaatgtgtttcccgcggtagcgtgctctattgttcctctggcggattctatgcggattttgccgtctctcagttgaaaccggaatggaccgtcacaccagatataacgccccttattcgagataagtaacggggtagtctggttattaaaattctgggtttgcaggtcggcttctgttgtgttatcgcagaaaggcattttattgccgaggtcggtagctcctccccaccatttttcattgggaaggatttctatttcttttacctgttgtggcaaagcagttgtagcgagactgaatgccaggatactgaggattaatttcttcataatataaatattaatgtgactaatgcttgataaattcggagggtgaactgccgaattgctctttaaatgttctcgtgaaataagacggactttcgattccgacggcataaccgacttcactgattgacatatcggtggttcttaacaattctgctgccttgtccaaccgaatcttacggatgtaatttcccaaagacattccggttgtcgacttgataaagctatacagtttggtcctgttcattccaagttcgaggcagaggtggtcgacggagaattgctggtcggttagattggcattgaccaattccactagtttgccgaacacttctctttgtttcttgtcctgaatctcctgccggacgttgttggcagtaggcagattcctcatctgatgacttttattgagaagattgcggacgtttgctttgagaagtctggggttgaagggtttggggatgtatgcatccgctcccatttcaatcccttcaatctggtcctcaacctgcgattttgcagtaagcagaatgataggaataaaacaagtctgtaagttcttctttagagttgcacacagttctatgccgttcattctgggcatcattacgtctgaaatgataatgtccgggaggctgcggttacatttgtccaaggcttcctgtccatcaatagccatgatgatattatagtcttttacgaaatactcccttaatatcataagtatttcgtggttgtcgtccaccagcagaatcgtaggtttgccttccatataaatagctgtggtctcttctatctccaatggttcgtactctactgcatagtttgataaatagtcttttagtacgaaagtactttcttctatcttttcctctttggccagataggtgtccgatatcggcagggctatgataacttcggttcctgcatctggcttgctgctgatgataattccgccgtggtggagttcgataagagatttgaccaaagataacccgatgcccgaaccggtatgctgtttacctgtattattttgcacctgatgaaaacgtttgaaaatggtaggcagtacggctttctccatgccaatccctgtatcgctcactcttattatcgcctgttcgccgggaatcatatctttggtattccagaaagaatccttatagcggggaacaatgtcattcacgtatcctttagcaacctgaatgttgatttcgctgccggcatgagaatagcgtatactgttggaaaggatattcgacagtattttaccgaaatgctccgggtctatccacatcccgatctccggattgtcaatttgtaagttcacatggatgtcggaggcttccgcccagcctttgaattcttcgtaaatatcgctcacgtattcaggaatagaagtataggtcgtcctgagttgggcggacttcacttctgcccggtgaaaatcaagcagttcgttgaccatgttcgacagtttgcctgtattatgctttatgatatttacatatttgtttgtgcaaatgtcctcgtcttcagcaatctcattgatagcgtggcttatcaaggtcagcggggtccggaactcatgagaaacatccgtgaagaatctcattttcatttgcatcatttcctctttctgtcgttcctgttctttctgcatggaaatcgtattcttcatctgagtccacttgatgaagtaacggaaacctacgtagaacagtcccagaatggcgagaatatatagggtataagcccaccaagtcatccagaaagggggttgggagtaaatctgcaatgcatattgttcattactccatatttgccagtcgcctgcttccaccagtaaggtatgcgaaccgaacggaattttctgataagctacggctggttccttgcctgcttctatatatcgccattcattatcatatccttccagtttgtagcggtagcgtatgtggtgctggttactgtaagataatgaggtgaagttgacggagaaattattatcaggatacttgagttcaagactgttggaaaattcgatgtccgagtctacaggttttccgttgatatggcaaccggtaaagtaaacacgatatgaggtgttatgcggagtttcggcaataggagtgaagtagttcaggccgtgggctcctccgaagtataagtttccttcgtcatccttggcggaagaggaagtaccgaacacataactttgtaagccatcgtttgtgtcgaatacattgaagcgttttatcccgtcgtcgaagtagttcagattaaagcctccgcaccatacacgcccgaacttgtcgacttcgatactctctatgtcgttggacgtcgctccggcttctatcccgtaactttcggctgagtagtcataaatcccgttgggcctgtctatcagtgtcactttgttaagcccgttgcccatggtgcctatccagtaagtagagtcacttcccttgtcgataggccagatgtagttactgcttaaactgttctcgtcgttttctctcgccagatatttgacgatacggactaccttgccttcattatcgaatatgacacggttgatacccattgccgatgtgataatgagttcatttttagttgtgtcgctatatatgttgtgaagcaagtcggtggacagattacagggagcgggtgtccggctggtataggtcatcgtgtttttccatagaccgttgatctcttcgaaacactccagtccggcatacgtcgtgacccacaaacggttgaacttgtcgaaatccagccagaaaatataaccgccgttgattgtccgcagtgagtgggtaacttctcttgtttttttattgataatgacgatattatctctgacagctgcatagatattcctgctatccgactgtatacttgtgatactcggaaataactggggaaggtgacaataatcccatatcacctcttttgttctgatatcgaaactgctcaatccgccaaacttgcttcccatatatacatggccatccttgctgtaatgtacggaactgataaattcggaaccgatacttgtatcggacgttctgaaaggactgtatctgactgttttgaaaaaacgggcccttgtattggcataagacacgcctgcggtccaggcggatacccatagattattgtccctgtcgaggaagatattgttgatgtcacttcctaccgaatagggattggacggtgagtgcttatgttccatgacagaggtggactcattgcttttccatacttggaaaagcccttcgtttgctcctatccatacatattcggggtcaacacataaggacagtaccccgcccggagtatggaacatgacctgcttggcaagtgtataactgccgtcgttttcgattttatatttagccagatgttcctggtagatgatccataaatctccgttatcataacaaatatccctgactcccgaacctatgttattattgatattgccggaaaacttcagttctccctcagcgtcaaccttgtaggcggacagatacctttttcctgaaatccaggcatttcccaagctgtctgttgccaccttcgggttcaactcgtcggaaatataattgtaagcgtctcctatctttctggcagaaatgaccggttccccgttatctttttcggaagattcaacctttaccaatctgatttggttatccgatatgagccataactgattaccaatgccctgcttgagcatcctgactttggaataaaaggcgggatcgggttgagcctctgtccggtaactgacaaattgcttggttctgatatcaaaacaagccagtccggcttccgtagccagccagatatagcggcctactatctgaatactataaactctgttataatagactgaatttataataccgttttcgtacttgtaggaatcaatggaatatccgtcgtatcgattaagccctctatggcttccgaaccacatatatcctaaggagtcttgtacgatacaggtcacgttatcgtgtagcagtccctcgtttctggtcagatgacggaacaggagttcttcctgtgcattgccggttatgaatgcacaggaaagaacgataagtgacagaatgatttgtttataatatctcataagcaaaaaacgtctgtgttatggacgaacggttatgtcaatggtagagaactgagtgttgtaatcatattcactcgcatgaatattgtttcctacattgtctttatacccgctatccgaatagtttttcatacttgtattggtgcctattacgactacctgataattacccggttgcgtatacgtatattgatatttcaatattccggagttgtcattgatgttcagagactggcctgtggagaacggaatatagtctatatcaccataacttgcggaagctatgtagtaatcgcctaaatatccggcattattactaggagtaaataagatctgtatgtatgacaatgtacccatagtttttcccgtagctccctgccaggcgtctataacactcgacaaatcaacggagtagtctgtaaacgcggtattgggattccagtatatgtcccagacggtttcatctctgaatataacctccgtttcaccgactccgatgccgccgaggcggatgactacctgaaaggttgttatgtccggacgctgttctcccgaactgacatctcccaggatgtctttgtcgaatctcatccgtaaattcagctttttgtttgttcccagcttggcgtccgtatgcaggcggagtgcttgataccaccattcgggatgaacggatgtgattttcagtacattctgctgaatggactcgtcatactcgatttcggcttccgaacctatcaggttatcgccactgcctgcgttcacaacttctgcgagattgtctgtaatggaagtggaaccggcgggtgtatcggcaaagttacaattatacggtgtaatttccggatcgatagggcgataattgttgttttgtaaatcatcgttggtttttcctagcagtagatagtaggcactgctcttgtagtcgtgcccgtcatctccggtgtaaatggatacggccattgcattatgccggatactgaatgtaacgggttctcctacctttacctctgtcttgtctgcactggcggagatatgtaagctgggggcttcctcttcattgcacgcaataaatgtagttgctgcgagcagaagtatgaatttagtataggttgttttcattctcttatcgttttaagttgacacaaaagattaatatcccgggttctgagtcaggttcttgttcacatctatttcactcaaaggcacgggcaataacatattgcgggattggatattctccggagctccgggagttgtgatttcccgttccgtattactgatgaacgggttgtattgccgccatgcctgcatctgctttaccaggatgccacggcggacgaggtcgcaccacctgtcagtcgactcggctactagttcgcgtgcccgttcgttaagtatttcagttctgaaggctgtataatcatcgccgtatctgttatactcccaggcagttctcactccgtcgtagatataaccgtatgctccgggtttccagtcgggtacacattcgtctacttcggtagcatagtcggtaattaatttacggggcagtacatcctggtgcataatgccttcgttggcgattcgcgaacgtttgcgcacaaggttgacagcgtcgtaagcagactgtatggagattccgctcatgtccattcctgaagaaggtcggtagtcgccgggaccgtggttgacttcgttgtatgcttccgcgtacatcagtaatacgtccgcatagcggagcagaggttcatccataccgaagttggtgtaattgtatgatgaagggtctgccaacggatatcgtctgaatttgccgatactccattgaagccagttattgttttccgtggcctcgctcagcttctggtcgccccttgtgtcccaatacatcttgtagtcccagccccataacgttccgtcatcttgtatggtcattcgcgggcagttccataaacggcggatagagtcgctcggttcatacatcatgcggtggtagtccgaacttgagatgttatcccacgaacctccgagattttggttgcctctgataccgaacatcatgcctgtccatgttcccgtatcgtcacctgtcaatccctgaacacaccacaaaacttcatccggtgccttgtcccgggtcttggcattgaatacatccggataatagtccaccagtttgtaacgtccgccctgaataacagcacttgaatgttcaagtgacttctcgaaattgtcggctgcattgcctagtatttctttcccgtcccgttgtgctacgctacccagccataaatatactttagccagaaaaccatggcaggcgtctttggtcaatctgccgtattgatagccttttgaagtgtcacccttatccattgtgtgactgatacagtattcgaaatcctctatgatttgccggaacacttctttctgcggagtgcgtgtcacctccagtccgtcaagagatttggtatcggtcaataccagcggcacatcaccaaaccacctgacaaggtcgaaatacaggaaagcacggatgccatgtgcctgtccgacatatctttcccagttgttgattttctctttgttggtagtcacgttgtctatcacagaattgcagtcttttatcactgcatagtgattttgccacataccggcgatatatgtgttctcagaaccgtatgtaaagttactcagtccgcttgcttcgtcccagcttgcgcgtttcagcaagtcgttggggatttgctttatattgtatcccgtcacccacgaatcggataatctgcggtaaacaccattaatggcttgccgcgcatcggattcactgttgtagaaattgtcagttgtcagcttgcctttggggtcttcttccagaaaatcggagcagccacaaatgttcaggcatacaagcattgcaattaatatgttaaacttattcatgtccttgttcttttatgattaaaaccctagttcgattgaaagcgagaaggagcgtggtctcgggtacgggctcatgtcgagtccgggagccagacgggctactgttccgtaaccagtatttgcctcggggtcgaagccggagtaacgggtccagagccataagttcgttccggtcagtgctatgcgcattttggagagtcccattttgccggttaacttggcggggaaggtatagcccagggtcagggtttgcagacgtaagaatgaaccgtcttctaccagatcacttctaagtacgctttctccccaggttcctcggccgtacaaaggataattattagtgggggtgttggcagaccatacatctttgtagacactcttcaagacgttgttgatactagtcgttcctacgagatagtaggcgttgccgtttactacgtcgttgccgtatgaccagcggaagaaggcatacaagtcgaaacctttataagagaatgtattcccgattcctcctgtatgtttggggttgacatccgcaatcggtgtacggtcgttcgagtcgataacaccgtctttattgacatcgacaactttgagttgtcccaatccgaggttagggccggggtatccgttgatgacttcggtatcattgttgtaagttccgtcgctgatatagccgtaatagatacctaccggcattcctactctgagcaggacatcactggtaattttggcattaatccctctgtcgtagaattgctggtattgtcccttgtccagtgacaggattttgttcttgtagaaggagatattgaagtccgtcgaccaattgaaagcgcctttaaaccagttcgcgttaatggcgaactccatacccttgttctccattgaacctgcatttttccaggctttggtatagccggaagtagaaggaatgtttacttgcagtaacatatcgtcaatccttttgtagtaaaagtctgccgtaatagagaaacggttatccaatacgccgaaatcaaatccgatgttgtactgtttctggctttcccatttcaggtcgtcattcgttacgttggaaggataacgcccgatttccaccgtgcttccgtgcattaccaccttattgttttccaactgggataaagattgataagagggaatctgattattacccgtcataccgaagctggtgcgtaccctcaggttggatatgaaatcaaacttcttgatgaattcttcttcagaagcgcgccatgcgacactgacagcagggaaatagccgtatttgttattggctccgaacttggaggagccgtcgacacgcaaagaggcatttaatacatatttattgtcgaaagtataggttcccctactgataaacgataccatttgattgctgtcatacgtgtatttgggagcgtaagtgaccagccccttgtctattccccatataccgacggccatgtcttcgaagtttgttgatttgttgtagacatctttcatcgaccatttgctggcctcaaaagctcccattagtgagaaagaatgcttctttatgcttttcgcatattgcagccgtgcttcatatacccaactgttttcttcccggttgctgatttccatgcgtcccctttccgattgcccgtaccaggtatccgaaccccagagcttgtcctgatccatggaatactggcgataagaggcgctggtactgaacgtgaggtctttcaatatcttatagttgaagtagatattaccattgagctcactataccgattgttgatattgacctgatcgactgctaccagagggctcattatgttcacgttactgtaattcatgatatctgccagtcccggataaaacaggaaaggagaaatctgcaaggcattgagaatgactcccgactgtgaccagtcgctgaccggattcttgtctttagaggtagagtaagacagattaataccgatatcgatttgggaattgacctcctgattcaagttcaggcgtgaggtgaaacggtcgaatgcagaccgtttgataattcccgtattattcagatatccgagtgagagcatataggttgttcctttggttcctccggatatacttgcgtttgcttcgtattttttcgctgtccgggtaatttcatccatccaattgtgtacggacgggttgttccaacctttgttgtcaatcacgttttgccagaaattgatgaggttcggactatcgtatgttccgtaatcaagcatcttctttgcgtactcttccggagataatacttccaacggaatatttggattcatatccagacctcctgtcagactgaacgagaatttaggtttggtagaggctgctccccgtttggtggtgatgatgacaacgccattggctcctttggcaccataaatagctgccgccgctgcgtctttcagaatctccatggattcgatgtcgttcgggttcaatcctaacaatggattattcaccgtttcggaatcttcattggtgatctgttgagtaggcatggggacaccgtcgatgacaaacagaggttgggttccgcctgtgatagagttgacacctctgattctgaaggtcattccgctcgataacgaaccgtctgtcgggataatctgcacaccgctgattttgccttgtagtgcttgcagggtttgcgccgaactgcttttggcaatatcttttatattaactgacgcaacagcggttgcaatgtcgctttttctctggctaccgtagcctacgactactacctcgtccatttctgttactgacggatccagcgttatattaaacttgcggttcttgccgatagctactgtcttgggtttatatcccagataactgatgacaatcttttcggaaggaagtgcttttagagtgaactttccttctaaatctgtaattacggcgttggtagtgccttcgatatttaccgtagcaccgatcagaggttcgctcttctcatccaacacttgccctgaaatagttacttgctgtgctaatactaccgtcatgtggagcattaggaacaatgtgcttaatagtacctttctcttcatagtgcagatattaaagtttataataagaatgaatacaaatagacttaaatggtgatgcaaataaagcgatttataatattcgggctttgacttatagtacttttctcttgaccaaattacaaacttctcttttaaattatctccgtacgccttaaaattaggggagagtactgcttatttataaatagtccggaaaaagaccggatatgaaggattgtatattcaatcattctattttctgaaatatacggctcggcgtaggcctgaagggaaaaactcgaaggatttagcattagtgagtttgcgaatgttatcatattgggctattccctgttaatgtgtcactcttttgctgattagtggtgtgtgtggaagaagatattaatgatcctgtttgaaaatgataatatcagttgcttcttgcccttatgccaactagaataaatagtgcttcaaataggtgtctaaaatccttctttatcgtgtccagattgtttcgcaccttgaaacattttgtatctcaccgggaaacaagtcgggaaacggttgtttcttgcatatttgtcttgtttatatgcataaaaaggctggatatagtatatatatgcgttgctttatgcacgatttcttctcttagtgagaatttgacagtcccggttgtgatgggaatcttaaaaataggacttttagcggacttatcggtttcatctatcgccgcatagaattattcgattggactttttttgcaagggcgggtcttccgcctttatctttgcatcagaaacaagaaacaaaacgaagtttctgatgttataagtcaaatcaattaataacaataaaagtaataaagattatggaaccaattttaaattctcagcttcctgaattcagtgttcaggcttttcaaaacggagctttcaagactgtaaccaacaatgaactgaaaggtaaatgggcgattctgttcttctatcctgccgactttactttcgtatgtcctactgaattggtggatatggctgaaaagtacgaccagttcaaagcaatgggcgtagaaatctactcggtaagtactgactcgcacttcgtacataaagcttggcatgatgcttctgaaagtatccgtaagattcaatatccgatgttggcagacccgacaggtgctctgtgccgtgcactcggagtatatatcgaagaagaaggtatggcataccgtggtacattcgttgtcaatccggaaggaaagattaaagtggtggaattgaatgataacaatattggccgtgatgcgagcgaattgcttcgtaaggtggaagctgctcagtttgtagcgactcacgacggagaagtttgtccggccaagtggaagaagggtgaatctaccctgaaaccgagcatcgacctggtaggtaagatttgatagatcttgataatgatgattatgaagggccggtaacgggagacgctgccggcctttcttttcaaaaaaatagaaggagaaaaaggtatatgttagaatctgcattaaaagaacaactgaagggtatttttgccggactggaggcgaattttacttttgatatatcggtatcatccagtcatgaaaacagaactgaactggttgaactgctaggagacgtagcagactgctccgaccacatcacttgtgtagtgaatgaaggaagcagactgaaatttgctttattgaagaacggtgaccgtactggaatcactttccggggaatccccaacgggcacgagtttacttcgctattgttggctatactgaatttggacggcaaagggaagaacttccccgatgaggctgtctgcaatcgggtgaaagcactgaaaggcccgatacatctggttacctacgtttcgctgacttgtacgaactgccctgatgttgtacaggctttgaatgcgatgacaacactcaattcttccattacgcatgaaatggtggatggtgcgctctaccaggacgaagtagatgcattgaagatacagggagtgccttccgtgtttgctgacggcaaattgctccatgtaggccgtggcgaattcggcgagctgcttgcaaaattggaagaacaatatggaattgatgaaaccaaagcggtggctgaggtgaaagaatatgatgtgattgttgccggtggaggccctgcgggagtgtcggctgctatctattctgcccgtaaaggattgcgtgtagctattgtagccgaacgtgtcggtgggcaagtgaaagagactgtcggcatcgaaaacctaatctctgttcctgaaacaacgggcagcgaactggcagataacctgaaaactcacttgctgcgttatccggtcgatctgttggaacatcgtaagatagagaaagtggaaatactgggaaagcagaaactggtgacgacttctgtcggtgaaaagtttctggctcctgcattgattattgcgaccggtgcaagctggcgtaggctgaacgttccgggagaagcggagtatatcggtcgcggtgttgctttctgtcctcactgtgacggcccgttctacaaaggaaagcacgtagcggtagttggcggaggaaattccggaatcgaggcggctatcgacttggcaggtatttgttctaaagtaactgtctttgaatttatggatgaactgaaagcggataatgtacttcaggaacgccttaaaacattaccgaacgtagaagtatttgtcagctcacaaactaccgaggtggtaggaaacggcgacaaactgactgctttgcgtatcaaagaccgcaaaacggaagaagaacgtctggtggaacttgacggagtgtttgtacaaatcggtctttctgccaatagtagcgcattccgcgaagtggtggaaaccaatcgtccgggtgaaattgtgattgacgcacattgtcgcaccaacgtgaccggaatctatgcagccggagatgtttccaccgtgccttataagcaaatcattatctctatgggagaaggggcgaaagctgcactttccgcctttgatgacagagtacgcggcgttatttgatagaaccggaactaaaaataaaagctacaaaggtatcgttcatgcctttgtagcttttatttttttattacctttgaggctcatttaattaacccccaatgagaaacatgaaaaagaatcttttattcatttttgccgctctatttattttttcggcacaagctcagaatacgttgaaactgatgagctacaatatcaagaatgcaaacggtatggataatgtatgtaatttccagcgtatagcgaatgttataaacaatacatccccggatgtggtggctatacaggaagttgacagcatgacaaaccgaagcgggcagaagtatgtgttgggcgaaattgccgaacgtactcaaatgcatggttattttgcacctgcaatagactatgacggaggaaaatatgggatcggactgttgacgaaacaagtcccgcttcgtttgcagaccttacctttgccgggaagggaagaagcgcgtacattgattctggcggaatttgccgattatatctattgctgcactcacatgtcgctgaccgaagaagaccgtatgaaatcattagagctggtgaaggctttcacttcctcctctaccaagcctctctttctggccggtgacatgaatgctgaaccggaatccggctttatcaaaaaactgcaaaaggattttcagatactctctaatccgaaacagcatacattccctgcgcctgatcctaaagagacgatagattacattgctacgctaaagcagaatgcgaaaggatttgctgtgatatctgcaaaagtcataaatgaaccgatggcttccgatcatcgtcctatattggtggaactccgtactgccgaaaaggcggataagatattccgcatgaaaccttacttgcagaatccggtaggcaacggtattacagtgatgtgggaaaccaccgttcctgcttattgctgggtggaatatggaacggacactacccaactgaaacgtgcacgtacgattgtcgacggacaggtggtttgcaataactacttgcacaaaatacgtatagacggcctgcaacccggtcagaaatattattaccgtgtatgctcacaagaaattctgctttatcaggcgtataaaaaggtgttcggcaatacggcgcagtcggccttcagtgagtttacacttccggcaacggatacagactcttttactgccgttgtctttaatgacctgcatcagcatacgcaaaccttccgagctttgtgtcagcaaatcaaaaatgtcaattatgacttcgttgtcttcaatggtgactgtgtagacgacccggtggaccataatcaagcaaccagttttatcagtgaactgacagaaggagtgtgtggcgaccgtataccgactttctttatgcgtggcaaccatgaaatccgcaatgcctattctatcggtttgcgcgaccactacgactacgtaggggacaggacttacggctctttcaattggggggatacccgtatcgttatgctggactgtggggaagacaaaccggatgaccattgggtgtattacggtttgaatgattttacccagttacgtaatgaacaagttgatttcctgaaaaaggagttgtcttccaaagaattcaagaaagccgggaaacgtgtccttattcatcatattcctctttatggaaatgacggaaagaacctttgtgcaaatctgtggaccaaactattggagaaagcacctttcaatatcagtctgaatgcacatactcataaatatgcttatcatccgaaaggtgagctgggcaacaattatccggttattatcggtggcgggtataaaatggatggcgctacggtgatgattctggaaaagaaaaaagacgaactgagagtgaaagttctgaacgcaaaaggaaagattttactggatattaccgtctgaaacgattgggaataaaataaaggcaggctgtctcgatataaagaggcagcctgctttgttgagtaaccgtaaaatgttacttctctatatgaataatacctgtatatcctcctcctctgctcatatctatgggcagtttttcgttgtccttgataacttgttctattatttgggagtctttcgcctgttgcccggcatttactccatctatatgtgcttttattttcttcggtccatttcctatgaatgataaatcaatctcaatatgccgtggggtagctccgttgattactccgatataccatgtatcgttatgccggcgtgcaagagcgatatattcgcccacttctccctccaaagggactgtctcatcccaggttgtaggaatacttttgataaattcaaaactccggagattcttgtcatatttagtaggactgtccgaaatcatttgcaacgggctttcgtagactacatacatggctaactggtggctacgtgtgccctgactcatcggttcatgttgattttcatagaatgtttccggatgtgcgttaagcatagctccgggagtatagtccattgggcctacccacatacgcagataagggatgattacatcatgtgtaaccgtggctcttttgctccatttgttatactccagtcctattactccttcgcgtgtcatcagattcgggtatttgcgtctcatgccctcgttggggtaagaaccgtgaaagtctactaataatttgtattgagtggctttaatagctacttgttcgtagaagttaaccattttggcatcattacggtccataaagtctattttgactcccttcactccccatttgctgaattgtgcaaaagcctcatccatttgtcgcatgatgtttacccatttcgaccataactggatacctactcctttttttgttgcatattcacagatacgcggaatgtcaacatcgggattgagggttaacagatcgttacgtgccgaccagccttcgtcgatcaggacatattcgatgtgatgtttggctgcatagtctaccagatagagatatgtatcggtattaatgccacttttgaaatttatatgatagatattacggtcattccaccagtcccataatactttaccgggtttaacccatgtatagtcggcggcttgttctttctcctcggagagtaaatatataagctcgctttgtaatatggaagaagcattgtcgaagataccggtcacccgccatggaaagacccgtttcccgcaggtgggaataagatagtctttgcgtgtggaggcatagattttattatccccttcgtatggcacttccttgtccggataattggcaaaaatgccatggaaggattctagggcgggttgtaagtacattcccggataattatagagattggcttctgctaataatactttgtatttgtctacttcgaccattacaggcgctacagagaaactgtctttgggtaatgcattgatcggctttaccgtataatcctgctcaaaccagttttgtagctggtcggttaaaagagtgtacgaggtatgatcctgtccgaagcggaaagataccgactctttctttacaggctgtttattgtttgcagtacttacgaaacgataggccactccgtcattatagattctgaattcgattttatagtctttgtaaataagctcaacctggttataattatccactgtctctttatatttacgcggtacaataaattccactttttccgaaacgcttttacgagttatctttctacatttgtctgttccccaagtgtcgtttccgactgtaagtgagagcgggcaagtatcaagaatctttgttccattccgggataagctgtaactgacctgattgtcagtctcgatagttatcacatttttcttgtccggcgaaccggcctcaattattttggcaactgttatcgaaggaaaacagaaggctgctgttagtaggaaaagaatatggttcattttcataattagtttcctccggataaaacgatgaatgataatcctgtgatgaacagaataaacatgattcctaaaagtctgtcggttgatttggaactaccggtgaactctttccagataaatacaccccataaggcggcaatcataggtgctccctgaccgagagcgtaggagatggcagctcccgcttttcctgcggctatatagcttaaagcagttcccaatccccatatacatcctccgaggatacctaccagatgtgtgcttgcttttcctgcaaaatattctttatagcttacaggagttcctacaaacgggcgtttcataacaactgtattgaataggaagttgctcaggaagataccgattgagaatataaagaaagcggtgtatggagtagccatgcccggagtcggagagtcaaaattgttaaggtccatggcagcagccacaaaacggtagaagaaagacataagtatgccggcaatagccgcaagaataatccctttcttgctattattatttccctttttttgttgtctgcctgccgctattccattgcagatgatagcgataacaatcaagattactccagtaaacaaccagaacggatctcctttaggagtgctgaaatagttgatgaacacacctaggaccaaggcaagtcctacgcccaacggaaaagcaaccgccattccggctatggagaccgaagctgaaagtaagatgttggaagcattgaaaataattcctccgatcaaggcactgactatgtatctggtatctacttgccggatatcttccagaaaacctctccccgaatctccgaaacttccgagtgtgaaaacgagaagtaaggcaaataataagataccgattgtataatcccagtaataaagctcataacgccagttcttactggccagtttttgggtgttaccccaggaaccccaacatatcatggttatgaagcaaaagataatggctagtgtataactattgactataaacatgactctttctttattggtttatattcttttcttctttccctgtcacctggcggacaatggcacctaatgttctctgaatattctcatttccttgaatcataagatattgatgttgtcctttgtctgacgcattaaatagactgtgtcctgcactgtctattgtaatcgttccttttgttgacagttcaaaataatccttctccggctctatggcctgtatgacagaagtcaaatcccaagtttgcctgtcgtatggcattttgtcatatatctggtaagatacacaaagaggatgtttgtaagcgttcgggaaatcattcaagatactctgatgcggatacaacaatttgttgcctagttcccagccgcttgcaatgaccggagtgggccattcgctgaatacggtttgtgcggcatttatatcctgtactagattccattcggggaagtcgaactcgttcccatagagtcctcccattacggacaacagcttcactttttgggcaacgagtgatttgccgtccaaaggactgtattcgtcggcttctgagcgtagcaggcgtgaaaggttcgtttccggtcctacggcaataaataccacggaattatctggttgtgaagccagtaatttccgtaataacttatatccttccggcagattgtcttttatgcttctttgaggatacagtatcttattgccttcaataatggtatccaaagtctggcggagataacctccgtcttcgggagtagctccgttgtatgcatatcccaatggaatgtctcccctctcgttgaggcggcaatatccgtcaatatattcaattgaataagggttggacttgctgattgtgatacctagcagatctattgttccggcgttctcatagttgaatagcatttgcatagccagcacgtcgtcaatgtcattgccgacatccgtgtcgaatatcacgggaacaggaatcttcgtttctgtaggcttgttacaggcgctcaagaagcagaacgaaaggattgcaacagatgtgatatatttatatattttcatgttactgattatttatcgggttgtttgaattgatattttaaagacttgtcactttgaatgtcgaagaataaatctggattcagacgggtatcggcaactgattcaccaataccgatatagcccattggatgataaccgccttcgaaataattctcattggcaaatcggagcgaaggttgcataccggccggatcgagcaccgttaaagccaggatatattttcccttggcaatgggggcgtcaatagaaatattctttcggatgtgataagttggcggagctatttggtatttatgttcatctacagaccaattatctcccggcatccattcggagatgtttacttcctccaatatttttccccacactttttgatgactttcagggtctagtaaagctacttctaccggccagttataatagaatggagacgatccgctgttgacaactttgaaagaaatagggaattgtgctcccaccttaatttctttcgggtaagagaattcattgataatgaaccggtaccccatggctttttgcagtatctctgcatttttccggaactccggttcgttgaagtctgcccaggtgattccgcctagatgattgcagtgcaggttccggatctgttccatgacatattcccgggtatccttatctgccaccacttcttcaaaagatttgaaccgggctaaatctccccagttccaagtaatttctccacctatcggctgggttttccaacgatcacccagcttcttcatttcctcataacctcttacaatctcttgaggttgagaccatgaatcccaataaattccgaattcataatctttaaattcataggcgtagcgaaccattactttcttgtttttgaatgctttggcaaaggcatctcccaggatcttttccatgcccggaatccatgtccggttagctacgtgttccggttcgtcgtgcggagcccagtaagttgagagatccggatcatggtgttctccccattcgccgatgatccccatttctacatacgctacccgtggatcgttatcccatgcctgtccgagtttctctaccagtttttttacgcgctcaggaaaagaaggatcaaagtaccccccgctaataggggtatttttgtctttttcttctacataggcgcccacggagttcggtttctgtttataaggacctttttccggatctattcctttaggccagtgccaaccggtcaagtcgtccggattagtggggtctttaggttttccgccatgccagggctccagccatacaagaaaaacccggggaattaccttgacatttatgtcttccacgcctttccatcgatgattgctgtaagcgataatcttgtctaccccgtcattggcgtcatcctcgatcatattccactgcatatattcttttgtcagtgaaccgtaagggtagggatattcttccctgacccggtcgataccgggagcgaagaattccctgaagcctttcatcggattcctgaatgcattcggatactcctggtaagaaaccgtgacggtttgttcactacaagcagataacgttccgaatgccattaggagtaatatgtttctgatgcttgatttcattaagcttattggttattggattttatatttcagggttttatcctgcctcatgtcattaaaactgctgaccggtatctcaaaatagataggctcggtattgacgccgatatgtcccattgggtgacgtcctccttcaaagtagttctgaacggcgaatctcagtgaaggaagcataccggccggatctagcacagcaatagagatgatgtaatctcccgtatccagtttcttgtctaaagtcagttcttcttcaacatggttcggagtagccggttgggtataaactttggttgagttgttccagttatctcccggcatccattgggatatcttgggagtcttcagtgttttgctccatacaacttccttggtttgggaatttagcagggatatttctaccggccagtcataatagaagggtgacgagcctgtgttggttacgtcaaatgatattttgaacggctcatccggcttgatacttgttgggtaactgaaattggataaaacaaaacggtaccccattgtcttttgcaataattcagcgtttggctcaaaagacgggtcgttaaagttagcccaggtgatgcctcccaagtggttgcaatgcaaatcacgtatttgctggatgaccaggtctcttgtcttttcatctgccaccacttcttcaaaagatttgaatttatagaggcttccccagttccaggttatttctccacctatcggttgagttttccagcggtcgccgagctttttcatttcctcgtagccacgcaccttttcttcatcaatagcccatgaatcccaatagattccgaattcataatctttaaactcgtacgcatagcgaaccattactttcttgtttttgaaggcagcggtaaatgcatctcccaacaccttttcaatgcccggtaaccaggtacggttctctacatgattgggttggtcgtgaggagcccatactgtggtgatgtccgggtcatgatgttccccgaattcgccgataatccccatttccacatacgctacccgcggatcgttgtcccatgcttgtccagccttctctaccagttttttcactctttcctgaaaagtagggtggcaatagcctccaataataggagcgttaagatcgtcttcatcgtatgtctctcccggaatgtcgcttggccaatgccaaccgttcaggtcgtccgggttgtctgtatgagtgttcttggcatatcctccgtgccagggttccatccatacgatatagatacgtgggataaccttgacattgatatcttctactccctgccacctgtggttactgtaagctataatcttgtcgacaccgtcgctttcattgttttccagcatattccattgcatatattctttaatgatggagccgtaaggatacggatattcgtctcttaccttgtcatagcccgggccgaagaattcacgtaaacctttcatcggatttcgtatcgcataaagatattctgccggattgaccgtaactcttccgtctttgacttctatagttcctcccccttcgataggagggagtatgccatggtcttcttctttacatgaataaaagaagatactcatcaatagtcctgtgataaaaataaattttttcatgtgctaaatgatttatgttaatatccttcgttgttttctgtgatagcgtcattggcatcgacggctgcctgtggaattgggtatagaacatgataaggctggatggtgactccggcatggtctttcatatattcgcccagtttgccgaagcggattaaatcccagcggcgcaggtgttcacaacataattcatgtaatctttcttccagtacgacttcggcaaattgttctttatttagattatcggctgctgttatggaagtcagtcctgccctgcctcgtacttcatttaaggcatcatacttatcattacttgtgtcatcaatgctgttcagcgcttccgctttcatcaaaagcacgtctgcataacgaatcattgtaaaattcagattatcatcttcaatcacattacctgtttctgcgtcccagaatttgccggaagaaggaggtgtctgggtgacgcctgcatattctgtgatgaagaatgcttttttacgtttatcgttgttatcataagaatcgtataaatattgtgtcggaccaaatccgccccagccgccaaagttggtcggtccgcctacattacgaggtccccaataagaatgctggatacttccctccagtccccatgaaccggaatgcttgaattgaatttcaaatatattctcatattcctgattcttgtttttaggatcgaatatatcctttagattatcgtacaatttgaatttgccttcgagcatccggcagtattttaatgcttcttccggttttccccactgaaggtaaatgcgtgccagcaaagcttgggcagcgtatgaagtggctcttcctttatcttgggcattcggccaggaggtagggaggccgagagctgcttccatatcctgcgtaatcagtgtgtaaacttcgtcaaccgtagcgcgcggtctcatgatttcacttctgtcaatggatgattttgtccataagggaactccaccgtacattcttactaagtcgaaatagtagatcgctcttaaaaaacgagcttgcataatcatggaactatgaagatccgcactgactgcatccgaaggcatatcaataactgcattgcaacgtttgataccttcgtaacagagccgatagtgattgtccaggaattcgtgtgaagcggaaaaagtatagtaatgcaattgggaataagccgcccaacccatatcaaacggaattacttcatctgttccgaattcagtaagggtaatggtatatttcccgacaaagacttcctggagcgtgccataagcggcataaagagtttgctgccagtcttccggtttttcataagcattttccggtgttagtacactttggggtgtcaagtcaagaaagttgtcgcaactacataatgtcaggcaactgaaagctaatattgataaatattttttcataatgtttctgtttttagaagttaagagaaataccaccgataaagctacgggcgttcggataaggattggtattgtcgctggactctacatcaaatcccgtaaattccgtagctgtgaataggttttgtacagagaaataaactctgatatttgaggctttgatatttctgatgacgtttttcggcaagctataaccaatttccagattacggaggcggagatagtcacctttttggagattggcatcggtaccatctccgttggcataagcactaccaactctcggagccggatatttgttgttcggtctgtcttgtctccaataatatttgtaatagttttcactcatgtttccccatacattgaaagaattgaggtaacggttcagtgaattgttgattttatgtcctcctgcaaaagtaaagaacgcggtaaggtcaatacctttatatgagaatgtattcgtaaagctaccataatatttgggagtggaaactccgcagaaatcacggtcttctccgttgatgacatagtctttcttggcatccagaatcttgcggtcaccgggttgggcattgtacttggcagcttcggcagcttcattggtttgccagataccttcggatttcaataagtagaactgtccgataggacgtcccacaaacaatgttttattgacatcttgtttgccgtcataaagttctttgatcttattgttattataagaaatcatgaaggcagttgtccataagaagtctttggtactgatgttgaccgtgttcagcgtaaattcaatacctttgttatcaattttgccgatattggtaagtgaagttccgaagccggattccaacggaaggggtacttcccatagcaggtcagtcgtacgcttatagtaggcctcgatcgtaccggctatccgattgttgaataacccgaagtcaatacccaagtctagttggttggctttttcccaagtcagttccgggttcgaaatagaggtttgtacggagccggttaccaggttattacctaaaatgtaattagcggaagctcctccgagggcgattgtcggggcataagcaaaatctccgatattctggttacccagtttgccggcgctgattcttaacttcaggttgctgatgaccggagcgttttctttgatgaaactttcttcagaagcacgccatgcaagagccagtgacggaaagaatccccatcggtgtcccggagcaaaacgggaagaaccgtcgccgcgcatcgtcaatgttgccaaatagcggttgctgaaattataattgaatcgtccgtagaaagacaccagagaagatgggactgcatacgaagagttcggtccatgttcttccgctccttgcaaattgtaatacttgagaatagatgataactttttggagtcggcggttacttcttcataatctgttctggaagcggagaaacctgccattgcagaaagttgatgttctttattgatgtcaaatgaataagtggcagtgttctctgtttgccaatatcttttcttgttcgacatcacattagcatggccaccagccgtataatgctgtcccatacggccgtcttcgtaagtatttactttataaaagacaagttctccgccgttatcggaacgtaatttcaagttctttatcggttctatctcgatgtaggcggaacctacgaatctggacttgagtgtagctttgtcaagcaggtcaacaatagccaccggatttgctctcgtgttgaggaaaccatcgaagtattctccgtcttcggtatagataggagctgtcggttgtgaactaatggcactgaacatagttccgtatcccgagtcggcttcttcattgatattcatgagctttgactcaatgacattgaaacgtacaccgtatctcagccacttgtttagtttggcatccatattatatcggacggtcagcttattgaaagacgagtttttgatcgtacctttctgatcataccagtctactcctaaaaagtgttgtatatcgttcttccctccggaaatcgagaagttatagttttggtattgcccgttttgggtcactgcgtcctgccagtcggtcgattcaccacggcttagcaagcgtagttcttctgatgtccatttgtagttaggctgggcaatggatactaattcatagtattgctgtgcgttcatcaaatcttgcttgttcaacattcgttgcgtaccgaaagaggcattcagggagattttggcttttccgcttgtacccttcttggtagtcacgagtactacgccattagaacctctcgagccatagatagatgcggaagaagcgtcttttaatatttcgatagattcaatatcaccggaagataaatcctgcaaacctccttgtacgggaataccgtcgacgatgtataacggctcgctgccggctcggagcgaacctactccacgaataacgacagaagcatctccacccggttttacggagccggtagtgacttgcacgccggcggcaagtccttgcagggcagttgtcactgttcctactttggagttagtaagattttctgatttgatagaggcaacggcacccgttaaatcgctctttttggcaataccatacccgattgccactacttcgtccagattaatggtgtctgctgccatttgtatattaatgacattttgctttcctacggtaacagattgttttaccatacccacgaaagtaaactccagaacatttcctctttgggccctgatgctgtagttgccgtttgcatcacttactgttcctgtttgagtaccttttatggttatagatacacctggcaatgtttcattactcgtgtcggtaacggttcctctaatgttgattgtctgtgcatgtaatacactggcaaaaaagatggctataaataatataatgtgttttttcatgacgcttattttataggattgttagttaataggcccggataggaagaacaccaattttccaaccgctttttgagcagatttcagaaacgatattagtctcttcgtagaagttcacataataggcagaccagccggcttccccgtcgccttcacttgaagtccagtaattgtttgccggaatattgactcctttctcagctaataaacttttaactttgaatacttcgatcagttcttctctggaagggaggaaccagtcggcatatacggcatttccttcagtgacactgttgttcagacaaagttgggcggcaattttgactccttgccactcgggccagttgttcgcactctgcaatgcattaaactttttgactatattttgagtgtttgtatagccgcttcccatgttttgactcgttccggccgcgtccgacggatttacctccggaccgaattgttctgttcccgtaccgatgttactcatgtttacgatatatccgtgtgcctttgcagcgtccacccagaatacaacacctcctccgagtttgtcgccaacattcgtttcgatagtgattgttccaagattacttttccgttctcccctgataatcataatagagtttaccccgtataatccttccggaagtgtaaattctactccttcttcattaagagttaatggcagattgtattcgacgcctgtcgggtagaaagaagcatataatacggcgacgtcccctgcttcaaatccttttccctgaatctcgactttgctcttgggctgtacattacctgaagggagaacgatatcaatgatcggaacaacgaaaggcactttgaaagttccgtttaaaacggtctgtttccctgctctttcaattgttacggtatactcgccgcctgcttctaccgggacgataaacttcaggtaactgtctgtaatctccgtgacttctaccttttctttctggttgtcagcgttacttaaatagactatatcttcttttgcaaaaccgagtccgttgatttgcgcaacctgaccggggatgatgtcattttccgaaggaaattttatttcctttagaatgggggctatgggagtagcggtgtgttcgtcgtcgctattacaactataaaagctgcatactatcaagcccgataaaatagggatgagtagtcgtttcaaataggttttcatggttcattaaatttaaaagttgaacgataaggctaattctttttcaagcatgaagtgcttcacttcatcgagagtgggaatagacggttgtgcacccgagcgtgtgactgcaatggctgccgcagtgttggcaaagttgagtgcttcccggtctatttctttttttgcacaaacgaccgccaatgcgccgcaaaaagtgtcacctgcggcgattgtgtcgatcgcatttactttacaaccgggaagttggatggtttctttagcatttttcatgtatgcaccttggcttcccagtgtgattaccacattgcttgtacccgctttcagcaatgtttcggctatttcctcaagattattatctgtataatctatccctgagatgaatgaagcttccagctcattgacgactagtatatcaatggctttcatcagctcctcatcgatcagacaggcgggtgcgggattgaacaatacctttttaccttttttctttgctgatagagctattttttttattgtttcgtaaggaatctcagcctgcatgacgatgatgtcggcttcgtcaattacttttgagaaatgggtgattgaaccgggtaataaagaatagttagctccgggagctactgcaatgcagttctcaccactgtcagccacaaaaataagtgcggttcctgtgggatgattgacatcatcaataatgtaatcggtggtgataccttctttcttaaagtgattttttaaaatatccgcatacatatcattccccaaagaggtgacaaacgtcacaaagccgccaagcctggctgccgccacagcctggttggctcctttgcctccgagggactgcatgaaatttgcatctccgactgtttcgccgggtgccgggagatggctgacttgtgcaaccatgtcgatgtttgaacttccaataactactactttcatttgaatcagatttatgtgatagacctaggctttttctttattctataagttgacttcccttttgtatggaatagcactctgggcaccgatgcgtgtgacggcaatggcggccgctgcatttgcgaattttacggattcggccaacgaatgtccttgggatagatacacactgaatgctccgcagaagacatctcctgctccggttgtgtcgatcgtctctacttcttttgcaggaatcatggtatattcgtccttttctttcacgtaggctccgtcttttcccaaagtaatgacaacattttctatacctttctctccgatagctttagctgcccggtgcgcactctcaacatccattacttttattcctgatagcatttctgcttctatacgattaggcaatatagtatgtacattatttaaaaaggagttgctcaacgtagaggcaggcgctggattgagtattactttcttaccgtatcggttggcaatagtagccgcgtactctactgtatctatcggaacttcaagctgcatgagtataatatcggcttccttgattttttcttccgctttattgatatcttctgttgaaagcgaacggctggcacccggtgctacaataatactgttttcaccaaacgaatcgacagaaataagagctactcctgacgggcttttctgatcggtgaatataaattcagtattgattttctcagatctgtatatttctaaagcttgcagcccgaatagatcgtaaccaattttggagataaaggtgacttccgctcccaaccgggccgctgcgattgcctgattggctccttttcctccggggttcatatagaaagttccacctagaatggtttctccggggacaggtagtctgttggctttcacaaccatatcggtattacagcttccgataactacgattttgggtcgattgctagatatagtttccataatattaataattaagatgatgcaaataaaaggaataataacgcgtcgttttttacattaatattccatttatataatttcaaattatatatttaggatgaaatatcctgtttaaaaataatttatggattgtattgttgtgcggaattatataattacaaacggataaagtgaaaataaggagagcgttttagtgttgtgagtttagatgatctgctttttctttttagatttctttagcatttgtgtgccgtttaagaacatcagacagtttttcttttcgtatttttgattctatccatgcggtaaaatcgaaaatgcgtaatagctgattttcgtatttattattgtataattcatgaatttcgggatataacttttcccagaaatcttcccggtcttttcttagaataggcagattacttttatttaagaaccataaaaccgtatgctctgttttgaaagtctgctctttgggagaagacaggctgcgggtaatagaacgggattcgtgtcgtatcaattcaaattcttgtgtctcatagtaagctataagacgaaccagacgaatggttctcattaatggcaggtatttgatattatgatctataatggcattactgatatatttttttgcggccttgtaattttggtttccgatgtgtatgagggtcgtgtaaagtaatagctcgcttttacgaatcggacttaaccatgcttctttatcataaagtgtttcctgataacggctcatgagttctgtacattcagcaaagttccctttgtcgaggtaaggaaatagctcatattggaaaagcaggcaagttgcatttaccttaaattccaatgaagaatcctctgcgattaactttcttaatttctccaggaaatagggtatctcattataatttccaaccgaccgcagactaccgagtactccttcaagtacagataaatagtaaatggggggattcgaccagaattgctgattctgttcaaataatgagttaagctctttgtatgaatttagggcagctcggtaatctcccgcccccattagatagtttgcttgaaagagtttatggtttcgtgtcaattcaaagtttccttccgcgtctgaagaagcggctatatatagctcgttgaccataaggtcgttcatatcttgtttttgcttcgcagttcgtatggagccgatatgagagaggcggtattttagtaaattgtgcagagaagattgctccgttatttttcggattttctttaaagattcattttggataaaatgtttatgaaaaagttcttgttctgtcatgttggggaaattcagccgtagcagatattccagttcctgtttttgggcaattgtcagtatctcattgttttcgtagaattgagcttgctcaattgtgttggatagaatctcgaaacattcttcgaacagagagcgctcatacaacatacgggctttgcatagatcattcagcagatcataatagatgtctttcttcttccttaatgtgagcagcgtgtctaccagtttctcatataaatattgaatggatacttcgaaggagcctctcggcctgcgcttataaaattcttctttcactgtatttccgttgggttgtttactcttcgtgataatgtcgtaaatcacaagatagtccttctcctccttgtctttaacgacctgcaaggagaagtgtttcttttctgattttgataaagagtatattagggagataacggaatcgactcttttcatgaaagtcctttcaattagtattagattgcaatattcgggaatttctgtgaaaaaagcaagttattcaagaaattaacacatccggtttaaacgagctcagaccggatgtgtctctaaatattaatgagttctttgcaacattaactatactctatcattcaaagaactttagttcttcgaatgataaacttcggttcttcgaataaaattatgcattcaaagttattaatatttttaggtaaaggtgttattttgtacatttaatgagaaaatattattttctttccatgtttttacgggaaaaactataccttcgaagcacatttatttaatattaaagaagaaatgttggatttaaaacagctcacaggcgatgtatgccgtatcgcaaccgaagccgggcattttttgaaagaagagcggaagaatttccgtcgtgagagtgtggtggagaaacatgcacacgattatgtgtcttatgtagataaagaatcggaggtacggatagttaaggctctttccgctttgttacccgaagctggctttataacggaggaaggctctgccacttatcaggatgaaccttattgctgggttattgatccgctggacggaacaacgaattatattcacgatgaggctccttactgtgtatgtattgctttgcgtagtcgcaccgaactgctcttgggtgttgtctatgaagtttgccgggacgaatgtttctgtgcatggagagggggaagggcctttatgaacggggaagaaatacacgtttcaggtgttcgggatataaaagatgcatttgtctttgctgagttgccatataatgcccaacaatacaaacagacagctctccacttgatagataaactttacggagtagtgggcggcattcgtatgaatggctctgccgctgccgcgatttgttatgttgctatggggcgttttgatgcgtgggcggaagcttttctcggaaaatgggattattcggcagcggctttgattgtgcaggaagccggtgggcgggttaccgatttttgcggtaacggacacttcatggacggccatcatattatagcgactaacggatatttgcattctgtatatcaacagcttattgcagaagtccctccattggatatgtgacgatattgtagccttcaattctctatgattatgaaacacacatttcttgttaaagaatggtttggggcttttctttccctcttattccctcgttgttgcgttgtctgcggcaggccattggcaaaaggggaagaatgtatttgtgctgtgtgcaatatggatttaccacgtaccgattatcatcttcgaagagataatccggttgagttactattctggggaaagtttcctttggaacgggctacgtcttttttctactatcggaaagggagtgattttcgacggatactacatttgcttaaatatggagggcagaaagagataggagccatcatggggcgatacatggctgcggaattgatagagtccggtttctttcagggaatcgatgtgataattccgattccgctgcatgagacgaaacaacgcatccgtggctataatcagagtgaatggatagcgcggggaattgctgccgtgactggaatccccgtcgatacggaagctgttgtacgtcggaaatatacggaaacgcaaacgcgtaaatctatttttgaacgttgggagaatgtggagggaatcttcgaattgcatcatgctgaatccttgattggaaaacacgtgctaatagtggatgatgtgttgacaacgggagcaactaccgtagcatgtgcttcccggatcatggaagtagagggtatacggataagtgtgctgacattagcggtagcagattaaatgtattctctttagtagtaccggataatcgaaaaaatagggggatattcctttggtggagtttgaggatgtttatcctgaagattgtatctacatatttggaagaaatgaaaaatgttatcttatattacttcgtaaacggatacgcttttcgatgctcttctattctataatgcagttttctctatttttacaaccagctattccgctattaataaacttgatttctgtttataataaacttttggatagtttattataaacggtatccgagtttattaaaaactatttttcccgtttttcgaaaatggattaaatattttaagtaaaaatataaacaaaataggacaataatcgttagactattgccctatatcatatctatcctgatactaaaatatatcagtcggaatgttgtttatgtatctatttttcttatatttatcatgctgtttatcacttttatttcttcaaagatacaaaataaaaagtcgtttgtcaagtatttcagaagaaaagcagactattcatgcacggctgagataataaggggctatcagtaagcttcactaacttcttacccatagacttgtcgtttagttaggtttcaacaaacttactctattttcatgtggtatccaattttgttcagttaatgaaacaaaatacagggtattggcttatctaaagggcttgattcttcgcataaaaatactaattcatgcatgaaataagaaaatcttatttttcttctatgctttttgcgggaaaaactataacttcggagcgcttttgataacccgtggaattgttgttgtgacaggaattccttatagatactcaagaaaagatagaaaaacgcatgagaaaaattgtagttttatttgttgtggcattttgcctgctctccacaggaatgagagctcaacacacatttgtacataaacaatcatcgacctacgaatggccggaagactctctcgtattgaagaaactggaccagtggcgtgatttgaagttcggtgttatttttcactggggactttatgccgtgcctggtattgttgaatcgtgggctctgtgttccgaagacgtggactggatcagtcgttacggtcacaataactatcaagagtttaaggattggtattggaacggattgagtaagcagttcaatccgactgaattcgaacctgcccaatgggcggaagtgacgaaacaagccggtatgaaatacatgatttttacgactaaacatcatgacggcttttgtatgttcgatagtcaatacacggatttttccatatcccggtgtgcttttaaggagcatccgaaagcggatgttgccaagtatgtattcgaagccttcagaaaggaagggtttatgacaggcgcttatttttcaaaaccggactggcataatcaggactattggtgggattatttcgctacacctaatcggaatgtgaattacaagatagaacgtcatcctgagaaatgggaagcttttaaaacatatacacataaccagattggtgaactgatgagcaattatggaacgattgatatcctatggttggatggcgggtgggtttctcctcgtaacaatcaggatatcgatatgccgcagattgctgctatggcgcgtgcaaaacaacccggccttttggtggtagaccgcactattcatggtaaatatgagaactatcagacaccggaacaaaaaattcctgagcatcagcttccctatccatgggaaagttgtgtgacgttgactacggattggggctgggtaaagaatccggtttataaaacacctaaccggattatctccattctgatggaagtggttgccaaaggcggaaatttacttcttggagtaggacctactgccgaaggccttatcgaacaacctactgtaaaacgtttgcaggagattggacgctggatgcagaaaaatgggaaggctatttaccatacccggatcacccccaattaccattgtgggaatgtttggttcactgccgataagaatggcagaaccctttatgcgttatacgctttgcctgaaggagaaacgctgcctgctgtcattgagtgggaggggaatgttcctgagcgtggtacaagtgtcagactgttgtccacaggacaacgtatgaaatggatagaaagagatgggaaagtggcagtgacattacctgctaaattggcaggtagcaccgagcctattgctcttcagttcgatacttctttgccgaaacaaaacaagaagtgataataaaaaagccacccatttaggtggcttcttttttgctcttcctcttggacttgaaccaaggaccctctgattaacagtcagatgctctaaccgactgagctaaggaagaatgtttgcaactaagatttctaactttgctcttcctcttggacttgaaccaaggaccctctgattaacagtcagatgctctaaccgactgagctaaggaagaatgtttttctcaattgcgatgcaaaagtagtaggtttttttgaaatatgcaatatctttgcaaaaaaaatatttgaaatggacaaaataataggattgggcaacgccctggtagacgtacttgcaaccctagaggatgatacgctcctggaggaaatgggattacccaaaggaagcatgcaactgattgatgacgctaagttacagcagattaacacgagattttcacaaatgaaaacccaccaggcaacgggtggatcggcaggaaatgccatacttgggctggcttgtcttggtgccggaacaggatttataggaaaaataggaaatgatcattttggggatttttttcgtaataatcttcagaaaaatgatattgaggataaattattgatttcggaacaacttccttccggtgttgcatctacttttatttcaccggatggagaacgtacttttggtacttatttgggagcggctgcttctttaagggcagaagaactgactcttgatatgtttaaagggtatgcttacttatttatagaaggttatctggtacaagaccatgaaatgattcttcatgccattgaactggcaaaagaagcaggattgcagatttgtctcgatatggcaagttataatattgtagctagtgatatggagtttttctccttattaataaataaatacgtggacattgtctttgcgaacgaagaagaagcgaaggctttcacgggtaaggagccgaaagaggctttaggagtgattgccaaaaaatgcagtattgctatcgtaaaagttggtgcggaaggttcttatattcgtaaaggaacggaagaaattaaggtttctgctatcccggtagagaaggtcgtggatactaccggtgcgggggactattttgcttccggttttctatatggattgacatgtggatattcgttggagaagtgtgctaaaataggttctattctatcgggaaatgttattcaggtaatcggaacatccatgccgcaagaacgttgggatgaaattaagttaaatattaacaggattctggcggaataaccagggattgagttacttttacaactcatttatattgaaagaagtatgaaaaaattgctgagtgggcggatagctattgttgtagtagccgtgatagctacggtagctttctttagtttcaagagtggagacgaccgcaatttccagattgccaagaatttggatatattcaatgcgattgtgaaagagctggatatgttctatgtagatacaattgacccgaacaagaccattcgggaagggattgacaatatgcttttcacgctggatccttatacggagtattttccggaagaagaccagagtgaactggaacagatgattaaaggctcattcggtggtatcggttcttacattgcttataatacaaagctcaaacgttcgatgatttccgaacctttcgaaggtacacctgccgcgaaagccggattgaaagccggagatattctaatggaaatcgatggcaaggatcttgcgggtaagaacaatgcggaagtcagccagatgttgcgcggacaggctggaaccagctttaaattgaaagtgaaccgtcccaatgcgaagggagggaatacaccgatggaatttacgattgtacgtgaatctattcaaaatccggcgattccttatgctgctgtgctggataatcaggtaggatatattaatttgagtactttttccggtaatccttctaaggagtttaagaaggcgtttctggatttaaagaaacaaggggctacttcgttggtaattgaccttcgcgggaatggcggcggcttgttggatgaggcggtggaaattgctaactatttcttgccacgtggaaaagtgattgtaacaacaaaaggtaaaattaagcaggcgagcaatacttataagactttacgtgaaccgttggatttggatattccgattgctgtattggtaaatagtggcacagcttctgcttctgagattctgtcgggttctttgcaggaccttgaccgtgctgtagttgtcggcagtcgtacttttggcaaaggactggtacaggtgccccgttctctgccttatggaggaacgatgaaagtgactacttccaaatattatattccaagcggacgctgtgtgcaagctattgactataaacaccggaatgaagacggaagtgtaggtactattcctgatagtttgacgaaagtgttctatacggctgccggacgtgaagtgcgcgacggaggcggggtgatgccggatgttgctatcaaacaggaaaagttgccgaatatcctgttttatttggttcgggataatctgatattcgattatgcaactcagtactgcctgaaacatcctactatcgtagagcctgaaaagttcgaggttacggacgctgattataatgactttaagacattggtgaagaaggctgatttcaaatatgaccagcaaagtgagaaaattctgaaaactttgaaggaggctgccgaatttgaaggttatatggagggtgcttcggaagagttcaaggcactcgagaagaagttgaaccatgaccttgagcgcgatttagattatttctccggtgatataaagaagatgatagcttctgaaattataaagcgctattattatcagcgtggtaatatcattcagcagttgaaggatgatgacggcttgaaggaagctgtgaagattctgaatgatccggcgaaatacaaggaaatgctaagtgcgccggttgccaagaaatagggtatacgtgtgataataaataaacgacggggtgtatggtaaatgcaaatactcgtcgttttttttgtttctgataatccggctatttttattcggttgttcttattgacgaatcagaggcagggtgaagtagaatctgcttccttttccttcttgggaacgcagccatatacgtcctcccattttctctactagcattctgcaaagagttaatccgagtccggtaccttgtacaaagtcgtttattttaccgaatcgttggaagatagtagctactctttctgccgggataccgataccactatctttgacataaaattccacgaaatcttccttctcccgatagccgaaatgaatttctccttttggggtgaatttggcagcattactaagcaagttacttataatctgtatgatacggttccagtctccggatacataaagctcggtatctacatcgtccagaatcagtttagtaccgtttttgactttataacagaattgctgttccagttgcaggcagatatctattaatttgatagggcggatattgaaactcaatgaatcggcttcgagtgatgacaaatccagaatatcattgaacagattcagtaatatttccgaatttctctcgatgatttcagcatactgttccttctcgtttgtgcattcagcgtcgatgactaatttggaaaatccgacgatggcgttcaggggggtacggatctcatgactcatgttggcaagaaaagcagatttcaggcggtccgattcttcggctttgattctggcggcctccagctctttttgttgtttcttgttggtttgttccgcattccattgttcggatatatcgcgacacatacatagcaggtattcgttatccagagggaaaatacgattttcgtaatggtgtaagataccgtccagcatcagatcatgtcgggatgttgagctttctcctgtaaggattaccctgtccatattttggcgtacgctttcgtaggcttccggcgggagtatgtcttttacgttagaatgggtgatattatcggcattgataccttccacatgattggtcgacggagaggaggcgagttcaataatgtttgcatcgtggtcgaaaactgtcaacatatcgggcagggcgtccagaatacgggtactgtatttttcacggaaacgttcttgtacggggtatgactgcatagaagaaagatcttcgactttcttctctaattgttctataattttaatcagctcttcttttgtcttgttctcgttgttttgcatagaaggttcaataaatctgttatcaatgttgtataaagtgcattaatactgcaaatataagacaataatccgacaaacgtgccaggcttcctagttattataatataaaaaaggaggatagcttttgccctactaatcagaatgttctatctttgcaccacttatttataaatgatttacaatatgtctacagaattattctctactctgccctacaaggtggcagatattacgcttgctgacttcggacgcaaggaaatcgatttggcagaaaaagaaatgcccggcctcatggctcttcgcgaaaagtatggagaatccaaaccgttgaaaggtgcccgtattatgggatcgttgcacatgaccattcagacagccgttctgattgaaacattggttgctttaggtgctgaagtacgttggtgttcttgtaatatatattcgacacaagaccatgctgcggcagcgatcgctgcttcgggggtgcctgtgtttgcatggaagggtgaaacgcttgccgactactggtggtgtacgttgcaggctttgagtttccccggtggtaaaggaccgaatgtgattgtagatgatggtggtgatgcaaccatgatgattcacgttggttatgatgctgaaaacaatgctgccgtgctggataaggaagtgcacgcagaagatgaaatagagctgaatgctatcttgaagaaagtgttggcggaagatgctacccgttggcatcgcgtagcggaagaagttcgtggcgtatctgaagagacaaccacaggtgtacaccgtctgtaccagatgcaggaagaaggcaaactgttattcccggcattcaatgtgaacgattcggtaacgaagtccaaattcgataatctgtacggatgtcgtgaatcattagctgacggtatcaagcgtgcaacggatgtgatgattgccggtaaggtagtagttgtgtgtggctatggtgatgtcggtaaaggatgttcacattccatgcgctcttacggggcacgtgtgcttgtgacggaagtagacccgatctgtgcattgcaagcggcaatggaaggctttgaagtagtgacaatggaggatgcgtgcactgaaggcaatattttcgtgactactactggcaatatcgatattatccgtattgaccacatggagaagatgaaagaccaggctatcgtatgtaatatcggtcacttcgacaatgaaattcaggtggatgcgttgaaacattatgcgggtatcaaatgcgtgaatataaaaccgcaggtagaccgttattatttcccggatggccatagcattatactgcttgccgacggccgtctggtaaatctggggtgtgcgacaggacatccgtcattcgtgatgagtaactcgtttactaatcagacattggctcagatcgaactgttcaataaaaaatatgatataaatgtatatcgtttgccgaaacatctggatgaggaagtagcccgtctgcatcttgaaaaaatcggggtgaaactgactaagctgactcctgaacaggctgcttatatcggtgtatcggtagacggcccttacaaggcggatcattatagatactaaattcagttgataattgatagttgataaatgatagttgttggcttgggggctgaatgcaacaagtcagttatcattctcaactatcaattatcatttatcaactatcaatatattatgaagaaaatccttccagacttaattgccattctggcttttatcattctttcttttgcttatttctttccggctgatatcgaaggtcgtattctgtttcagcacgattcggtggccggagttggtgcagggcaagaatccaaggaatatctcgaacgtaccggagaacgtacacgctggacaaactctatttttggcggtatgcctacctatcagatgtctccgagctacgattcaacaaagactttgaagtgggtggaaaaggtgtatcagttataccttcccggctatgtcgtactgactttcattatgatgctgggcttttatatccttctgcgagcattcggattatcagcatggctggcaggactaggggggattatatgggcattctcttcctatttctttattctgataccggcggggcatatctggaagtttgttacattggcttatattccgcctacgattgccggtgtcgtattggcttatcggaagaaatatttgttaggaggggttattacagccttgtttattgctcttcagattcagtcgaatcacattcagatgagttattacttcatgtttgtgatcctgttctttataatagcttattttgttgatgcttatgaaaagaaggaattgccgcatttctttaaggctagcgctattcttgcattagctgctgtggtaggagtttgcgtaaatatctccaacttgtaccatacttacgagtatagtaaggagaccatgcgcggtaagagcgaactgaaacaggaaggccctgctgccaaccagaccagtagcggactggaccgcgattatattacaaattggagctatggcataggtgaaacactgactctattagtgcccaacgttaagggagggggctgttctactactttgtcacagaatgaaactgctatggcaaaagcaaacccgatgtacggaaacctttattcgcagttgacaccctattttggcgatcagccgtggactgccgggccggtatatgtcggagcgtttgttgtgttcctgtttattttgggatgttttattgttaaaggcccgctcaaatgggcactgttgggagccaccattttttctatccttctttcgtggggaaagaacttcatggggctgactgatttcttcatcgattatattccgatgtataataaattccgtgcggtatcctccattcttgtaatagccgaatttacaattccgttgttggcgatttttgctttgaaagagattctgagcaaaccggatatcctgaagctgaaagagaaccgtacaggagtaattgtcacgttggtgcttacagccggtgttgcgttgattctggctgttgctccgggagttttcttctccaacttcagttcaggacaggaaatggctgctttgaagcaagggcttccggcggaacatcttgttcctgtcatgaccagcctgaaagatatgcgtgaggcgatactaacttcggatgcatggcgtagcttttttatcatcgttataggttgcctgcttttattcttatatcaacagaagaagttgaaagcctcattcaccttaggaggtattgtacttctgtgtctgatagatatgtggagtgtcaacaaacgctatttgtatgatgatctgtttgttccgaagtccaaacaagcggaagcattcgtcaagacgcaggcggatgaaattattcttcaagatacgaccttatattatcgggtattgaactttgtaggtttccccggcaatacatttaatgagaataatacagcgtactggcataagagtgtcggtggttatcatgccgccaagttgcgccgttatcaggaaatgatcgatcatcatattactccggaaatgcaggcgacctatcaggaagtagctgctgccggtggcaaaatggacagcgtggatgcttctaaatttcgtgtgctgaatatgctgaacacgaaatattttatcttccctgccggacaacaggggcagcctgttcctgtggaaaatccgtatgcatacggtaatgcctggtttgtggataaggtgcagtatgtgaataatgcaaatgaggaaattgatgctttgaatgatattcttcctacggaaatcgctgtagtagatgcgaagtttaaggaaaaactgaagggtgtgacggaaggatataaggactctctgtctgccattcgtttgacgagctatgagccgaatcgtttggtttataagacttcttccgctaaagacggtgtagttgttttctctgaaatatattatccgggatggcaggcaacgattgacggtcagccggtggatattgcccgggcggactatgtgttgcgtgtaatgaatattccggccggtgaacatacgattgagatgtggtttgatccgcagagcatacatgtgacggaaagtattgcttacgcagcattggctttgctgttgattggagtgatgattctggtatggatgagtagaagcagaatctctaagaaatcttgaatgaaatgatgtaatgcttaccttattgcatagaatagataaggttattagataagaacggctctcttcctcccgaagagagccgttttgcattcactaaaaaattatgaaaaacaaacgctatttggttgtttgaatatgctgattaatcattctttatttgttttaatacctcaaaactaagcagatattgggatagatgaaaataaaatcgactaagtacggagttttgtctatcaaaagttctgttgaaaaaggaaaatatgaatataaagagtcggtttatgggtagctttcatttgtcctaacccactaaatttgtagccgattatagagcatatattatgaaaagactactgttcatttttaccttttttattttgctcgttgtaaacgggagagcgcaaggagtagaaaccttgacattggaagattgccttcggataggtattgataacaacttgtcgttggagagcaagcgtagagaaatacagaaaagcaaatatggtgtatctgaaaatcgggcaagattgttgccgcagattagtgctgtcgccggttatagtaataattttgatcctccggtatctgtgacggacggttcatcttacggcgttccctataatattactcaaacattgcaacattctgctaatgcaggcctggaaatgcaaatgccgcttttcaaccagactctttatacttctatgtctattgctaaagttgtggaggagatcagccgcttgtcttatggtaaggcgagggaggacattattcttcaaatcagcaagatgtactatctggggcaagtaacagccgagcaaatagtgttgataaaggcgaatatcacccgtctggaagagttgcgggatataacccgggctttctttgataatggtatgtctatggaagtcgacctgaaaagagtaaatatcaatttggagaacctgaaagtgcaatatgacaatgcacaggcaatgatgaagcagcaacttaatatgttgaagtacattatggattatccggctgaaaaagaaatagccctgacaccggttaatactgatagcattactacggtcgctttaaccggtttgtcggagaacctctacgaactgcaactcacgcaatcgcagttggaactggctgaacggcaaaaacggatgattactaatggctatatcccttctcttagtttgacagggaactggagatatgctgcctacacagataaaggttatcattggttccattccggtccgtccaatcattggtttcgttcgtatggactggggctgactttgcgcattcctatttttgatggactggataaaacctataagataaggaaagcgatgatcgacattgagaatcgcaagctggcatgggaggacacccggaaaaatctgcaaacccaatatttgaatgcggtgaacgacctgatgaataaccagcgtaattttaaaaaacagaaagataactatctgttggcggaagatgtctatgccgttacttccgaccgttatcgcgaagggatcgcttcaatgactgaggtgctgcaagacgaaatgcagatgagtgaagcgcagaacaattatatcaatgcacattataattatcgggtcaccaatctgatgctcctcaaactgaccgggcagatagaatcattagtcaaataatacgcaactaacaatcgaatcataaaatatggaaacaatggaaaataatattccttccgctactcatcaggagaaagcgaagaaaatgaagaaacttcgtcgttggcagattgcagtcagccttttaggagtggctattattgtctggggagtaattgaagtggtttgtctctttttgaattatagccagacggaaaccagcaacgatgcccagatcgagcaatatgtatcgcctatcaacctgcgtgcttcgggatatattgataagatttactttaccgaacatcaggaggtacataaaggggatactctgatggtgctcgacgatcgtgaatataaaatccgggtaatggaagccgaagccgcactgaaggatgcgcaagccggtgccacaataattaatgccacgttgaatactacacagaccactgcatccgtctatgatgcctctattgctgaaatcgaagtgcgcctggctaaactggagaaagaccggaaacgatatgaaaatctggtgaaacgaaatgcagcgactcctatccagcttgaacagattattacggattatgaggctacgcgtaagaagctggaagctgtggaaagacagaagaaagctgccctttccggtgtggatgaggtgtcttatcgtcgtgtgagtaccgaagctgctattcaacgggcaacggcggcacttgaaatggcacgcctgaatctgtcttatacggttgtggtagctccctgtgatggaaagctcggccgtcgttcgttggaggaaggacaattcatttccgccggacaaacgattacttatattcttcctaatactcaaaaatggattgtagccaattataaggaaacgcaaattgagaatctgcatatcggacaggaagtatctgttacggtagacgctattagtgataaagagtttacggggaaggtgacatctatttcaggggccacaggttctaaatactcattagtcccgacagataattcggccggaaactttgtaaagatacaacagcgtatccctgtacgtattgattttactaatttatccaaagaagataacgaacgactggcagctggtatgatggtcgtggttaaagcccggctttagtttcattctgccttgtccgtgaagtgtgattaactatttgtaaacagtaatttggatttacacaaatgccctcatatcctaaaaactatcctttttataactggatgcccaagccattggggattatcatcctattattctttttcctgccgattcttacggtaggcggggtttattcggtgaatagtaccgagatgatgagcggtcttggcattatttccgaacatattcagtttgctaactttgtgacttcgatcggtatggcggcttttgctccattcttgtacgaactggtgtgtgtgcgccgggagaagatgatgtgcattgtcggattcgcattgatgtatatattcagttatatttgtgccaagaccgatagcgtattcctgttagcactttgtagtctgttgacaggctttctgcgtatggtgttgatgatggtcaatctgtttacccttatttggtatgccggaggcatggaagctacccgtaatatcactccggggctggaaccgaaagacgcagccggttggaacaaactggatattgaaagatgtgtgagccagccggcggtttatctgttttttatgattctgggacagtcgggtacggcactcacggcctggctgtcctttgaatatgagtggaagtatgtgtattattttatgatggggattctactggtttctatcttaatcatatttatcactatgcccaattacaaattccctgggcgctttcctatcaacttccgtaagttcggtaatgtcactgccttctgtgtttcgctgacgtgtctcacttatgtactggtttacggtaaagtgctcgattggtacgatgatgagtctatccgttgggcaactgctgtcagcatactttttgccgggatctttctctatatggatgtcacccgccggtcgccttatgtcttgttggatgcattcaaactacgcaccatccgtatgggcgctttgctttatctgctgctgatgatcatcaattccagtgccatgtttgttaatgtattcgcaggtgtagggatgcatcttgataatttgcagaatgcttcgttgggcaattggtgcatggtggggtatactattggtgcagtgattgctatggcgttggggagcaaaggattgcatttcaaatatctttttgctcttggatttttctttctgtccttatcggctgtgttcatgtattttgaagtacagacagcagggatgtatgaacgtttgaagtatgcagtcattatccgtgctattggtatgatgattttgtatgccctgacggcagcttatgctaatcagcgtatgcctttcaaatacctttctacctggatttgcatcatgctcaccgtgcgtatggtgctgggacccggtattggaggagctatttattcgaatgtgctgcaggaacggcagcaatattacatcacccgttatgcgcaaaatgtagatttgctaaatccggatgcttctacttcttttcttggtacggtgcaggggatgaagtatcaagggaaaagtgagacggaagcccgtaatatggcagctatatctactaagggacggattcaggtgcaagccacgctttccgccctcaaagaaatggcaggctggacgatctatggcgggttaatttgtatgatatttgtgcttgttgttccttatcctaaacgaaaattgctaacttagcgtcgtttttgataatgatttatataatgtattggtattatggatacacagcaagatcgtttattgcaatttgaccgcgacttgttgagcgggaaaaatatatgtagttcgagaggtgtacttgtgacttttccgtcttctttaaaaaaactgttccacatgaaaggattgggggtgattatttgtcaccgggggagtttccagttttccttgaatcagaaggtctgttctgctaaggcgggcgaaagcctgtttattcccgaagaaggtgcgtttcaggttcttcaggaatcagaagatatggaagtacagattctgatctatcagatagagcccatacgggatattatgggcaatgcggttgtgactatgtatatgtattcgcggattactcctgatgagcctagttgtgtgtggaccaccggtgaagaagaagaaatcacgaaatatatgtctctgctcgacagtgctgtggaggtagaagaaaatccatttaaactttacgaacaaaaactacttctacttgcattaacatacaggatttgttccatgtataatcgtaaattagtgaatgatggagaagaagcgggaggacggaaaaatgaagtcttcatccgtttaatccagttaattgagaaatattatatgcaggagcggggagtggaattttatgcggataaactctgtttgtctcctaaatatctttctgcggtttcaaaaagtatatgcgggtatacagtacaggaacttgtattcaaggcgattatccgtaaaagtatctcgttgctgaagaatactcagcaggacattcaggaaatctcgaatgctttcggcttccccaatgcttcttatttcggtacattctttaagaagcaagtggggatgtcaccgcagcaatatcgaaagagtctttaaagatttattctttttctccgtaggcaagatcgccagcgtcgcccagccccggaacgatataggagtgttcattgatttcggggtcgatagcagcacaccagatcgttgtcttatcttcggggaatacatttataatatgatcgatagccttctggctggcgatgatggaagcaacgtggatttcggcagggtgacctttggtcagcattgcctgatagctcagttccatactgccgcctgttgccaacatagggtcggtgatgatcagcgttttgtcgtcaatacggggagaagcgatatattctatatgtatatcaaattttagcgtatccttatacttacggtatgcggaaacaaacgcattctccgcaccatcgaaataactcaagaagccctgatggaagggtaggcctgcacgtaagatagtgctgataactaaattgttgtccggtgtacttaccggagcaactcccagtggtgtccggatgttttttaccgaatatgtaaactccttactcatttcatacgccatgatttctccgatacgttcaatgttacggcggaagcgaaggcggtcgttctgaacttctacatttctgatctcggatatgtactggtttagaatcgaatttgttttgctaaaatcaattactttcatattatagtttaatcataatttaatctcattttcatagtattgatagcatactgacttgcaaagtaaatgataatctttcaaattgcaatattcagtttgcagatattgttaggaatttataaaagagattcaattagggaaaaatttctctaatcccttcttgctttccaaagaaagtgttacttttgtacccggatttacaagggggcgttcctcaatccccttcttagtcaaaaggtgaagagataataaaacaaaataccaatttaattaattcaaagaaaatggcaaatttagatttaagcaagtacggtatcacaggtgtgaccgagattttgcacaacccgtcttatgatgttttgttcgctgaagaaacaaaaccgagtctggaaggctttgaaaaaggtcaagtaactgaattaggtgctgttaatgtaatgacaggtatctataccggtcgttctcctaaagataaattcttcgttaagaatgaagcttctgctgattctgtatggtggacttctgacgaatacaaaaacgacaacaaaccttgtactgaagaagcttgggctgatttgaaagctaaagctgtaaaacaattgtcaggcaaacgtctgttcgttgttgatactttctgtggtgctaacgaagcaactcgtatgaaagtacgtttcatcatggaagtagcttggcaggctcacttcgtaactaacatgttcatccgtccgactgctgaagaacttgctaattacggagaacctgatttcgtatgtttcaatgcttctaaagctaaagttgacaactataaagaactgggcttgaactctgaaactgctacagtgtttaacctgaagactaaagaacaagttatcctgaatacttggtacggtggtgaaatgaagaaaggtatgttctctattatgaactacatgaacccgcttcgtggtatcgcttctatgcactgctctgctaacacggatatggaaggaactagctctgctatcttcttcggtctgtcaggtacaggtaagactactttgtctactgacccgaaacgtaagttgatcggtgacgacgaacacggctgggataacgaaggtgtatttaactacgaaggtggttgctatgctaaggttatcaacttggataaagacagcgaaccggatatctataacgctatcaaacgtgacgctttgcttgaaaacgtaacagttgacgctaacggtaagatcgacttcactgataagagcgtaacagaaaacactcgtgtttcttatcctatctatcacatcgaaaacattgttaagcctgtttctaaaggtcctcacgctaaacaagttatcttcttgtctgctgacgcattcggtgtattgcctccggtatctatcctgaacccggaacaagctcagtattacttcctgtctggatttacagctaaattggctggtacagaacgtggtatcactgaaccgactccgacattctctgcttgcttcggtgctgctttcttgtcattgcacccgactaaatatgcagaagaactggttaagaagatggaaatgactggtgctaaggcatacttggttaacactggttggaatggttctggcaaacgtatctctatcaaagatactcgtggtattatcgatgcgatccttgacggttctatcgacaaagctcctactaaggttattccttacttcgactttgttgttccgacagaacttccgggtgttgatccgaatatccttgacccgcgcgacacttacgaatgtgcttgcaaatgggaagaaaaagcaaaagacttggcaggacgtttcatcaagaacttcgctaagtttacaggtaacgaagctggtaaggctttggttgctgctggtccgaaactctaatttatatattagatatattgagaaaggcggttccgaaaggagccgcctttttgtttcataagtttcataaaaatatgaattctattttgtaatttgatataataaagatatatttgttatgccttataaatatttaaaagaaaaataaatgaacctgcgcgataacagtattgatctcgtctctttcaataaactatttacggagtatcatgaacgctttgtccgtttcgcttatacttatgtggataactatatggaggctgaggatattgtgatggaagccatgacttattactgggaaaacaggacccgtttgtttggagtgaatcctcctgcttatatttttactacaattaaaaataagtgcctgaattatcttcgcgaccgtcagtattatcagactgtatcagagcaattacaagagcatgcagcatggaagcttgcgatacagatatctactctggaagcatgcaacccggaggaacttttttctaaagaaatgaagcagttggtggagcatgcgttaagtaaattgccggaaaaaacaagaagagtctttattatgcggcgctttgaagaaaagagttatcgtgagattgcttcagagatgaatatgtccgtcaagggagttgaataccatatgaataaggcgacagaatctttaaaaaaaacattgaaagacttcctgcctcttttgatttatcttatctatcattaatttttcacatctattaactagggattctttttcgttgtgtgctttactataaaaggcaatggtataatgtgtcattttatataagttgacgatgaatttggacagagaacttttatttcgttttttcaataaagaaacgacgcttgaggaagaaaagaaaattcgtctttggatagatgaatgcgacgaacatcgttgcgagtttttccgtgaacgtcaactttttgatgctattttgcttcacggggatccgtcttacgaaaagagccgcccccgattctatattccatggcataaagtggtggctactctttccggtattgcagcgattgtgatacttactatcattacgactacatatttcttgcaacaatcttttagagacgaagtgatgaatacagttactgtcccccagggacagcgtgttcacttgacattgtctgatggaacaaaggtttggttgaatgctaaaaccaaaatggagtatccgcaaagctttaaagtgtccgatcaaagaatagtaaaagtggacggcgaagcctattttgaagtgagtaagaataaagagaaaccatttattgttaaaacgactaagggtgatgtagaagtattaggaactaagttttacataagcgcttatgcgacaacagatgtttttgaaacttctttgatagaaggtaaagtgaaggtgcatactgcttatgaagatatgacactctatcccaaagataaggctgtattggaaaacggtcttctcactcgtaagcagattgatgatatggatacttaccgttggcgtgacgggctttattgttttaagaacctatcttttgatgatgttctgaaacaatttgagatctattatgatatccgttttgtgaaagagaatccacaaattgcaaacccaaaactgaatggaaagttcaggctgattgacggagtagattacgcattacgggtacttcaaagagaggtcggtttctcgttccggagggatgatgaagctaatgtgatttatctgaaataatttgtccaactataaaatgaatgcctatgtaaataaatagaagaagtctgaaaacgaaatcggcaagtactaccaatacctgccgatcgtgagataaattttctcacccgagagtgaaaaaacttttaataaaatctaatcgtaaaaatatgaaaaataaatcaatcggggacgattataagctaaaaaatccccatgttaacctattttatagagctatgcgaataactacattcttattgttcttctgttcgttctgtgctttagccgataatgtaaattctcagacggcgaaagttactattaaaagaagtaatgtgacacttctggatgtgctgaatgaaatagaaaatcaaactaattatctgtttatttattccaacgacattaatgtgaaacgtccggtttcgattaatgtgaatgcaaaggcggttaatagcgttttagctaagttgtttgctggaaaggacgttgcctatcaaatggagggaactcatattgttttgacaaaaacggaaaaatccttaaacgaggtaagtgtacagcaacaaagtaaaagaatggaaaacattaccggtgtggtgcttgacgaagcgggagaaccgataatcggtgcttctgtaaaagtacagaatacaactattggtaccattactgatctggaaggaaagtttaaattggagcttccggcaaaatctgtcattgaaatatcgtttatcggatatcggacgaaaacggttgttgtcggtaaggagaaacatattagtatctatatggaagaagatactaaggcgttggacgaagtgattgttgtggggtatggcacgacttccaagcgcaagactactgccgctattgctagtgtgaatgctgaagatatagctaaagtacctacggctaatataacacagagccttgccggccgtgctccgggattgatcgtgaatacatccggaggtggtattaataactattcttctatatccattcgtggtggtgctactccattgtttgttatcgatgatgttatctgtgaagaacgtgatttccggaatttaaatcctgaagatgtggaacagatgtctgtgctgaaagatgcggcttctactgccgtatatggtgcacgtgctgcaaatggcattatcatggtggtaactaagcagggtaaagctggtaaaatgagtatcaattatagtttcaactacaatttgagtcaacctacaattatgcctgataaattgaattcgtatgatgccgcttattatctgaaccaggggttggcaaatgacggtatgaaagaacgttttaatgcggaagaaatggaactttttgcgaacggttctgatcctcatcattaccctaacgtggactggcagaagttggctatgaatacatttgctcctgaacaacgtcatacactgactgtgaccggtggtagtgaaaaagtaaaagcatatacatcattctcatattatgaccagcagtctatctataagaataataccaataatctccaacgctataattaccgtaccaacctgattgcagattttaaggaagtaggcgttaaagtaacttcaggaattgaaggatatctgacaaaaagccgggagccgttgagtactacgggaggtgattatggtagtgtctggagtcatatccagaataaattgccttgggaaaatgcgtataaccaatatgggcaattgaataatatcccggataacccgttggcggagatttctccggaagcgggatatagcaagggagagattgctacggttaaggccaatatgggattggaatggacggtaccttgggtagcaggactaagattgaaagcgttaggaaattatcgtctgacagccgaccgtcagaaggattggaagaaatctccggttatgtatgattgggacggaaatccgaatactccaagcaagccgtctttagaaaagaattattggaatatgtcagagtacaccgtacaagcttttgcaaattacgatcgtacttttaatgttgtgcatactgttagtgctacggccggtattgaggcaaataaatatatgtatgataatgcaactctgggacgcaaagaatacttgttggatgtagatcagatcaatccggggcctgttgctacggctacaaactcctctgctgaggggacacgtgcacgtgccggtctagtggctcatttaaagtatgattatgcaagtaaatatgtggtagaaggtagtatgcgttatgacggcagtgacaatttcccgaaaggaaaacgttggggagtcttttatgcaggttcggcggcatgggtaatctctgaagaatcgttctggaaaaatttgaaagatcgccatattcttgatctgtttaagattagggcttcttatggagagattggtctggatgatatttctgcttattcatacttgcagtcttataatttggatgaacgcggatatttgttaggaggtaaattttatccgggtttttctgaaggtaacttggttagcaaagatatttcttggtatacaactcgcagtacaaatgtcggattagactttgcttctttagataatcgcttgtccggttctgtcgaatatttccgtatgtctacaaaaggatatctgacttctccttctaatgtggcatatactgatccgttaggaacctcattgccacaagtaaagtctgacggtgaaagtattcgtcaaggaggtgaattcattgtacagtggaaagaaaagagaggtgattttgaatatgcgataggtgctaattttacctattttgattcattctggatgaataatccgtacgaagcagaaacagacttgaagaatccttataaacgtactactcatgccaaaggatattggggaatcggatatgaatctttgggatattatcaaagtcaggaagatgtgatgaactcgcccaaacggcaaaactcggtaaacttgggtgctggtgatattaaatattatgatttcaatggagatggtataattgacggaaatgaccaacatcgtatcggtaaaaattcttctcctcgcggacagtatggtataagtatagatcttaattataagggctggttcatgaatatgttgtggcaaggagctacgtccaaagatttctattttggagacaagctgcaaggtcaaggttccgattatggctatttgtcagtgatttatgatttccagagagacgtttggacaccggataatcggaatgccaagttccctcgtctacggagtacttctaaatataatggaagcaacaattatggttcatctgatttctggttggttaatactggctatatccgtctgaagagtttgaatatcggttatgatctgaaacataaagtattgaagagagttccatggatcacgaaatgtgatgtctctctgagtggatataacttgttgactttcagcgaatcgaataaatacgatattgatccggagattggaaatactaatttatatacttatcctgtcagcagggtatattcgattagttttaacattggattctaataactttaaaaacacagaatatgaaaataatgaaatatatagttcctgcacttttaggagggatgttaacactgcaaagttgtgaacattttttagatacgaaacctacggaaacttattcggaagaattggtttgggggagtcggtctactgccgatgcattcgtactacgcacatatcctgatattttgggattataccacgatttttggggagacgatcagataacactaaatacaattctacgccaaagttgtccgggagaggcacgtgacctgataaatcgggaacatgatttcggttttaataaatttagtattatccgtcggtgtaacttgattattgaacaggcttccgcctctactgctttatccgatttggataaaaaagaactggttgccgagggaaaaatgcttcgggctatgatctactattatcaggcgaaacattgtggacgtgtgatttgggtagacagggtattgcaagtagacgatgaatttaatttgcccctcactgaatctattgaccggacgtatgatttgatattgagtgatttggatgatgccatagcaggacttccggaggaatatcctgccgggcgtgccaatgctaatgcggcccgggctttgaagtcggaagtctgtctgacggctgctgcttacactacggatgctacacgaaagaagacattatgggaacaagcggtagtagcggtagatgctatccaaggttattctttggacgccaattatggtggcatgttcaatcaggagaactcttattcttcaacggagattattttagccagatatttcagtaaagaaaatacaaatggcggtgatacttatatgcagactgtcattcctaatcagggaaatgataatctaaaaaagttgggacgtggtcctttgtttaaaaaagactgggtctttgagtgctggctggaacattcgccttcccagaatttggtagatgattatctggttattgaccaactgacaaatgaagctaaaaagtggaatacgacttcccagtttgtgaataataccaatgtcatttctaatgatgctgtaagagatctggctgtgaatgctgatgaattggatgaacactctctggcttatgaaacgaaagataaagggcgtgatacccgtattaatgattttatgtatacgcatcgcgacaaacgtttttatgcgacaatcgtacaggactcctgtgaatattatggggaattagtcacaatgcataagaccggtaacttgcaacgttgtagtttgggtgaggctccgggaaccgctgaaatggggtctaccaattacttgtggcgcaaaggtgtctacattaatgactggcgtatatttgttgatgtgcctacggattatcattatgtaattttccggtacggacgtgcgctgttgaataaggctgaagcccttctttgtctggcaaagagtgacccttcaaaactgtcagaagcagtagctactttcaatcagactcgcactgtacatggtggtttgccggaatccgaagcatccacgttggttgaggcatggaaagattataagattgagcgtcatgtagaattgccaatggaaggcgactattattggtctttgttgcgttggggcaaatatggtgaagaagcaaacgacggacaaccctccggaagtgaagtcatcaaagaattgcgtactccggctacatttattgaaattagcagtgaccgtcatcgtatgtttatcggtacacaaggatatggaaatgccgaccgtactttttctaagaaacgctatttgtatcctattccgcaaagtttgattaatgcaaactctgctataacagagaaggaccaaaatcctctgtggtaaaatgataaccaatattcgaattattaatcaatgaaacaagaacaatgaatagaattaaattatcagacataaaatggttgcttgtactgttgtgcctgccatttgtttcctcatgtaaagatgatcttgaggcttatgaagaagcggaaattacctcagtcggtgcatatcaccgctactatacaacagagaaggatgctttgacaggtgagtttaaggtggcggagaaggaattggagaagtccaatagtatcaacgaagacgaagcggttgttactgcgactttcacggttcctgctgccagtggcagttttactgatgctgaacgtgcaaaagtgtcgttgaataagttggttgtatacttcaatgtgtctactgctgcacgcgtgacaccactggatggctccccgaagttaggggctccgggcgattggacctcagaacgtagatatagtgtcatggctgcaaatggaacaaagaaaacatggactgtcaaagttgtgttgaataaataggtattattttcttatatttgtagcaaataaactgaaatcaaacaattgaggtcttgggagtcgttgaggtggtgattaagcacgttatgtcaacgactcctttttaatttgaaaattataatgtttatgaatacacctttgtctcccgtctccgggcgtttggcttcactcgatatcctacggggtttcgacctctttcttttagttttctttcaaccggtatttgtggctttggggcaacgtttgaattttccgtggcttaatgacattttatatcagttcgatcatgagtcttggattggtttccggttctgggaccttgtgatgccacttttcctgtttatgacaggagcctccatgcctttttccttttccaagtttaaaaatgcccctaataaatggcctgtttatcgtaaaataataaagcgctttgtattgctttttattttcggcatgattgtgcagggaaaccttttgggattgaatcctgattctctttatttatattcgaatacgttgcaggcgatagcaacaggctatcttattgcagcaataattttgttacactgttctttccgttatcaggtgctcattacattattattgttactgctctactggataccgatgactttcttcggcgattttactcccggagggaattttgcagaaaaggtagaccgactagtgctaggccagtttcgggatggtgtgtattggggagaagatggaaactggcatttttctccttattatacttatacttggatatggagtagcttaacttttggagtaacagttatgctaggtacttttgccggaaagataatgaaagaaggaaaagaaaatagaaagggagtggtgaggcttttattattgttaggcatagtattaataggggtatctttgctatggagtttgcaaatgcctattattaagcggctatggacttgtagtatgactttgttttccggaggactctgctttctgcttatgggattattttattattggatagactataaagggcatacctatgggttggattggttgaaaatttatgggatgaactctatcactgcctatattttaggtgaggtcgttaatttccgttgtatagcagcttctatcagctatggcttagagcagtttcttggtaactattattctgtatggttaagttttgctaattatctcattgtcttttttatacttcaaatgatgtataaacatcgtatctttttgaaaatttaaaaatactacaatgaataagaaaagtctgtattggtataataaatgattcctgtcgttataggcgtttctttttcactgtttactattttattagttttttatttcgcgtaactatagtcttcttttcgtataactatggttatgcgaagtaatagtaggcaatgaaataatctatttagaatatgaatgaagtctcaaatgtagcttcccgatgatagtctatatgttccttaaaaactattcaaagatatataattataaaatttaatagatttttttactgaaagaaaatatgcaattagaagattattcagaatttgtttgaaataacttttaccaagttctactggaacttcgtgat

SEQ ID NO: 3022 - DNA, 21997 bp, Unknown
  gut microbiota DNA sequence
ctaccaaagttaattacaaaaagcgcataatatatagatacaaaaatcacgatataaacgcttatttgcaaataaaactattgacaatttatttcattgagtaaaaatattaaaacagataagttctttttttatatttatctgaccagataataaaaacattactcaaatctattgcaattacaaaaattatctatatatttgcaacgtattacaattattattgcatacaaactaacacattagttcactttacaaaacgaatcacgaagttccagtagaacttagtgtagcgataaataaaaaaagaccttatagcctatgaacagtacagctcagcacagtttatctcctctggtacagtataaccaggttatatcatcttgttttttatattcaatttatggaaaaaagagtgcttttgtccggggattgaataagtcttgtataatgtattatttgaaacttaacatacccccaagttcccacaaccgatgcaacagaatgtagtatcgggtagtgggattttttgaaaaaacggatgtgattcataagatagaaaatgccgtctatttgagaatttccggtgtaacacctttaacaagattataaactaataacgaatgctggcaaagaaaaaatgaacgtttttgtgaagatagcaatttaatagatgaaagtgctatcctttatttattgaaaacctttaattaacccagattcatgcttatcgaaaagcataagaatgaattgttaacacttttaatttctatgatgaatgaaaaacaaaattgtggaagaatactgcgattattgatcctattttgtttgtatggtatttgtttacctccccttcacgccaaacaggatattgcatcaccacaacagacaggcaagacctatacaattaaaggagttgtattggattttaacaatgaaccgattattggtgccagtgtttttattccgggaaccagtatcggagtagctacagacttggacggaaattatgtactgaaagtaccggcaaacacgaaaaatatagaattctcttacattggatatgagaagaaagttgttccgttcaaccctaaagatctaaatgtctttcgtgttgtgacgatgaaagaagatagcggtattgcacttgaagatgtcacgattgtagcttttgccaaacaaaagaaagagtctgtattaggctccgtttctactatcaaaccggcggagttaaaaactaccagtagtaatcttactaccggatttgcagggaagttggcgggagtagttgcttatcaaagaagtggagaaccgggtgaagataatgccgaattctttattcgtggtgtgacgacatttggaacagggaaagccgatccgttgattttgattgataacattgaattgacttcatcagatttggcaagattgaataccgatgatatcgccagtttctccattctgaaagacgctactgctactgcgctttatggtgcgcgtggtgctaatggtgttattcttgtaacgacaaaagaaggtacggaaggtaaaatgaaattatctttcagggtagaaagttcgttttccgctccttccaaagaggttgaaattgctgatccgctgacgtttatgaaacttcataatgaggcggtgagaactcgaaatccggatggtgcattaccttatctggaaagcgcgattgctgctcgcgaaaaagggttgaatccgatggcttatccgatggtagactggaaggatatgctattcaaagatttcacaactaactatcgcggaaacatgagccttagcggtggtggccgtgtagcccgttactatgtagcattgtcttattcgcgggataatggtatcttgaaacaggttcccagtaacctttttgataataatattaagttggataaatatacggtacgttcgaatgttaatattaatctgactaaaacaaccgagttgggagtgcgcgtgagcggcacgtttgatagttatcaaggcccgatacagggcggttcgcaggtttacagtcaggctattaaagcaagtccggttctttttcctgccatgtatgctccggatgcagctaaccaatataccaatcatcctatgttcggtaattatggaactagtgcaaattacttgaatccttatgctgaaatggcacgcggttataaagaatatgaaaacactgttatacttgcccagttggagctgaagcaagatttcagttttataaccgaaggcttgaaagggcgtttgttgggaaatgtcacgcgaacttcatattatgaccttcaacgttcttatactccattctattatgccttggatagttatgataagacaaaagatgaatacactctctctgctctaaatccggatttgggtacagattatctaggatactctccgggaagtaaaaaagtaggcagttccctgtatttggaagcgtcgttgtcatacgatcggacgtttgttgaaaaacacaatgtcagtggtatgttggtttatacagtgcgtgaagggaaaagtggcaatgaaaacaccttgcagaaatcactccctacccgtaatttgggattagcaggacgttttacttacggattctccgaccgttattttgcggagtttaatttcggttacaacggttccgaacgttttgacaagagtcatcgttggggattcttcccgtcgggaggtttgggctgggttgtgtccaatgaaaaattctgggcggacaaaccgatttccaaagttgtcaatatgcttaagttgaaaggatcatacggattggtcggtaatgataatatttctaataatgacaaccgtttcttctatttgtcggaagtaaatatgaataattccggtaggggaatgaacttcggaaccaactttgacgaaggttataacggtatttctatcagccgctatgccaatccgaagattggttgggaaatttctcataaaatgaatgtgggatttgaactgaaattattcaatgacctggagattcaggcggagtattttaaagaaagaagaacgaatattctgcaagaacgtgccgatattcctagtttgatgggattccaggcacctatccgggcaaatatcggtgaggctaaaggacatggggtcgatatttctctggattattcgcatatcttcaataaaaattggtggactactgtcagaggtaacttcacatacgctagtagtgaattttctgaatacgaagaaccggactactcggctactccatggagaagtaaaattggttctaagctgagccagacttatggttacatagccgaacgtttgtttgttgatgatgaagatgtggcaaactctccgaaacaacaatttggcgaatatacggccggagatatcaaatataaagatatcaatcgtgacggaatcatcgacgagcaggatattgtacctatcggttatccgactacgccggaaattatttatggtttcggtttttctgttggatataaagcgtttgattttaactgcttcttccagggatcggcacggtcctccttctttattgcccctttgcgtatcactccgtttgcccaaccttatgatccggacaacgaattgggagggaaacaggctaacaatgctttacttcaggttattgcagataatcattggagcgagtccaaccagaatatgtatgctttttggccacggttatcggatacggctatcagtaataataaccagtcgagtacatggtggttacgtgacggtactttcttgcgtatgaaatcggcagaaataggctatacacttccaaagcggctgaccagtaaagctaaattggaaaacttgcgtatttacgtaagtgggacgaacttgttcaatatttccaaattcaagatttgggatacggaaatggggaacaacggtttgggatatcctgttcaacgagtatttaatgtaggtattcaactttcactctaaaacatgttatatgaaaaaaataatcatatccatatcactcgtgattgctaccatgctgtgtagcacttcttgtagtgattacctagatatagtgcccgaaggtactccaagcatggataatgccttcagcaaccgcattaattcatttaagtttctacatacttgttatagttacctgccttcatgggatcagggtggctccattggctttttggcaggtgatgaacattggttaatgcctaaaggaaccggttttatagatcagcgtatctctctcaacgcatgggaaataggtcgcggtgaacaaaataataatgacccctaccagaatttttgggatggaggaaatgggggaaccaatctttgggtagctatccgcgattgtaatattttcttggaaaatatcaacaaacctctcgatttgcagaattatgaacgcacccgttggattgcggaagtaaaattcctcaaagcatattatcattattatctgtttatgctttacggccctattcctatcatggatactaatattgcggtagatgcttcacaggatgaagtaaggcgttatcgcgagccggtggatgatgtagtggcttatatctctaacctgctggatgaagcatataaagatctgccttcaaagatcacagatccaggacaggagatggggcgcatcacccagccaattgcaaaagcagtaaaagcacaattgttattattggctgccagccctttgtttaatggaaattcggattatattaatgtgaaagataatcagggtaggcatttgttcccgacacaggttgataacagtaaatggaaattggcagcagacgcagcgcttgaagcgataaattgtgcaaaagaaaatggtcacgagaaactttatactttctctttgccgatcaatagtatttctgcggcaacacgcaaactgctggatatcggtgaggctgtcacagaaaaatggaatgaagaaattatttggggaagtactcggaacgttaacggattgcagacggttgcaatggctaaacatacgaaggggagccactataacgcgcgttctgttttaggaccaactttatcagtagccgaagcattctattcttcaaatggtgtgcctatttctgaagataacagtgatttctggacggctaattatcctaaccgctatgagattaccactatcccggatgagggaaataataaatattaccttcagataggagagcaaacagcctatcttcacttgaaccgtgaaccgcgtttctatgcttcattgtcattcgaccgtggaacatggtatggagatggttatacgaatgatgagccggcaaatcttgctttctatcattttcgggcaaaggaggtatcagggcgccagacttcggaagaccattcatatacgggatatttgaataaaaaggtatgtagctataagactggtttgacaaaagacggtttctctccctaccgttattcgttcccaatcatacgtcttgctgatttgtatctgatgtatgcggaagctttgaatgaatcgcaggaatcacccacacaggatgtatatgattacgtggacttggttcgcgaacgtgcagggttgaagggggtaaaggagtcgtggagtaaatattccaagtccccggataagcctaatacgaaaaacggtatgcgtgaaatcattcgcatggaacgtttgaatgaactggcctgtgaaggaaaacgtttctgggacttgcgtcgttggaaaaaagaacttccccgcgaagtgaaagggtggcatattcaaggagagactgcccaggaattttatagagtaaccactatctacttacgttcaaagtatagttataaggactatttgtggccgttgaaactggaaacaatattgaaagatccgaacctggtacaaaacccagggtggtaactatgatattcataatttaaaatgactggaaatatgagaaatatgaataatatatcagagcttgtgaaatatgcgttcgtcacattgctcggtacactctgcctagcaggatgtgggcaggacgaaaagattggtctcaatgctaccgacagtgtagcaccgggattgcctacgaatatagaggtggagaacattaatggaggagctatcattcgttatactcctccgaaagatgatgatctcttgtgtgttgtggcgtcttatatgattaatggggtggaaagaaccacaaaagcttctccttatgtagatagcttgatcgtagaaggattcggaaaggtgggtgactataatatctttttgaagagtgtagacaaaagccagaacgagtctgaaccgaaaaccgtttctatcagtccattaactcctcctgtagaatatatttatgagtcactcaagattactgatagttttggaggagtgagtttgacgtggaaaaatccgactcgacagaatattattctggaagttaccaaaaaggaaaacggagaatgggtttctttggagaatttctattccagtatagtggaagggcaagctaaaatccggggattggctgctgaaccaatcacgttaggatacagaattcgtgaccgttgggataattattccgagatgttggagctggaaagcaatcctttgtatgaagaggaacttgacaagtcgaaatttaaagaacttccgacacgtttgcctggtgattgtgaggctatgggtggtctgccgatacgaaatatctggcagggtaataataacacagactgtttccatagtgttactaatagtgataaccctgcccctggtcggtgtataacgttcgatatgggacaggttgccaaggtaagccgtttcaagatgtggcaacgcagaggagatgcaaacgtttggacctatactcataataatttgaagaaatatgtgatttatggttgtacggaacttacggacgaaatgtataatagcggtcaggaaaaagatggtatcatgtatcctacctttgagggttggacgaagattatggatgttgaatgttataaaccttccggacaagataatccgaatataaccaatgaagatattgaatatatacagaatggcgatgaacacgaagttcccattgaagctcctaatttccgttatgtaagaattcttatgcttgaaacctggagtggaggtacttacgctcagattggcgaaatgactttctggggacaacctgcaacagagtaattaaaaaaatcagattatgaaaaatataataagatatatagcttgtggcttgtcagcctttttgatgaccgcttgcggagatatgtatgagatacacgaaaaataccttgaaatgggagaagaaacctatctcggggccgttcaggatttgagtgcctatagcgggttcaatcgtgtcaagttggagtggtatctgaatgccgacccacgaatcagctcttgtgtgattacgtgggagggaaatgaaaatcctgtggtagttcctgttccggagaatcgtgttataaaggatcctatatcgacgattattgaccttccagaagggaaatatatattcaatatgataacgaggagtgatacaggtaaagagtctttggtaagaactattgcgggtgaagtgtacggttccacttatcaggccagtctatcagctcagggaattaattcgatctcggcagatttgaacggagtaacgattaattgggttccgttagaggggtgtaccggaactacgttgacgtatacaaatgatgagggaaaggagaaaatcatcaaagtagatgaagggcaaacttctacggttataccggatgcggtccttaagacatcatttaagttgatatctacatttaagccagctgatgacgctttcgatgatattccaactttggaaaaaataatggattttcctgcttattataccatttcaaaagaagattgggatgcggttcacgaacaatatgttgatgcagacagaacggattggggaatctcggcttcgacagaagaaaaggttggagaaaatgatggtaaatatggtattgccacctgtatccttgacggagatcttgccagtttctggcactcacaatggaaaggtgaaggggctaatcctccattgccacatgaaatcattattgatatgaaatcacaacaggatattctttcgatagaactggcaagaaggcaaggtaacggagatactaaaactgttatattcagcataggtgaaagtgaagaacattggacagaattgggacaattgaacttccctagtgaaaaggcgaccaatgcccaaaccctgctgttgccggaacctgtaagaggaagatatatacgtgctttggttacgggtagtaataatggtgtaaatgcaagtattgcagagataatgtttacgacaagtaagaaataatattattaatagtgagtccgttgaagtgacagagttcaatagatagctagatttctcactaaagaaaggttagagccgctggagaatcgggtttatgtgaataaatgcgatttgatggcggctctttatttaataatcgaacataattcgctatctttgtataaatataaagtaacgcgacaacttcttctttaatacatatttgcttatgagatttattgctttatttatatgcttgtcaatagtcggaatttccggtattacccaggcgcaacaaaaagatactatccgtgtttcaaacttcggagcacatccgtatacatatgaaaattgtgtgacctgtttgcaggaagctattagtgaatgtaagcgaagtggtgctcgcgtgctctcttttgagaaagggcgttatgatatctggcccgaaggtgctatccggcggaaatattttatatcgaatacatcgaccgaacaagagtgtccttccaaagtgaaaactatcggtctgctgtttgaagatatgaaagatctgatgattgaaggaaacggagcaacgctgatgtttcacggaaaaatgacgactatcgctctcgaacgttgtaagaatctggtgtttaaagatttgcatattgattttgaacgtcctgccggtttggaaatgacatttgcccgtgtggaagatgatgaggtggaagttgttgtacatcgtgacacacgttatgaaatagtgaatgggcggatgagcctctttggtgagggttggcgttcaaacaagaatcattgtatagaatatagtcctgttgatagtactttccgttatagtcaggggtggaatgtgcttgctgctgcggaggcggaaggggtggccccgaatgtagtacgtttccatgtcccggaaggatttcgcccgaaagtggggaatactttgacaattcgtgacattattcgtgaccaggtgggatggtttattttcgaaagccgggatattacacttaaccgggtgcagatgcactatatgcatgggcttggtatagtaagtcaatacactcgtaatattaccatggataaagtgaaatgtatgccgcgcgaaggcagtggcaggttgttggcagcttctgcggatatgatgcacttttccggatgtagtggaaaggtgaagatagttggttgttattttgcgggtgcacaggatgatccgataaatgtgcacggtactaacttgcgtgccgttgagaaaataaacacccgtactttgaatttgcgtttcatgcatggacagagctatgggtataacgcttactttgagggggatacggtcgcttttgtcaaggcgtctactatggaacgttttgcatctgcgcaagtggttgctgtgaaacggttgacagaccgtattgttcaagtcaccttcaatcgggatattcccggtgaattggaactgaatcacgattgtgtggagaatatcagttgcacgcccgaagtggaaattcgtcattgttattttacgaggacaagtacgcggggtaccttaatgactactccccgaaaagtagtgattgcagataatacttattataaaacgggcatgaacgctatcctgatagaaggagatgccgaaggctggtatgaatcgggaccggtgaatgatgttttgattcagaacaatatatttatcggctgtgcgtatagtggaggacctgaaaatgcagtcattgcgttgcatccttctaatacggtggtggatgcggaacgtccggtgcatagaaatgtgcgtatcataggtaatacgtttcgtacatttgggaatccggtgttatacgccaaaagtacgaaggatttgatttttaaagagaatcatgtagaatgtacttcttcggacgattttcgtcaaaagcctttgtttattttaaatggttgtaaaggtgttgtaatcagagagaataagctggaggaggtttgtgataaaaaaatggaatttagacagatgaaaaagaaatatatcaaggttgatttttaacccaaaaaaataaatactatgacaatgaagaaactttattcattttttatcagtactttacttgtctcctctgcagtttgtgccggagggacagattatacaaaaggacttgctatttggtttgatgctccgaatactttgcaaggacatgccgtatggtatggtggcagaccggatatgtggaaaggtgaaaataaaccggaaaccgccggtgatacagtccgtaatccggatgctgcatgggagtcacaatcattgcctattggaaatggcagtataggggcgaatattatgggatcggtcgaagctgaacggattacttttaatgaaaagacactctggcggggtggtcctaacacagcgaaaggagcggattactactggaatgtcaataaacagtcagcgcatatccttgatgaaatacgtaaagcatttacggaaggagaccaagttaaagcggagaggctgacgagacagaattttaatagtgaagtaccttatgagggcagcagggaaaagcctttccgtttcggtagttttacgactatgggagagttttatgtggagaccgggctgaatattattggtatgagtgattataagcgtattctttctttggactctgctatggctgtagtgcagtttaaaaaagacgatgtagcgtaccaacggaattattttatttcttatcctgctaatgtgctggtcatgcgtttcagtgccgaccggccgggcaagcagaacctgatattcagttatgctcctaatccggtatcgacaggtagtatggtggctcaaggtgataatggtttggtttattcggctgcgctggataataatggaatgaaatatgtagtccgtatccaagcggagactaaaggtggaacattggtcaatagaaatgggaaactcaccgtgaagggagcggatgaagttgtcttttatgtcactgcggatactgactataaggttaactttgctccagactttaagaatccgaaaacgtatgtcggggtcaatcctgtcgaaacaacgggccaatggctggctaatgcggtggccaaaggttattcggctctgttgaatgagcattatcaggattacgctgctttattcaatcgggtgaagttgaatctgaatccaacggtaaagaccggtaatttaccgaccgggcagcggttgaaaaattatcggaaagggcagccggactattatctggaggaactttattttcaattcggccgttatcttctgattgcaagttctcgtccgggcaatatgccggccaacctgcaaggtatctggcataataacgttgatgggccttggcgtgttgattatcataataacataaatattcagatgaattattggcctgcctgttctacgaatctggaggaatgcatgttgccgttaattgattttatccgcacattagtgaagccgggtgaaaagacggctcagtcttattttggtgcgaggggctggactgcatctatttctgctaatatctttgggtttactgctccactggaaagtcaagatatgtcgtggaactttaatccaatggcaggcccttggctagctacgcatatttgggagtattatgactatacacgggatttgaaattcttgaaagagacgggatatgagttgataaagagcagtgccaattttgcagttgattatttgtggcataagccggacggaacttatactgcggcaccgtccacttcacccgaacatggccctattgatcagggggccacatttgtacacgccgttgtgcgtgaaatcctattggatgccatcaaggcgagcgaggaattgggagtggataagaaagaacgtaaggaatgggaacaggtgcttgccaatctcgttccttataagatcggccgttatgggcaattaatggaatggttggtagatattgacgatccgaaagatgaacaccgccatgtaaatcatctgtttggtctgcatccgggacatacggtttctcctgtcactactcccgaattggctgaagctgccaaagtagtattggtgcatcgtggtgacggggctacgggttggagtatgggatggaagttgaaccagtgggctcgcttgcaggacggcaatcatgcttataccttatttgctaatctgctgaagaacggtacgcttgataatttatgggatacgcatccgcctttccagattgatggaaactttggtggtacggccggtattacggagatgttactgcaaagtcacatgggatttatccaactgcttcctgctttgccggatgcatggaaggaaggctctgtccggggtatatgtgcgaaaggaaatttcgaggtagacatgatatgggagaacggacttttgaaggaagcgactatcctgtcaaagtcgggtgaaagatgtattgtgaaatatgccggcaagactttgtcttttaaaactgtaaaaggacatagttatcaactaaagtatgatagcgtgaagggggaattgctaaaacgctgacagaaaaatgattgttacttatttgaaactcttttatacatttgcgaaaattggcatgttcaccattggaggtggatatgccatgattccgttgatagaacgggagatagtcaagaaaaagtggatgagtaaagaggaatttatggaaatgtttgccttgacccagtcattgcccggtgttttcgcagtaaacatatctatttttgtaggttataaacttcataaggtgattggtagcctggtgtgcgcactggctaccatattgccttcttttgttattatgatgttgattgcgatgttctttgcccgttttcaggataatgaggtgatgatccgtatctttaacggaatacggccggcagtggtggcattgattttattcccttgcatatctgcggttagggcattgaagctgaaatatatacagttgatggcccccctcattgctactgtgttgatctggcaattcggactttctcctatttatgtagtattggcgggaattgcgggcggactggtttatactttatggttgaaagataagattaaagatataaaggcatgatatatttacaattactttgggtgtatctgaagatcggtacgtttggcttcggaggtggctatgctatgctttcccttattcaacacgaaattgtggatattcatcattggctgactccccagcaatttacggatgtagtggcgatttcgcaaatgacaccggggccgattggaattaatagtgctacttacgtgggatatgcagttacacaaagtgtatggggagcggtgcttgctactgtggcagtttgtttgccttcttttattttagtattgctcatttcttatttctttgccaaatgcaaagataataagtatatcaaggcggcgatgtcggggctgcttcctatgtctgtggcattgattgcttcggcagccttactgatgatgaacaaagataactttattgattataaaagtattgggatttttgccggtgcttttctgattacatggaaatgggagctacatcctattctgctgatctgtcttgctggtgtagtgggagtgttgttgtattaaaaaagcttattaaaaagttctttattactagtctattctttctttgtctatttttgtgaagttggataaaaatcatactatggtatatttggacgctgataaacagacttatgcggatttgaacgttacagggaatgtgtatggtgagcaggcgctttgttctttgtttttaaaagcagaaacgaagaaaggaaagtcgctgatgctggattggattatgcatccgttgagtgattgggaagagatttgtaaacgtcaggaagctatcgcctgggatttcttgccggaacttcctttaaatgaggaagaactggactttattgaatattatctggaatatcgcgaacagataaggggagcaaatatattactttcatgtgcgacgattattgatcgtcttgtacgatatgacccgaaccggtatgtggtttcccgaggagtgaaattggtttttctcatgttgcaccgtttggagaaatggactattgcagcaggggggaatatgccacaacttttaaaagaaacagctgataaggtacaggaacttttgcatggaagtgaattagaggaagttctgcaacaaactttagatgaaaaggcacgcttgtcgaattataccatagataaatatgattatttatttcgttgtacacggttattgtccataagggagttgttgtctgttgtctacatgtttgatgtttgcaggacggcgcatcgggtagcgaaggcaaagaatttctgtttcactccgaccatggtgcagacaatggagttctctgttgaaggtattgtacatccttttgtggaaaatgcgcaagagaataattgggaaatgtcctgtgggaatatatgtctttttacaggttccaacatggcgggaaaatcgacaactttgaaggctttggcgctggctgtctggttagctcattgcggtctgcccgtttcagttaagtcaatgatttgtcctgtttatgaggggatatatacatctatcaacttgcctgattctttgcgggacgggcgaagtcattttatggcggaagtgcttcgtattaaggaagttctacaaaaggcgggaaccggaaagaaatgcctggtcattctggatgagatgtttcgggggactaatgctaaagatgcatttgaggcttccgttgcggtaaatgaattattgaaggagtattccaattgtcattttcttatttcgactcatattctggaatatgcaaaggcatttgaactagatcctttctgttgtttctattatatggaagcggaaatcaaagatgataattttgtatgtccacatcggttgcagaaaggtatttcagaagctagagtcggctattgggttgtgcggaagttactgaatatggttgagctgaaaaaataagaaaagcccgctaaagattcttctccaacgggctttcttgttttatctgaagtgaattgttttagatcttgttcgcacgtttgcgctctatttcgtccaaaatgactttacgcatacgcattgctttcggggttacttctacatattcgtcttccttgatgtactccaatgcttcttcgagtgagaactgaacgggaggaatcagacgaactttatcgtccgaaccggaagcacgcatattggtcaacttctttgatttggtaacgttgataaccaagtcattgtcgtgagagtgttcacctaccacctgtcctgcatagacttcatcctgcgggaagataaagaatttaccgcgatcctgcaatttgtcgatagcataagcaaaagcggttccgctttccatggcaatcatagaaccattggtacgacgttcgatttctcctttgtatggctggtattctttaaaacggtgtgccataatagcttcaccggcagaggcggtcagcacattggtacgaagaccaatgatcccacgtgaaggcatatcaaattcgagattgatacgttcgcccgtattttccattttgaccatttcacctttacggcgggttaccatatcaataatcttactggaatattcttccggtacgttgattgtcagttcttcaatcggttcgcattttacaccgtctatttctctgtagataacctgtggctgacctacctgcaattcgtatccttcgcggcgcattgtttcaatcagtacggaaaggtgaagtacaccacggccggaaacaatccatttaccatcctcttcactcttctttacgcgaagagccagattcttgtcgagttccctcatcaaacggtcatggatgtggcgtgaagttacaaacttgccgtcttttccgaagaacggagagtcgttgatggcaaataacatactcattgtcggttcgtcgattgcaataggtggcaatgcctccggattttcgaagtcacaaacagtatctccgatttcaaatccgtcgatacctaccaatgcacaaatatctccagaagaaacttcacttgtttttacacggcctagaccttcgaatacatgaagttctttaattttacttttaagcatatcaccgttgcgctttacaagcgttacgttcataccttcttttaatgtaccgcgatgcacacgacctacggcgatacgtccggtataagaagaataatccagagaagtaatcaacatctgcggagtaccttctaactgtgtcggagccggaatgttctcgatgatacaatccagtagcggagtgatcgtttcagtcggcttctgccaatcggtgctcatccagttgttcttggcagaaccatagataacggggaaatccaattgatcttccgtagcgttgaggctgaacatcaagtcgaaaaccatttcgtatacttcttccggacggcagttcggcttatctaccttattgactactacaatcggtttcaaaccaatttccaatgctttttgcagcacgaaacgagtctggggcatcggaccttcaaatgcgtcgaccagcagaatacaaccatcggccatattcaatacgcgttcaacttcaccaccgaagtcactgtgtcccggagtatcaataatattaattttagtaccgttgtagttaatggaaacgttcttggaaagaatcgttataccacgttcgcgctccaagtcgttgttatccaggataagttcaccactattttgattgttgcggaacaaatttccggccaacagcattttgtcaaccagcgttgttttcccatggtcaacatgggcaatgattgcaatgtttcgaatattttgcatataatacctattatttggttgcaaaggtacgaaaataggattagaaatatatgctatactcgcatttttttcttgtaaaacgttgtgggatataaagataatgcctatctttgcacgctcaaaagaatatttactatatcaaaattctaaaaattatgtatttagacgctgctaaaaagcaagaaatcttcggaaagtacgggaagtctaacactgatactggctcaactgaggcgcagatagctttgttttcctaccgtatttctcgtctgactgagcacatgaagctcaacagaaaagattatagtacagagagagccttaacaatgttggtagctaaacgtcgtcgtttgctcgattacttgaaagctaaagatatcacaagatatcgtgctattgttaaagaactcggtttgcgtaagtaatctacttgccgcgaaaaaattgaagaagccgtttctcattatgaggaacggctttttagtttctccctttttctatcggatagtcatattttctttggttataattgtgctcatctaaagattttgttatttttgcaacttaattattataatttatcacctttgacaactaaaatgcttacaatatggatacaagtaaaattgtaggagagaaaattaagtcactccgcgaagataaatcaataaccatagaagaattggcgcagcgttctggtttggctatggaacagattgagcgtatcgaaaataatatcgatatcccttctcttgctccgttgattaagattgctcgtgtattgggtgtacggctggggactttcttggacgatcaggacgaagtggggccggtggtatgccgtaagaaagaggcaaaagacgctatcagcttctccaataatgcgattcactcacgcaaacacatggaataccattctttgtccaaatcgaaagccgaccgtcacatggagccattcatcattgatgtaatgccaactgaagataccgactttgttctttcttctcatgagggagaggagtttatcatggttatggagggcatcatggaaatcagttatggaaagaatacataccttctggaagaaggcgatagtatttattatgactctatcgttcctcaccatgtacatgcttacgagggacaggctgcaaagattctggcagtagtttatacaccgatttgatgttatgtaagaaccaagatttaagtatatcgtatgcaattatttgaccgtactttgggacagtggctggaacactgggctgaagagactcctgataaggaatatatcgtatattccgaccgcaatcttcgatttacctggagccaattgaatcgtcgcgtagatgatatggcgaaaggacttatcgccattggcgtggaacgaggcacccacgtaggtatttgggctgctaatgttcccgattggcttacattgctttatgcttgtgctaagattggtgccgtatatgtcactgtgaacacgaactataaacagtcagagttggaatatctttgccggaactcggatatgcacacactttgtatcgtaaatggcgagaaagatagtgattttgtgcaaatgacgtatactatgcttcccgaattgaaaacttgcgaacgcgggtatttgaaaagcgaacgtttcccatatatgaaaaatgtagtatatgtcggacaggagaaacatcgcggaatgtataacacggcggaaatcctgttgctgggaaataatatcgaggatagttgcctaaatgaacttaaaagtaaagttgactgtcacgatgtggtaaatatgcaatatacatcaggaactaccggttttccgaaaggggtaatgcttacacattataatatagctaacaatggtttcctgaccggtgagcacatgaagtttacggcagatgataaactttgttgctgtgttccgttgttccattgtttcggggttgtattggccaccatgaactgcctgactcatggttgcacgcaggtaatggtagagcgttttgatccgttggttgtgctggcttccattcataaagagcgttgtacggcgctttatggagtgcctactatgtttattgccgagttgcatcatccgatgttcgacttgtttgatatgtcttgtcttcgtacaggtattatggcaggctctctgtgtcctgttgaattgatgaaacaggttgaggaaaagatgtatatgaaggtgaccagtgtatatggtttgacggaaacggctcccggcatgactgccacccgtattgacgattcatttgatgtgcgttgtaacacggttgggcgcgatttcgaatttacggaagtgaaagtcattgatccggaaacaggtgaggaatgcccggtgggtgtacagggagaaatgtgcaaccgtggatataacaccatgaaggggtattataagaacccggaagctacggcggaagtgcttgatagaaataacttcttacactccggcgatttgggtattaaggacgaaaacggcaattaccgcatcaccggacgtatcaaggatatgattattcgcggtggcgaaaatatttatccgcgtgagatagaagaattcctttataaacttgatggagtgaaggatgtacaggttgcaggtattccttctaagaagtatggtgaggctgttggagcgttcatcattttacaggaaggtgtcacgatacaggcggaggatgtacgtgacttttgcagaaacaagatttcccgttacaaaataccgaaatatattttctttgtggacgagtttccgatgacaggtagcggaaagattcagaagttcagattgaaggatctcggtctgaaactttgtaaggaacagggaattgagataatttagagatcttataatttaagtctttatagtttagacacacaaaagtttttcattataaaaaacagtgaacggtgaacaaactgtatttaggttacagggagttcaccgtttgctatttatattgttacctttattctgttctaattaaatttctgctatcgtgtaattctaaataaagtcgtcaccgagttgcatttgggcatcatttacatatttacgaatggcatgttcttcatccttacgacagattaacagcacgttattcgactcagcaatcaggtatccttccaaaccgtcgattacggcaagttttcctttcggaagtactaccatattatctttgctgttatagataagcgaatggcatttcagagtgacattgccatcctgatctctttccgataaatcgtagagtgatccccacgttccgagatccgaccagccgaagtctcctagagatacatatacattgtctgctttttccataatgccgaagtcgatagatacattggggcatgcggggaagttttcttcgataaatgctttttccttctcggtggcatagatgtcttttcccggcgctaattttgaagccagttcaggtagcagatattcgcaggctttgatgattgtatttacgttccacataaatagaccggaattccaataaaactctccactttctacaaatacctgggctaattccagctccggcttttctgtgaatgttttcactctgtagaaattttctccggcaggttcgtctatttgtatatatccataccctgtctctggacgattcggcttgatacccagtgtcaatagtttttcggaacgcgatacgaagttcagccctttttcaatggcagcgagaaattcgtcttctttcagaattaaatgatcggaaggagcgactacgacattagcgtttggatttaatgcgcgaatgtggtaggaagcccatgctatacaaggagcggtgttccgtcttgccggttccagcagaatctgatcttcgtttacttcaggtaattgttctttcactaagtccgcatacattgcattggtgacaatgaaaatattttctgttggaataactttttggaagcggtcaaaagtttgttgtaaaagtgaacgcccggtcccgaagaaatctaaaaactgtttggggagtgttttacggctaaacggccaaaaacggcttccgatacccccacccataatcacgcaataattattcatgtttgtcatgatagtgactctattttaaatgtttttgctaatgtacggtttattctctgaatagagaagtgtttaagatatgttttattatttttttctccttttttttgccaaactattgtgaattcaaaataatgtcgtatctttgcaccgcaattgagaaatcaagcacgcgcccagatggcggaatcggtagacgcgctggtctcaaacaccagtggattcacttccatcccggttcgaccccgggtctgggtacaagaaagaaagctaagtatttgataatccaatacttagctttttcttttgcttgaattttccccacattttccccacacgtgcaaaaaatatagcagtaagtcattatttcttttggttgaacgtagtaaataagttacctttgaaaagaaataaagcctattaaataaaagtaatggaacaaggtgtttggcaagaaatagaactgttgtaccagaagtttcaaaaacttggtatcagtgaagcggtggactatgacaagtactacctttattctctcattacccattccacagccatagaaggctcaacgttgaccgaacttgatacgcagcttctcttt

SEQ ID NO: 3023 - DNA, 42672 bp, Unknown
  gut microbiota DNA sequence
gtatcaatatccctaaaatacacaggaatatccatgttgataagctgtctaacatataaccgacccgacatagggtcacgactcattcggctaacttccgacactaaaacgacatcaaattccttattaatagcagcatcttttagacgttgaatagactgcctatctctcttacttgcatcatctttaccagtgatatgctcaccaaatatcatattatcacttgacgtataaccaaacttcttagccagtctagttaggtcatttacctgtcgctcatagtcttgcttcttagttgagcacctaatcaaaaatgcagctctcatatctgttacatttaatattattgcaatcaagactattagctaactatctataatgcaatataatagcacagataatagtctttacctctcgcaaagataagaaagtttctacaatggtgcaagtattttaagaatagcgaactgccggagtttaatagaaacgtacttgaggtactgcggcaaccattggaagacaggagaatcacaatctcccgaataaaaagcagcatcgattacccggccagttttacactggtagcttcgatgaatccttgcccttgcggatattataatcatccgacgaaggcttgtgtatgcagtcccgggcaagtacagaaatatttgaataaaatttccggcccgctgctcgacaggattgacattcaaatagaaatcattcccgtaccattcgataagatatctgaccagagaaggggagaatccagtgaaacgatccgcgaacgagttatcaaagcacggcaaatacaagaaaagcgctacgccgaatatcccggtatctattgcaatgcacagatgaacagcaaattactgtcactatttgcccggccggatgacaaagggcttaccttattaaagaatgcaatggatcggctcaatttatccgcccgcgcctatgacaggatattgaaagtatcacgcaccattgccgatctagaaggaagtgagcaaattctttccggacatttagcggaagcgatcagttatagaaatctggatagggagaactgggccggataacaggacaagaaaaacaagtgcttgtataattaggttaccagatccattgtatgctataattacccgaattcaagaagattccatgcacgaaaatcaatatgactaaaataatttacagttcactacataaactcctattcggtttataataaatttccgaatcgtttattataaacggtatccaagtttattataaactctcaaatagaaatttagaatcttagcatccatttattacaacaaaaaaggctgcaattcctataaagattgcagccttttgcctatattaatcattcctgtctctgtacaagggtaggacagttagctatatttgttgtaatatctcactattttcatactcgattttatatcttttttctcattaattcattaataactcaagtttcacaaacaccctgcatagtttgaggttgagaataagtcagtagtatctaatattctcctccttcaggaaggaggagtacccgtagggggaggtggtaagtctcccccccttatattctcagactacaaatatacaacatttaaagtcatttgtcaagtccttgtggcatgctttctggtaattactgcattttctctttttcaagagagccacagacctgtattcactttcttcaatagtttacctaatcaagcaagaacctttccgcacgtcccggagtcaacaactcccataaagaagcaaccgtccatcccggtgcaaagatatcattatagtacccttttccgttcttaccataatcccaattagtgtgctgaacgacttccggatagaaaccggattttgcaatgccgcataaatgcccttcataaggtagcaactgacgcatagatgtagatatcacctccgcaaaatcagccatacgaggttcagcatattcctttgacaaccattgaagtacagatgcaaactcaaaaacaaaaacatcaatatggttattctccacagaaacatttccccaaccacgagttttaagacctatatcacccagcatctgtcccggtgcgaaaggaacgtcccacaaataataccaagataaagcaaaataagccgctttttttgtcaaatcggcataatgcctatgttcttctccctttgttatcaatgaaagatagtaagtagcggtagcagcatagagagaagcctctttatcctcgcagttcgcatccaatgtagatgagaaataatcagctttcgaaatcagctctttctctaaatagtctgccgtccgtttggaactggccaaataacgcttatctttaaaatatttatatcccataactaatggcaacgtagcagatggggtacttcccccactcggatcgacaatagttaaatcatcacgaaacttacgggggaaactaccatcaacattctgtaactgtaagaacatatccaatattcttttcaacttttgctcccactcaggatgacggcgtccgttctctttttcataagctaagaaatggaacatggcatagacgccttccgactgacgccggatactatggatcggttcctcatatcccttgtcaaaattcacggattccttgaaaaatcccgcttgtgtgaaaccattcttcaaataactatcaaatatctttgtactgttcactttcagttcttcccggttcgattgccaaccgtattcccatgcattaaatgcattaagaagtacacgaccgataaaaccaacctcagcctgaccgtttctttcacagtcacttaccttcagatgtattccggaattataaaccagcggttgattatcgaccaaactatttacaaaaaagcaactaagcacttgcttcatatccgctatagaatatgaattctccacaggttttggtgcataggtatcataacaatgctcccatgtatgctgtataaagtctgaaaaatcatccgcaccactttccattatttcccatgtcaacaataccgactcacctttcttcatcagttgaaaagcctccacctcaggtgctaatgttaatttacgaatataacttttaggagcctcccgatagggaaaaccaaaagaaagcatagctattccctgttgattctcaaatccggtaaatcccaaggaagtcttccctgaaagaatgatctctccttctttatgtgtagctaaagcatccatagaaaaatcatccaaacgatttactgtcataaatcgtttttctttttcactaaaaatccccgtaagtggtgcgctcaacctgtcttcacgaaccaaccaactatccgacgtatggaatgatggagcttttttaggagaacgcaaattacggcgataccaaaatcccggcatataaaactgacagttatcatggcgatagcccgtactcaacaattgacgatagttgaagtaaacatcctgtgcagcggtaagctgtacagtcaatcgcatacaactatcccgttcttcaactttatgaaaaaccgttatcggcaatttattatccgaacgccactcataatcaaaatagctattctccaacttatccggatgcagtttataattcacagcattattacccggaacctttaaagatagttctaccttcatattctcaggaacatacttcactgctcccatacaggcagtaccaaacaaaatcgctgtacaacccacaaatgtccttaatatcgttttcatacctcttatctattgttctattataccttcatttccattcagaatctaatgagttatcggccaatataccgcataacgttcaaaatgaactttataaaaaggttccagcactatatgctcaaaacctttcaagtttatgccaaacttcaatggttctcctgaaacaacctccacatgagttggaatccgttctacaggttctctgaataccgggacttttgccatgtccatcttattcatagccgtattgttcatctttccccaaaaagtagtaggaagattttcctttcccatacgcccggcaagcacgtaaggcccatataataatgcaacataacggtcggtacctgttaagttctctgtatatatatgcatcggaagtcgtagtgtaatcacattcttccgctcccacactctgtctataatccaatacccatcactgccaagcagaggctgttcttcttctccattaattataaaagtagccttatcagtccaatcaggtttacgaatgcgcagaatcagtttctgctttttctttagattcaatgtaaggtcaacttgttcggattccggaatccggctttgctgaataagctcgactccttcttctttccaagaaagaatggaaggaataaacagattcactcttatatccttttcttgatgcctattcgtcactttatggctataaataaacttacccagcttcgccggactttccagccctgtatgtccacagcaccagaaagagctatcacgtgaagcataaatacgataatgccccggtcgcatggaagtaaaatagcagcacatacccttcaccgggtcataggctgacaagatatgattaaataaagttctttcataatatgccgccttagtcgcatccggttgctgcatgaacagagcttcggtcaaacgtaacatatttacggaattacacgtttccggtccgctgatatggagcatcctatcaatgaactcctttttagagaagaaatgttctccggtactgttaccacctattacccaagtatggttttgcttcacaatattccagaaattagtcgccgcaagaagaaaggcccgatcaccggtaaacatataatatttatggaaacccgtaaatttcgggatctgtgtattggcgtgccacccgaataaaacatcctttccttcagacaaaggaacccacatagcccgatcatttaaacggcgagcccaatcaaggaaacgcttttgccccgtcaactcataaacctcaacgtaagactcattaatcgaaccatgttcacaaatcaataattgctgaatctgttcatcagtcagcttatccaatacctgagaaccaaaccaatcggccaaccgtactaatatcggcaacgcttctttcaagtcacactgtgtataagcagcagaaagcccgagcagcatcttattaatcagataaacaggtgcccaggcaccattgaccgtaggattattcgtttttatctttcctgaggctacttccctgaatagttccctgcctcctttcacacctaacaggaagccatctttaccggcttcctgacatagcttcaattctttcagcacatatttcaatcgtctcagtaactctctatcgcctgtagattgatacatcatcgatacggaagaaagatagaacccaagaaatccaccccgaagcgggcctgctccccatacgtcttgcgactcccagccggcataaggtccggctttcgatgacaatcccgcttcaatccgataaaaatgaagcaaagagtcaggattcagccaaagaagatattctttgcctttttgttgcaaatcaagaaaaggaccatctgacaaacgtatttctttcaatggaaaataactttcaaaagacgtccccagcgatgtctccccttttcgtaacacagacatagcaggattcaccgagccaaagattagcaataagctcaatagcattcttacagatgtcttggctactatacgttcgcacattatcatatccattattcaaattctattttcttcgcaggaatcagccgaacaggacctattaaccccgattctatcaatggcgagtctttccggtaatgtttccaagtagtgaatgccactcttccgccttccggtttatttactccatttctataccagtccggtagctttctgatagccccacggctcaaagcagcaattccatttactcctcctccgggtacatactcgttctcctccggtaactgttcatccccaatcaaacgattcgtccattgattagtcaccttaatttccaatgtattttcacccggcttcagcacatcagtgacatcaattaaatacggacgggaccaaaagatccctttatttactccattgacaatcacctccgccatcacctctactgcacccaaatcaaggaaaacaactctatcctcagacatcatagaaggtttcacaacaaagttagttttataagtagctgtaccagaaaaatatttaacgccctcatcttcgtgtctatgcaaagagaacaatttgggcaaacttattttttccggtgctcccagccctttcgggaagctaacctcccatttctgatttatcatcaccggacttcctgttttttcaacctttacctctctttttataccgtccgatgtaacaaattcataattcccatcactccatgccaacagagagcgggtatccgcataaggtatccagtccaatatacgctcatcagtatttcttgtatatcctttggctaccaattgagaaatctccttatctgataatactttagaaaacaacaccggaacagacatatccccattataataggaagctccttcttttaaagaagtaaaattcaatccaggatgaattgtctgcaaagacttcgtcttataagctatatgctctccattgatataaatatgcggagccccttccctataaaccagacaaatatggctccaaccggaaataggtttttccactcccattttaaactcaggatatcctttctcattctcccataccgcaactccatttctacctacagccagtccacaagtggcatgtcctgcgccatataacagttcaccgcccgacggatagattgcataatattccgtccaagggtacggtatatatcccattggattatctatattcaacatggcatctgattccggtttcacccacaatgagattgagaaattatctcttatgtcagggtatgccgcctgcttccattcttcggttgatatagcagaagcatctatcagacacttcccatctttatgaatagaacgaatagccttctgttcaggaaggtcagaacgaaagacgacgaacacagaaccatacgcttccagttgaacaggcaccgatatggtttcttcattcgtttgatataccatagcccgtgttctttcacctgatataggattccaaaactcaggaatctttcctttcacacgaaagttacaaatcagctctttcgaagtccgttgctggttagcaacaaaataaacatccgcctctcctatctgcctatggatataacgtattggggcactaattgaatctgtgatcacttcaaagtcaggtcttaactgaatcttctcaagtacttgttccaagttcaaagaggtttcccagaaaatcctacctttccctacgctacgatccaccactgtagttgcggcctttccccatagttcgtcacaaagttgttcaaactctttttcttcaataactgaataagattgcaaccctacggtctgttgcggacgggcaccgacaattatcaatccctgttccaccatattccgcagtttcctcaatagacccaacgtaatatgcgattgttcctgtaaaaccaatacacgataattcattccgtccggaagccttaaacgcccgcgttctacccaagctctattcaataacgtttccgtattcatcaaatcgtaatcatatccttccggtggtaccggattcaaatctcttctatgcactttcgtgtatcctacaatattatcacctgtaaagtatgcaaaatcagctacgaatagtccctcttgcaatagagtttgacaacggttcagataatctatccaggcacgtcccggctcccaccaggtattagttctgtcaaaatgtattccccaagggcctaaagtcatagcgggagcagcatccggatgaggttgcattgcataacgatgaatcaccatccgattaatcccctctgtaaacgccttatcaccaacagccttcaaagcaaatgggtattcctgccatcttcccgactcaggttcagaagtatatgcttcggcacccaccactttctgaccgttgatatgagctatcgaagacgccaattttgtagtacgccgcatcatcaagttgttctggaaaatagcagataacccattccaaaactctcccataactccatctacccgtgagcctatttgtaattcttccattggtccgcggtcataaggttcgcaataggataccagcccatattgattacatagattccgaaattcaccataataattatctgccaacaagtcagcctgtacacgacgaatatcccataagaaacgttctgtcatttctttgcttcctacaatcttacctgtcatagccggcaaatatttaatcaaatcatatccggtcctttcacaaaactcaccttcaaatccggatgtccagttttgcataccgacttcccaactatctatctccagtcctatctgaatctggtgaacataaggtttgattagtggatacaataaatccatcattttattaaaatgaagctgaatcgcctgtttgctaaacttatcgcattcaagccccacgcctgtatccggagctgcacagttttttcttccggtagaagtatgtcccaaacggatgactgtccagtttcccaaaggtgcctcccaattcagacgtcccaaagaatcaacctgattcgtcaagtcaataatatcttccaagcgaataacttgttctttgtcatacgtttgtataccggtcttccctctatgattaaaaacactgttattcaataactgccaatcagaaaagcccacaggtttaccattcttgaaagaagggaaagctaacacagctatatctctataatatcctaattccgttgccggccggagtaataaagtatccacccgtttaccgcctgccacctcagtctcactccaagtcaatttttgcattgaatactcaggagtaatccaaggaccaccacttgacgaccaacccggacaattatgcatcacataatcaatgcctaaacgagctgcttcttttatagcatgtgcttttaattccgaccactccggacttaagtaagtaacaggcccctttggaattccagttcccccttccagattgaaaacaccacctatcccaatacgatgcatcgcctccagatcctttgtaatgccttcctttgtgatatttccattcatccagaaccaatatgtataaggccgggcagtcgaagacaattgggtaaagtctttttccagctcactcatcggcttaacttttacaggatgagcagtgcctgaaggcaaaggaagtttctcgcttaccggaagcggcttcccaaaacatggaacgccagatgcatcaaaagtaaacttctgaagacgaatatcccgtttccaaccaggttttctctcttttttcgtatggtaataaatataatgttccctgtcatcaggagaagttgtaaaactggcatgccctaccccaaatacttgatcggtaccttcaaatacaggtttatcacttttaatccagcttttcggatctaacaaatctgcgtccgagtccttcagacgcaaataagaaagtttatatgtatccagccatgattgcccgcaggaataaacaacaaacacatctttcccgtgttttaaaatctgcggtccctcattcaatggcaactctccttgttcataatagcggtccggcgacgatatttttactcttccggaagccattgtccaaggattctccatttttgcgatataaagatgttgctgagttttgtcagtcggttcactattctcccaaccggaccagacagcatacaattgtcccttatgctccaacaaagtcatatcaatcgcccagcgattgtttttccagtctcccaaaacatcccccgtaaacagcattcctttgtcgatatactcgcccattgcgtctgatgtaacagattccaacacgcccgtcttttggtgaataaaaggaggaccgctatatccgcccgcataaaaaatataccatttacctttccagaaatgaagttcgggtgcccaaatacaagtcgaattccattgccctttttccggtgccttccaaacacgtacaggaggatttatcttatgcaaatcacgagaacgggaaactccgatgccacccggcaccccgcagcaataataataccagccttcatgttttacaacccacggatcagcacccgaaggcaggataggatttgtgtaatatccgtcatattcttgcccactcaccatcaccgaacagacaatcatcattatccagaaagataatctttgtatcatttaaaatgaagtttttaatgaagtttttcttttaaaatatctcttttataacgtactaaagcttcaacataataataatcagcgtaagttaacggtacatcaacctctgccttacccggattattacctactgaatgtttcagaataaaattacaatttgtaccaggctcagccaagtattccggcgatgacaaagtcttcaactgtgtttcggctacagaaagacattgttttgagaaatcaccttcagtatactggctaagttcgatgaaagccgaggccattaatgctcccgcagaagcatcacgaagttcattgggaataccaggagcatcaaaatcccaatatggaattttatcttcaggcaaacgaggatgattcataataaatctagccacattcgtagcatgttgcagatatttctcttgcccggtctcacgatacatcattgtatagccatataatgcccagccctggccacgtgcccaacatgattcatgagcatatccctgacaagtgtttttcttttcaggctgtcccgagatcgtatcataagaaatcacatggtatgagctataatccggacggaaatgatgcttcatcgtcacatctgcatgtgacttggctatttccgcaaatttcggattatcggaattcttggaagcccacatcaacatctctaaattcatcatattatcaataattaccggatattcccacactttctgattccagtcccatgaacgtatgcaaccgacttgtggacgaaaacgagtactcaatgattccgctccttgcaacaatacctgtttatactcatcattgcttgtcagacgcaatccattaccaaaactacaatacaacataaatcccacatcgtgattatctgttgtgtatttctcattttctatccttttggtataattttctgcatacattttcaaggaatcatcttgattcacctcatacaaataccataataccccagggaaaaaaccacttgtccaccatttggcctttgaagtcatcagtttaccatccttaccaatagtacgtggcaatttctcctcttcattcaataaattctcagccattaactttgattgaacagtcgctatttgcaaactattattcacaagagtactcatttcgcttttgggagctgaacaactacaaactgccatcagtcccaaaaatgcaataatagatgaacctactttcatttatatattctttaaaattatttttctaattgaagtttttttattcttatctgagtttccagttcttttatctcttcacttaatgagacagaacccactttgttttcattctctgcaacatccgattggcggtcaaacaccatccggcctacaacagaatcacctttcaaccatatagcactgctatatcgctccgaaacaatattatacccaccttgccattgaacaaaagcgtattcttttatcctcttctcactatcctgcagaataggaacaaagctttttccctgtaattgcccctcaggaaccggaactttacacaactcacacaatgtgggataaatatccacaaattctacaactcccccagcttttccgcctttacaatgaggcacacggacaatcaatggagcacgggtcgcatgattcatcaagttatgttttccccagaaaccatgttcacccaaatgccagccatgatctcctaatatcactactatcgtactctctgccaatcccaagcgttcaagttcatcaagtactaaaccgatctgcgcatctatgtaactcacacatgcataataaccgtgttttgcctctcgctgaaaagcctcatcctttgttgtcgtaaatttcccatatccacgaatctcaccggaggaagtaacctgcttcggcaatgctttcggtcgataaggattcgatgccaactgaatcttctccctttgatataaatcccaatatttcttaggagcattgaacggcaaatgtggcttccagaagccacatgccaagaagaaaggtactttcatctctttcaatctccttaaatctgcaatcgtcttctgcgctactctaccatcaatataagttgtatccgagacatcagccgattcacagaacggtcctcgcaaagtcttagggtggatataacgggaagactcttcgttctgccacaattcccacttattatattcagcccaatccttaccgtaaccatcaggatatactctccacggatattctgaccaactacgggcatgatcggttatattatggaaaacttttccattggaaataacataatatccgtttttcttaaaacactccggaagcgaaagtgccttgggacaatctttctctgcattagcatcgaaagcagtaaaacgttccggataacaaggatatactcctgtaaacagactcgctctggaagccccgctcacaggaatattacaatatgcattttgaaagaccgtagcctgctccgccaatctatcaatgtgaggagtcacaatatcctctattccgtaacaccccaattcaggtcgcatatcatcagcaatgataaataaaacattcatcttatctttcttctgtccataaacatgggcagaagagactaaagtaatcacacctacaaaataaaatgattgaatgctgctcatagctatatcctttggaatgtaaaaccagattatttaaaattaactccctcaaatgagaatctattcttagcgtcagtcttatattctttcaaataaggagaataagtgtccacttttacctgtttctttttcacatctatatctacaatacgtaaaaaaccggtttgtcctctattcgttcctttcactccatcctgaaagttagccaacatctgatataccttattaccttgttcgcctgtactaaccaacgtcccaacaccgccattcaaaacatgtccactaaagacaaagagaatattgggatatttgctcaccaacttatcccacatttgctcaccattattcaccgcattctcaccggtatcctttcccaaaccatatttctgcggcaaccaacggtctccttctcccatacgcgtatcgtctgagtacatatacgcatgcgtattaataatcaccttatgatgcggatgtttcttcacaacctctcccgcccaatcaagtacattattacgaggcccgaattccaaacaaagaattagccattttattccggcagctttgaaagtataccatacattatccattttcccttcttcaaacgcacctccgaaattcttcatcttactgtattttgcataaggaaaatagttattaaacaattgggaatctcttttgttcgaattttttcccaaatcgtgatttcccataacaaaagcataaggaactttatcatccatcatattcaaggtagaagctgccaccgcccactctttatcaatattgtgatccgtcatatccccttgctgtaaaacaaaatcaatactatctgcatgttccaccgcccactgggtctgcgatctcagaatgtccgggtaaagtcgtgaataagtttgtatgtccggcaataaaaccaatctgacctgtttctgtgtactgcaacttgacaataccagaattgtagtagccaataaagctgccaatctcaaatgttttttcataatatttctatttttattcaactcagttgaaggtatgttgtactattgttacttaaatagaacataccttcgagatttaattctagtttctaatagaaccatctttctttatatcacgacttccgctccatattttaaccgaagaccatttctcaggcttggccgtccagaattcatcatccgcctgtaaacccaaaggcaagaaaataaaagtacacaaataattactgccagtagatacatatctgtcggcaatctcgggctggtgcccacaaaatcccagattcagccatccatccttatcaaatgtacctttggccaattgtcttttcataaccttagttagagcgcaacgcacttgtgccggtttgatatgttcaggtaataatttcatccaggatacctgagctaatacctgaaaagccccaaaacgatagcccattgatcttcccaatacaggataggtcccttccggagatatcatcttttcttgttgatcagcataacggatcaggcgttgtaactgtacgtcataaaaatcagccccttccactttatgctctttcatgaccgccaatacatctatcaacatgggttgaatcacataactgttgtaataatccaaatgaaaattacgcccgtcaccataccagccatctcctttataccattctttatgtctctttaacgcataatgaattggtttcaaatcacattcacccgtaaactccaataaggccgcttcaatagtagcagagaacatcaaccaattagactctgaagccttgatcctgcgcgaagctttcaattccttaataattctctcttgagtcactttatctaacttcggccaaatctgatccttagaacgtaacaagccttgtgcaaaaaaagcagcatcaaccaacggctgtcctccaggcccatcaaaacgcatataatcaggtgattccgggtttacagcattagcaatagatttcaccactaaattggtatatttagcacgaagctgaccttcttccgtatcatcaggaggtaaattcaaccatgcagaaataccatcaaatgaacgtcctaaagcttccaaatgcgtcacattctttcttgtattgccattgtttaatccatcaaaggtttcaacaggcatgtttttcctcaaagtattctgactcaaattggtatatagcggatcaataatcttgatcattgttttcacccaatactcacgatccttacttttctttgcaaaagcattccccccatttaccaaaagagaaaatactagaaaaaagaagaatattctatgatttttattattcataattttataattattagttctcagtatcttcagtcacaccaaagatactgagattttatctaaataaattaattagcttctattgtttccaaaggaggaatattattttcagatcctgcatatcccttattctgattaatatgccctttagtattagaattaatcgtagatgcaggaataggccataagacatgatacggactcattgtaaattccacattagaaatagttttaactcctttattataaaaatcggtggactccataattctatcataaaagaaattatcttctgagaaattatccattttatagaccttaccagtataagagggttttcccgtttgtgcaaatatataagcaatacgagtcaactctgtttttctaggttcttcataatataactctctcgcacgttcatccaaaattgttccaatattcatatcagatgccgccaaatcacctgcacccgctctatttcttacttcattcacatcatctgccgctttctgcaaactagcagcatcgcctttccaacaataagcctctgcacgcaacaaataggtttccgccaaacgatatacataccagtctgtattaccaccttccggttgatctactctgtccggatccggtataaataatttgtaatgcggccaaccaaaccaactacgaattgtatctttacacaacagctgtccagtctctccataaagctgtaaaggtttgccataatatttatttttcccctccaacttaggttcattatatactaaatcctccatattcatccaatttccttttgcatgacgcaaatcattcggatcatcccaaatatactgggtagaataagctgttccccgacagcgtccgattccacgtccatactttttaactagtgaaattttaactgttcctgtcggatcctttttgtctgttactccctgtttaccatcaggagtcaatatagcattcttcgtatttccataataaggcactgcatttctcatcgttctgattccatcgccttggcttccttctacaaggtatctgtcaataaccaacaagatagtctctttattttctgccaatgccttattttcagggcgatgtaaatcccaaatcacatttttagtagcatcagctttttctgctccgaatctatttttcatcaattcataacgcggatcacttattacagccgtagctgctgttatggcttcatcaaacaaaccggcagccaaatataactttgccaacaaatgatagcctgccgcacgtggagcttttcctctatcaaccacctcaggcatccattgacaagcaaacttcatatcatcgatcattttatttaaaataacctcacgctttgttgtatagaagtcgagtttcgcctctgtaaattctttcaatagtaaaggcacatcaccaaattgatttatcaaacgataatagtgataagctctaaagaaataagcagtagccaatatctcgttcttctcctgttcagacgagtaagttgcttcatcaatacgtgtaatcacagtattagcatacctaatattatcatacgcttcattccaataccaacctactctattggcattaggactattcaaatttttatcaggcgtaataaccgcatttagatcttgagcaacacttgttttgtccgtagttccttcaatagctacctcagaaaaaatatgttcggtaataatggcaggtccatctccataaaactccgctttaatccttttctcacaagtaccaagtgcagcccacatacctttagcatctaccagagtattctccggagaataaaatgaaagaggtttaggttccaaccagctgtccccacaactcgaaagagttatcgcaacagatcctattatcactaatttactaatattattcataacattgattcttaaaagttaattacatagtcacattaataccaaaagtatacgtacgaggagtaggactactattttccggatcccaaagtttaaaatccggagcccaaaccgctacatttcttacattagcataaactctcaatgagcctaatcccaatttagtaatccaacgtgatggaacattgtatccgacagatatattatctaatcgaataaatgattttttccgatatacagaaaaactgtttcctcctgtactggaatcaattcttgcccactcatttgtcggattttccggagtccagtatggtaacttgtaagcattctgtctatcattatataccgtggttccactatgcttagctacatcatatgtacctttatgcccccaaagagaatacaacatgaaagaaacatctatattcttatatatcttaaaatcattgcgcaatgtccatgtaaatttcggactagttgtcccttggaatactttatcctcatctgtatactgtccgtttccatcaacatccctcaacttaaaatcaccaggagctacaccatacttctttgcttcttccgcttcatcctgttgccagactccaataacttccaatccccatatttcatccaaagacttacctataaaccatttattcttgatatcgtcagcctctttctgtcctactacgttcccattctcatctaaaacatcaaccatatctccgtacaggtgaacaatcttatttctgttcaaagtaaaattgaatgttgaactccatgcaaaattctttgtatcaatattcttcgatgtcaggctaagttcaatacctttattctctacttcacctaaattagacatcactgaactgaatccgatcaattcgggtaatgtacgttcaataagaaggtctttcgtgttagctttataaatatcgatatttccttttaaccgttcattaaatatagaaaaatccaatcctaagttgaatgaagccgtacgttcccattttaattctttattagccaaagaattcacataaagataggatccattataaacctttccatccggacttacatacatatatttactattacccattctggctaaagctctataaaccccaatgtctctattaccatttaatccccatgagaaccttagctttccatagtccaaccaatttaacttcttcaaaaaaggttcatcagagaatacccatccgacagcaactgaggggaataccgcccgaggatttttttgtccaaacgcagaatagccatctctccgaaccgtaccggtaatcatataacggttgtcatacgaataaaataaacgtgccatcaatgcatcaccggttctatattcatcattactactaattgtaggcaatattccacctttcatataatgatatccaagatcatcattcggatcaaatccttcattattcatttcatcactccatctttgaaacttctccgcattaaataagaaagtgaaatccacgtcatgtactttggcgaaagtttgtttccactttactatattgtcaagttgccatagaaaatcatttctaaaagttcgtgaagcagaacccccaaaatctttccagcttggatgttccgaagatttatgtacataatctgtagcccactcatatcgtggagagaaattcatctgataagatatattaaaaggtaaagataccttagcatagatattagcattcaaattatttatcacatttctcttatctgtataataagaatcgatcaaaggatgcttcgctgacgtgtcatctcccggattcaacttcattgttccatcttcattagtaggacttccatatggagtcagcttctgatactgaacccaatccgctccgatagcactggcatcacgttgtacaaattgcgcatttaatcccacagtcagaaacttatttattttggcatccagatttaaacgagtcttaaatgatttatatccgttatttacaataatgccctcattgtctgtccatcccatagaccaataataatttaccccttttgtctttcccgaaatacttgcattataatcctgacgaagaccattctgaaaaaccatatcggcccaatctacagatttaccatccaaataattctgtatttccaagttcttaaagccaattcgacgcaaccaagtctctacaggatctcccgtcgaattatcatatttcatccaatcttcaatagaaacatctgcgggtaatttacgagggtcattaaactcataaggtctatggttcggatttgcactattaaagacatccgtcctccaagcagtaaactcatctccctgatatacctcaggaactatagcctgagtagctacacctatagaagcatcaaaactaattgtcggtttttcacttttacccatctttgtagtgatgataataactccactagcagaacgcgctccgtaaatagcagcagaactagcatccttcaacacatcaatttgttctatatcattcggatttatatcggccaagtcacccggatatataaccccatccaatacaatcaacggatcagttccagcattaattgagttctttccacgaatcaaaagacttccacccggtttgggacctgcactaaaaccaacactcaatcccggaacattcgctcttaataagtcttgcatggaggaaggactttcattttccaactgcgcagactttacttgcattactgcacctgtcaagtctcttttgcgagcactaccataaccaatcacaactacttcattcaatgtttctgaatcttctgccagacgaattacaaaatcgcgtttgtctttgacaggaatttcttgctgagcaaatcctatatatgatactacaagggtagctccggaagaaacatttaaagtaaaaaatccgtcaaaatcagaaataactccattcgttgtacctttctccattatattagccccaataacaggctcattatgttcatcagttatcttacctttcactgttactttttgttgagcggacagttgaacggtaaacaacagaaaagcgattaaccataagattctcactttcataaaacaatgtctttccatttcgtataagtttaattattattaaaaggctatttcattttcaacatctcaattcctgccatcaagaatgctccaaccccatatacctcagtcatattctgagtcacttgttcaggagcagcactaaccggttggacatatccaagcatgccatcgtcatgaacatagcttttcaaagccttccaacccttacgagcagcttttttatattttctatctttcaaaattccttgattcactccccagcccaaaccataaacaaaaaatccggaagcactattttcaggggaaggatatgaatccggatcaagcatactggcatgccaagaaccattcttatcctgacactgaactatagcggaagccatttctttataaatgttcagataataatcataagtaggatgatctttaggcaaagtttgcaacaacaaaggtattcctgcaaacacccaaccattacctcttccccaaaataccttctcgccattcttctctcttttgggaatatatcttctatcacgatagtataacttagcatccgcatcatataaagaatctgtagcttctttaaattccctatccataaaagccaaatagtttttctccggatagagcttattcaacaacccgtataccggcggagccataaataacgcatcacaccatgaccaacgttccgaccaattctttgctccgagccacaaacgggccttcgaaggtttagcaacaacagaatctacacgggcaattgtaggctgaatcattgcaggatcatggtatttctcatacatacgaatatacatctgtgctataacaagatcgtccgcatgatagagacgttttaagaacccccaatgatgcttcttccctatctgcatcagaaaatcataataacgggagtcttgagtataatctgcccattctaccatcccccggaacaagactccgtttgtccacgccaaatcatgatgtttaacttttgactgatgatttacctgccacatggcaactttatcaattaacacacgatcttgtcccttcttacttttcgcttctactgtagagaatatcgaaaaaagactaaaaaccaaaataagtatttttctcatggtaaatataaaatctctatatttgttattttaacgttttacaaatctcattattgatcttcttcaatgttgcttcatccagctttattactttacggtcataagtcatcagtccattcacttctacttctacatctgtcgtttgtgtgtaaacagctgcagaaaagccttgctttatcatttctttcagcatttctgcatacttcagatattcagcagtagcttccgtagatgtattaaactggatgtatccccaattccggttgggttcccaaagatgattcttcaaaaccaaaccaatccccccatattctcctagtaccgtagcacgttgtgcatcatacaaatacatttccggccccggataattatgcaaatcaagcatatcaccgcaagtataatgatttccaccacttgccggattgaccaaacgtgtagggtcatattgtttggtccattctgcaatctcacttgtcttaaattgcccccaagcctcattaaagggcacccaagtcccaatacaaggataagaatagagataatcaataatttctttccattccttacgataagtagcctcagattcaggagaacgtgccagttccgttccatcaaaatacttctttctctgccactccaaggttttatcaccattaggcatatcctgccaaacaattactcccatttgatcacagtatgtataccaacgtgcaggctctacctttacatgttttcttatcatattaaagcccaaatctttcgttttcttgatatcataacacaatgcctcatccgtaggagctgtatataatccatccggccaccaaccctgatctaacggaccaaattgaaacagatctttattgtttaactgtaaacgcacaataccttttttgtctcttttcatagagtacttacgcatcgccatataactccttacacagtctacccgttttcctccctcaaataaagaaacttccatctgatataagaatggttcatccggcgaccaaagtttggcatcagccggcatggaaacctcaactggtaacccattaattgatgttcccacagccaccagacgccctccttcaaacacttttacctcaaatttatctgaatacctattgtcatctgtttcaacctttactttaaccttattcaaatctatatcaggtgttgtttttatatctgtaatatagtgttcagacaccggttccaaccatacagtctgccagataccactcaccggcgtataccagataccatgaggattactcacttgctttccgcgtggctgcgtacctttttctgtcgggtcccacactttgacaaccaaattattttccgagttcttcaaagcttgggttatatcaaatgtaaacggagtaaatcctcctgtatgttctcctacttttatattgttaacccatacctcagttttccaatcaacagctccaaaatgaagcaaaatcctttttcctctccatttagagggtataacaaactcacgctgataccataattctttatcttctcccaatgtctttccgactcccgaaaggctggattcgacagcaaatggtactaatatatcaccttcaaaagaatccggaattgattttcccaacggtaaaactgcatacttccataaaccattcaaattagaccactcagaacgctccataataggacgcggatattccggtaatacattgttcacatctatcttctccgcccaagaagttttgatcctatctcctacaggggtccattgtgcccataacatctgagaaaataatgacagagctattcctattgaaaataattgttttatcatatataactagttttatcatttgcagtaatcaacacaggcaaaattagaggttcgcacaatatatagatgatataaacatcccaataaatcacaaaaacgtctcaaaataaaatgatatagacaaatgaaacatgaatgggataattgatgcatatagcataaaaaaaaagccttgtaccatttgtagtacccgttactacaaaagatacaaggctttcatataattctatagtaagaaaaatgaccttataaatcctttttgttatctctgctatttcttttaattgatttcaagctcatccgactcactataaaaataatctatggcggtttcttccggcaaataaacggaacgataagtgatatggtctcctgcgaaatcatctatcttcacctgtgttgcgggagctttcaaaagcacagttttatttttcccctcagaactcatataagtaatttcagaagcaaaaaaagttggttcaagcgaagctgcaaaagtaacggtcaatacatcattctttaaaaccgccgtctttacttttgtattgaacaacaatttctcataaacatcaccatatactgcacaaggaacctccgacataatagaagaattaccatacgtatcgtatgtacagatttcaaagacatacgagccttccgccaaatcctctactacaacctgagtaagagttgctttatctgtcaattgtaattcagtagacttcgttctgttttcccagaatatttttgccgttttagcacgaggatcaagtaatttctgccattcgagcataacccgattacgtcctgcataagctttcagtgaatctacttttccaatatatacaataggcccttcttctataaactctttatacgtggcatccataccatcgcaagagatcaaggcacctatacttaaaaatataaaaatcagttttttaaatagtttcatagcattatcttttacttgttactaattatgcctcgcaccgaaaaacgtaagttcgtgaagatgcatataacgtgttttcccccatgtgtcattcgttttaaaacgaatataacgtacagccggagcattatcaggaataataaaattctcaccatttttcgcagcttcctgatcctctgttgtaagagcatcgtttacaccacctcctgaaggtttcaccgactcatattcagaaagtaatacccaagaatcatcaaagctaccatctggatttggttcattactaccccacagttcaaaatgcttcgggtgtcctgctttaaatgtattaccatacttacccggataataacgtgaaaccatcacaaatcggctcaatttatacttttcccccatatcaaaggtaaaccattgcggcattactgttgtcgtcttggtttgaaaacaaggatctgtatctgtgattccatcccaaagccgcgtcatatcatttcctttcgtcacttcattccatgagtggcactcataagagtcagtcggcaaagccatcttcctgaacaaagacttatcgcattgttcttcatacaaaggagtctcggtgacatacaatgtatcagaaagatgtccccatctatctctgacaaaaataccaaaatctgtagtaacagcatccaggccgcgtacatagaaatcaccacctttagcctcagtataatgcatatatacctgtgtccaaatcccttctgcctgtttctttatgacccccagtcccaatttagccttttccgggttatcaaagttcactttgataccgccaaatgtttcagctgaaattaatgttccacgcactttctgataaggaggagtatccggacttacttttaccacaagcggagtagagacagcctcaccataactaacggaataaagttcaacgtcatactctcctttagtagggaatccttctactaccaaagaatctgtatagaaagaagcattaactgtacgaatcatattatcaactttatagctagcccgaacatattttaaattttgatcatccggcaaatcataatagataattgctgcaccaggcagattctttaccgtcgcattcaacacctgtgacggtggtgtcgtacttcccgtaggttcgttcagatcagcattgtcggcacaagcagccaaaacaactcctatataaaacaacccatatttataaaatttcttcttcataacgtttttattttaaagtttaccaaccataattctgtaccaggtttttattcgaatatagttccttatctaaaatcggccagaaatagtttcttattctaaactcttgagtataaatcaattgttctgtatagtaatcttcatttgtgctatactgagtattccaaccggttatcggcttattctgttcctgaaatgccaatttccatctacgtaagtcccaaaatctctgtgcttcgaatgccaattcaattccacgttcctgttgtatgatctcacgtctgccatctattgtttcatatttcttattgttcgtatatgtatcccagctttcttccacacctttcagtcctgctctttctctgatcaaatcgacccaagtcagaacatcagttttagtagcaccactttcattcaaagcttcagcatacaacagatataagttacccaatctcatcaccgggaacggatatgtaatcttagtaaaaccactggtctgccctaccacactcttaaaatgaactagttttttaggccatatacctgtttcattccatgaattcgcaatctgattggcagcagactgtccttgtttacattgcacataaatcggtttcgtctcatctgtcactccctgcccgaaccagactgcaccatcaaatcctaaacttgcgtaatagcgtacttctctgtcaaaattcagattagctgttgtatacccttccttgataaagtacttatcattagctgttgcttttctcaattcaaaacgatcatcataattccatgtcttatcttctgtaataggaactccattttttgtataaaacaaatctgctatttttagagggacagccaaattaccaccaacactcgcatttccttcttttcccggttccaatccacgtggaatagcatgatcctgtaactgtccgataatactatttgaattagcccaaataatttcttgattccacttttccgtcacaatgttacgaatattcattttcgcacgggtctgatcggatattgtgtattcaagagaagtatatttatataaatcatgtccctgagctttcagaaaatcaatagcctgcctacaagcttccgcagcatctatccaacgctgttttttggcctgttccgatttattcggattgaatagttcaatacctctggaatcagtatatcctttataatcagcatttccattaaataaaggactggcagcagttaccatcacttcggcttttattgccattgcaattccttgagtaattcgtcccaactcttcagcctcattcattatcttatcaggcaaatgattactgttgataatctcggttaaagaattgattacataatcaaagcattcgtctatagtactcctaaaaacctttacttcatcctcacttgcatttaccggaatattccgatccataatgggaattggtccatacattctaatcagccaataatggtaatagactttcaagaaacgtacttctgccgcccaacggtctttctctgcttgtgtcatatcaggtaccttctgaatattctccagaaagatattacagtcactgattccttgatacaatgatttgttattctgttgatcggctccggtccaataatcacagcgtggtcttgccgaactttgcatattatgtgaaatataccatgcatgtacgtgtgctgcactacgaaaagactccgtaatatacagttcgtcaccaccggcaattgccggatttgcctccaacaggccatgagctggaagataataataacaggtaaacaaatatttctccgcctgcgccctcattgtaaatgcattatcgattgtagcaatatcatccggaacaatatccaagaatgaatcacatgaagataaagcaataatcaaacaatttaatataaacagttgtatttttttcattttatatcaaatttagaaagttaaatttagtcctatattatacacacgctgtacaggataacctaagccggaacctgccatttcaggatcccaaagtttaaatttactaaagcataatagattgtttcctgtaacatagaatcgaaggttcttgattcctactttattagtcactttttcaggaatagtataaccaatctccaattgttttaaacgcaagaacgaaccatcacgcataaaccaagtactcgttttactgttattctcaatagaagtcgggcttaatctcggccataccgcataagcatctctattatcctccgaccaatgactatctgcaataaactttgcaagtgcattatgcccaactctattacctacaacttttgtatcaaccgtgttaaaaaatggagatacattattataatcaatccaaaatgattctctagccaatccttggaaaaacactgatatatcccaattcttatatccataagaggcaccaaaaccatatacaatttccggttctttcggatatccgataggtacctgatcgagatcagtaatcttaccatccttgttcacatcacgatacttaatatcacctgcaccatattctccaaattgcacaggagaattagccacttcattgtcgtcaacaaatagaccttctgctatatatccccaagtctgattagttggataacccactttctgtttccaccatgctcccggatattcataatcctcatataccatatattcacttgtcgcataagtaaagtttcctctcaactgcaaccatgatttattggcgaaatatttattataatctaacgataagtcaactccgtgccccttggcctctcccaagtttgcataaggttgtacccaaagtcccatagatgccgggatcgaagttcgttgttgcaaaatactcttacggcgttccgtataatactctgtcgtcacattcaaatcattaaataaagtgaactcaagtgcaaagtttgttttagcagacttttcccatgtaatttcaggatcagaatatcgctttaccgaaataccatcccgatgataatcataattatatccgaagtttgccccatacttactatcattcatattgatatccgacaaatacaggaaacgcccgcttccgatagcatcattaccaacaataccataagacgctctcaatttcaacttggatactacatctttaaatggatcccaaaaagactcattagaaacaacccatgccaaaccggcagaagggaagaaaccgaaccgtttacttttatggaagcgttcggaaccattataaccgaagttgaactctgcaaaataacgattattatatgcataagtgaaacgccccgataaaccgacattgcggtaaggcagagatgcctgaagcgagcctgcattcggctgaaggttatttctcaactgatagactaataatccgcctactccatgttttccgaaatcacgattataattcaatgcagcctctatatacatattagccgtaatactcttaccacccggatcataaatcagatattccgaaccatcatccggattaatgatatcaatggcataatcaccggtcagataatcataattagtcatcttataataatatggattcagtttacgtgaaacatcataactggagatacgggaagtattaaacaacaagcgtgccgataaaccttccgtcaagaatttcagatcctgtttcacttcaaactgcgcactcaaattagaacgtccggattctttatatcctcttaccatttctgcatacggattcaaatattgtccattttcagcattaccaaataaagtatgtttcgtgtatgcatgagcttcatctttgggatatttagcgggaaacaataccggattactcttcataatcagattgtacatagccgaaccaccatataacggtccgttataatcatcgaacacaccacttagacggacaatcaattctgttgtcttggtagcgttgatatttacattagaacgaagagtataaactctctgcttgatattattattaaaattactgttcttatcaacctccagaataccattgtcttgactatacgaagctgccacatagtaacgtgcgacatcaccaccacctgtaatattcaggttgacgcgctggttcatcgtaaaatcttttaataattcctttctccaatccgtagccggataaattacagatcccgcccccggtacagtattgtctattttttcctcagaatacatcaacggcgccaacggattacgagttaaataggcctcattgtgcagacgcatataagtaacaggatctgccaattctatctcttgagtcggagtggatattgagttctcaactcttaagcttaaccgtgcttttcccttctgaccttctttggttttcaccagaatcacaccatttgcaccacgggcaccgtaaagagcggtagcagtagcatccttcataatagaaaagctggcgatgtcatctggctgtaaacgagccagatcggtagaagttaactcaatgccgtcaatcaaaatcaacggatcttttttatatccgaaagttgtaacaccgcgaacaaagaaagaggcgtcatccacccccggttcaccagttctctgataagagattactcctgcaatacgcccggcaagtgcattcgtaagattactggagggtgttttcagttccgccactttcacggttgaaatagcaccaataacactctcctttttctgtgtaccaaaagccacaacctcaactccctccaacatctgagagtcctcatacagaattgcatttatggttgtttcatttcctacggttttagtcagctttacataacctacataactaaattccaaaatagctcctttagaaacgttagacagtgtatagttaccatccaaatcagtaacaactccagtagtagagcctttcaccaatacagatgcaccgataataggttcaccgtctgtacccaaaaccttacctttaatcaccattccctttttttgctgctggacagtctgattatcactgactgcatatgcaacagatacagaaagaaaagaaaaggtcgtcagacatacacctacaatccacaaccgcctttttaagcatgtgcttagatctcttgtttttgttttcataattattaataaaaaggttatttcattataaatattcccgataccagttgataagaagcccacaaaggataaaaagcttctttaattgatgcaatggttttatcatagtatttttgattgattaacataggcaaaattaacggatgagaggatttcctgataaaataaatatcccaataaatcgcaatactgtctcaaacaaaagaaagaatagcaaattcgtttcaaatgaaatataaatggaacaaatatcccataaattatcatattagcctattttttagaaagatataaagctcctccgctgcattattacagcgctctaatccctctatctatcaagcacataaatctacgatctgcaggatatataccctgcagatatctatatacaacaccaatacttttgtgagaaccaaataataaacttaaccggcaaactccttagggagtacaccaaattgcttttgaaaacatttagagaaataggaaggagaattaaagcctaccatataacaaatttcatttacccgcccatttccctctttcaataactgagcagcccgtttcaatctttccaaccgtagatattcattcggacttaaatcaagtacacctttaattttcctatagaaattagaacgactcatatttaaagagtctactatatcatccatactaaaatccggattatgcaaattattctgaatgatttcattcaactttttcataaactcctcatcagcttttgtcaaagccatcgtattagctgcaacaaaaggagattgggcaaaagcttgccgcaacttttcacgactattgatcagattggcgatgcaagcctgtaaatacccaacagaaaaaggtttttcaatatatgcatctgcccctaattccaacccttctatctttgattgaatattcgttttagcagtaagcaaaatcaccggaatatgactataatccaatttagactttatcaacttgcacaattcaaatccatccatacgaggcataacaacatcacttaccactaatgaaacctcctgattatccaatactttcaatgcttccacaccatcattggcagtcacaacgacataattactttccaactgacgaacaatgaaagacaacatatccggattatcatccgctaccaacactaccggtttgtctcccctgctgtccgctagttccgtccgccgttccaccacattctcctcttctacggatttatattccgaagtcagctttattacactatcctgttccacaggaagcgacagacagaacacatttgcctcttcaccttccaacatcatcaaacttccctgatgtaattcagctaatgaacgtgagagagctaatccgattcctgttcctgtggtaactttaccatcttctttttcattgaaacggacaaaaggtttaaagatttcctctttcatttcattcgggatgataacgccatcattcactgtacgaatataaaacatcctcttttctcctatcccgttcatttccaaaaacacatgtacatatgtttctgcatatttcacagcattattcaacaaattactaacaatcttagtaaatgcttccttattgacatgtgcatagaagtcctgttcgcctacattcaatacaaagtccagttctctctgtctcgccaaagatgtaaaacggttataagtttctttcagtacctcagtaacattacactcggcaaagttcaagcggaatccctgactctctgttttacggaaatccagcaactggttcgtcaaacttaacaaccgttccgtattctgtttcatgatattcaaatcctcccgtatctcaggatccaccgtctttttcagaagaatattctccagaggaccattaatcaacgtcaaaggagtacgtatctcatgagctacattcgtaaagaaatctattttcgcataatatatttcacgttccttctcctgctcaaatttctccatttgccgatgatgttttctattactacggcgttttaaataaagaatcaaataaacggaacatccaataatcaaaagtatataaatgcaataagcccaaattgacagatagaaaggaggtaaaatccggatgctcaacgagatttcattattattccaaacgccattgtcatttgcagctttcacccgaaatacataatcaccataacgcagattagcataggttatcaacggactctcaccgatagataaccactcattatcaaacccttccaatttatacatcagtttattcattccgggagcttgataaccaagagccgagatgcggaaagaaaatgaattctgatcagcccggagtactatcttatcagaaaaagtgatattcttttccaaaggcgaattaggttcatctgcatacacttctttattaaacagcaagaaatctgtaatcactactgtgggaagattcttattctccgagaagcttttaggattaaaagctataaaaccatcaattccaccaaaataaatcattccattttcatcttcaaaactggaccgatagttaaactgatcacccaacagaccattggcagtagtgtatactttcatcgtttcagtttttggctgaaaatagacaagtccattgttagttgttagccacagctgtccatctttatcctctacaatctgataaacaacatcgctaggtagtccgtcagttgagttataactagtaaacgtctctgactccggatgaaataagcaaaaacctcctccctgagttgttaaccaaatccggtgataggaatcttcaaaaatactagaaaccttattatatgaaagacttgtggtatctttttcatcatgcacatagtttttccatttccgatcgttcacattataacaataagcaccattagcataagttgccaaccagatattaccaccggaatcttcctttatatcatatacaaacttcccattcaattccggtatacggtcaaaatcgtccgattgcttattatatttgaccagtccgaacatcgttcctaagtagatgtcacctgtggcggttctacaaattgcaaaaatactattatcaatcaaagaacggggagagctgttcttctgatatgtcttcaaaacagtccctgtacgggtatctataatcttcaatcctttagagaatgtgccaacccaaagtttatcgtccactaaacataacccatgtatattggtaaatcccgcactaggagcaaaaaaagaaaattcttttgtattcaaattaaaacggttcaacccgccatcttccgtaccaatccataacacaccatagttatcacgacaaaattcacgtacccgcttaccatgcagactattttcctctcctttcggataatatttctcaaaatgggtatacgagcgcggataatagtttactccgccaaaatacgaaccgatccatataccatcttcacggtctttgcaaaaagaataaattgcattatcagacaaagaatagggatcatactcagaactacgcaagtgcgtatacttccccgtacggagattataaatataagctccgctttctgtacctatccataactcattatccgtagcaaaaagtaatgtccgacaatagatggattcattatcttcatctttcaacaacaaatcccgtaatttacccgaagtcagattcaattctttcactcctccttttaaagaaccaatatataaacaattgtatgctcccgggagtatttcgctcacaacgtcattattataagtttcctcattatcaataggtgatatataaggatgaagagttttcaactcatctttcgaataaaacaatccgtcaccgtagaagccaatccagatagtaccactattatcaaccgtcaggcatttcacattggtagagaccaatggatgatcggtcagaatatagtttctcaaggtttgctttttcaaatcataacaaaacaagttttgcgcctctgcagctatccatacccttccctgactgtctcctgaaatcatagcaacggctcgttccacccttgtgtttttgtcactctgttctacaaaatgacgaaaagtatctttctccggataatagatatagactcccacatcagtccctacccagatattaccttcgatatcttcataaagagaagtcacaaaattattgcccagacttctcggattgtttctatcgtacttaaaatgccggaaagataccccatcatatcgatctaatccatctttcgtaccaaaccacataaaacctttcgagtcctgcaagatagcactgactgtgttttgtgacaacccattctggctactaagattcttaaaataataatgttcattaaccgtttgtgcacggctaagaattccaattattaaagaaataaacgttattataatttttttcatatattcggtttataacacttcttttattcaacttaccaaatgtaggtgaaataacaatcgaaaaatagaagatacgtcccaatgaatgaaaaaatagtcttatttctctattttaatacgtgcatctacggccacaacagccttttccgttgcgagaagcggattgatatccatttctttgatttccgttgcaaaccggagcaaggtagacaaacggacaataatttcagcaaatttatcctcgtttactcccttctggcctcgcgttccctggatgattttataggcgcgcaatgagtgaatcatcgaataagcctcctcataagaaagcggagccaaaccggaagatacatctttgagcacttccacaaaaataccccctaaaccgcaaagcactacatggccgaacttctcctcatatttcgcaccaatgaacagttctgtccctttcagcataggctgcaccattatcgacctggcatcagggatctgcatcatccggtcaaattccagcgccaagtgttgctcgcttttaatattcagcaccactccgccgacatccgatttatgcaccggaccgacaaccttagccactacggggaatccacatcggcgggcgaaggctacgatctcttccttattatccgaaacaaattcgtctaccaacgggatacctgccgcatggagcaatgcctgtacataatgaggctcgatatatccgtcttccggaatcgaatcaataatacgacgaatcctcgggacatccactccaaacaattctatttcaggaacagccggtttaggagcattaacgatacgcgaaagggccgtcccgagtgtcacttcatcggcaaagttcacgtgccctttagcaagaaacgctgcaacttcagctccggcagtattgatagaaggaagaatcgggaaaatcggtttcttgcaagtttgcatcttctcgtgaagcacatcatacatttcaaacatagtaaccaatcccggagttccgaagatagccatcatggcatctatgttttcaagcttttcttcacagtaatcaatgcagagacgcaaatgctccggtgtcccggtagccagaatatctatcggatttccaacggcagcaccgggaaaaagttgagttttcagttcttccgccaattcgccttcgagcttcggtacgttcaaaccgcctttactcaacgcatctgtcaacattacccccggtcctccggcatgagtgataatggcaaaattctttcctttcaattcgggtaaagtaaatacacaacctacggtcgtcagttcctcgcgagagaaacaacgcacaattcctgctttacggaacaacgcctctaccgctgagtcggaacttgcaatcgctcccgtatgagaagacgccgcacggcttccgctctccgaacttccggccttgatagcagcaatcttacatccttttcttatcaaagaggaagcatgaaacaataatctgtccgggttctgaatactttcaatataaagcaatttcagatgtgaatctttctcgggatcaaagttctcgtccataaattgcaagacatcttctacaccgatctgtttggcattacctaccgaccagacagaattaaattgcaatcctttcgtcaccgcactttccagaataaacaccgctgttgcaccggaactggagattagatcaactcctttcaggttcaggttagggataggttggctgaacacgctatgatgccaggtattcatcaaaccgatacaattaggtccaatcagcgaagcgccgtatttattcacagtttccaggatacgttcttccaatagcgccccttcatgcgtttcttctccaaatccggcagagagtatgacaaacgcccgagtttgttttgtactagccaatgtttccacaatatcgggacacagtccggcaggcacagccaatactgccaaatccgtatcaggaagatctttcacatctgcaaaggcgggaactccttgtacttccttctccttcgggtttaccgcccgaagttctccctgataacctccgtttatcaagttctttaatattgcgccacccggcttatgtacattattcgaagcccctactacaacaatactttcagggcgaagcaactgggttgttatcatatcatacgctggttttcatttaacttaggtacaaatatattctttcttatgagaaaaaagaaagaaaaaggggagaattgcatatagaaataggctatcgagaagaaaaaaaataaaatatcagttagattatactagctttttgaaatataaaagggcatcttactatttgtactaacccgcccttctctagagatttacacagtaattgttaggatttaacgaatgatatctctcagactccggatctactacataccaacatccaatagctgcatcatacaaaataatcttgctctaatatgctgatttagtttagacaacttatatatcagagcaagactgttttattaactttatattacgataagacagataacataaaattataatggtatttgtttataaaatttcgaaactaataatatgtcattagttgcaaaatcaatccaaatagttttctgaaaaaaataaaagaatctatgctgcacttggatattattacatttcgcagaaaccttgtaaaagccgaccctcattttcttcttttccaacagcattggaatctcataagcttttaaaaagccattatataataccttatcatccaccgaaatagtaacattaatttctttgctattttcataagagttacctacaaatattaacgcagttctggatgtaacacacacacaacacacacataatattattcctatcgttattatttttttttccctttcataatttcatctacattatcgccatttaagacctaaattatatatatcgacaacaagattattataatgaatatatggataaggtatttttctacccatatattctaaataattgctacctttatttagattattttgttgctgcaacatgataactctttggttgctattgctgttgtgaacaactcctccctgcttcattatattaaatggattctgcgaatgtgataatccaattgcatgcccaaactcatgagtagctgtaaaagttttattataagacaaattattcgacaaccaattattattagcaaaatcgcttgaagccaaagtcataacctttccacctaacatacttgttgctccacgcgctcctttactatcgctatctgctaatacaaataaatgatcagagttttcgacatctttcatagaagttgcaactttaagatccatatcaacctttaaattgtaagtcttattatcgctccattcaaattttccttcataggtactttttatatcagaaactatatctttggcagctctagccatatttatattatcacttgaattattaaatatctttgcagttacatacatagtgacaatatcaccattccgagtataccaaatactatctccattcacatcaatattattcaccggattatttgcgccatattgataaggtgataaagaaacatacttctctgaaaatctatcagttttcataaatctccctaatgcagcatcatacatcctcgctccataatcataccagtccaacccacctttacgatccaactccttgccattatacttataaggctggacgctctgccgggaacttgttgcatcaatccgccgaaagcataataatcgttcacttcctcaaccgttccctcctcagcaacaaccacacgattattaccctgatgatctttcaaataataatgatactgaccgtcagtaagggacacataaccgacttccgtcaatagaatctgaggtactccattttcatagaccacattgccgcagtaatccgttgtaacactgtctccttccagaacgtgcacggtacggagtttcctacccgcagcatcataaagataagatatactgttaccattcgcaaacattacacgactaggcaaatttaaacaattatactgaatagcagttttctttttgtttaaatctttagtcaggttgccgttttcatcatattcatattctgtggacaaatcaataccgtccttgaactcgaagccgttattgaaggcagaagtgcctgaacggtctgccaccttctttaaccggttaccggcataactcaaagaaagatcatcaatcacatcataacccgtcgctgaagtctgcccgtagcgcttcagacccaagatattacccattttatcatagcccgtcacctgctcattaaaacggttagtatttacagaaaggctcggcccttcaccatattccgcatcagtcaggcgacccagacggtcataactgaatttataaccgcggggagtggccccggctccacttttccaagtcatactgctgatattaccattataacaagggactcccaaaccgtcggtataatgcaaagactggctaaacttactgccttcaatactggtcagccagttacggatattgtaggcatagtctgttgcataaataccgttatccagtttgtctgtctgcaatcggcccaactcgtcataagcgtgttccaaaagcaagacggaaggattgttatcgtattggtggctcactcgtgtcaggcgtgacgaatggtcataagtataggtataacgttccgtcaatgaatacccggaactatccgtatgggtgtgaaggacggacagaggacttccttgaaaggagtactcagtggcgtatgtatccatgcctccattgacacggcttgacaggcttttcactatccgcttattgatgtcataatagtccgcagaataaatgaatcccgaagagccatgcgtacaaagtatgctacccgtaagattaccgatcgcactcacagttccttccggaaaattatatgcagaaaagccgtttcgtgttctaaaatcatacgtatcatagtagttcaccacatatacacaaggatcaaccagatcagaagaactctgataaccactgtacgccaggccggtgtcgccttccataagagtacctaaaacaactgtctcaccggcagtccgaacatgtttatcgctgttgctgcattcgccctccacaacgacacgcccatagacatcataaacaaagaatggccaaagagaatcattacgctgacagccatcctgagagaaaaccaaacggtgtgccgcgtcataaaccaggtaagaaggggcgcaaccgggaagcttcttataaacaagacgatccagatagtcataacgatatatgtaagcataaagatccaaatccggataatcctggtaacccggaggaagcacaaacaccaaactcttttaacagcaaattacggtgggaagcctcatacgcgaaacgcgaacagacgttgctgtgcacataatactcctgtgccgactttaatatttgcttataaacccctgcggacaacataggaaccggaagggtacttcaccttttaaactttcttccgataatttcgtctatttctccatcccagaaaacagtatgttccacactatctatacggtaataataagaattaagataaagagggtaaaccttaaatttcttattccaaatataccttttctcgctttggggtacagtatgcgtcggaaggtaatatacggaatcataaaccatttgatgtattttctccggatatttcttccgaggaacattcttaaatacaataggattcttttctgtggataagtctaagacaatgtcggtatggggagttatttcatacattccgggagatacttcagcagcaccttccgcatcgcttacatggaaagttaaagagttttcaccatctttaaaaacaaaatgaccatactcttccggtcgcgtacttatataaagtgcagaatctgtacggttacatattttcacgctaaattctatttgattgggattcaaaaattttccgtttttggtttccgttccatatatatatggcttccacattcgcatatcaataatatgagaataataaacggatgaatcctgttcattacataagaagtaacgcaattcagggtatgcagaaaagggctgacgatcgccgcaatgtacatatgcagatctatccgaatatttatctttaaaatacacccatataccacaagtatccatatgtgtgtgcgtgtccaattctatataattttccccttttttttgcctcattgttttatcaaggaattcctcgctcaaccgctttttattcttaagataaaagaatataaatttccctttatattcaagaaagtcggttgggagttcataagcattatcgggacctcctttctccgtccaaaaccaaaaagaatgtttaggcgcaataatatacagccaagctgtattgaattcatactgtgcaacctgcagataggggctgtgcaaaaaattcgaatctatcaccgctttggcatgggcaatgactacgggatccaccttacgatcattcaaaccccggcatgaaaatgccagggtcgaaaggatcatcatctttataaacagaatgcaattactcctcctcatcgttttcattatattttctaaatgtatatctcattaaatccagcatggagttcatttttatagagttcaggttacttcttacggaattatattcataaagggttttattatccttaaaataaactccaaaagatactccattcttgccttttgcattcagcatatcatgctcggatgcgccttgagtgctgggatgagaatgaatatccacgattggctgaaagccttcaaatggattattatttataccttccaatgtagaaacactataatcacggctactgtttcctatgatatatttcttctctccatccctgtatccggcagtatatttccactcaactccggtattctcaataccaaatgttgcgatattagccgcatcatacgcgctagatgtttctgcaaagtaatcagcaccactggtattattgcctaaatttgtttccaatgcaggtaaaatagacttgtcaaataccttgatattcttccattcaggatttattttcgacactgtcccgcttgttccgctagcatataaaacatcaacaattctattcgtcctcctcatcaattgaagttgcccatgataatttatcacataatcatccttcccatccggatctatccttaataccggattattcttacaataaacataaggactccaactgtaatgtttctcacaggacggatccactccattccaccttcctaacaccgaatcataatgtctcgctccataatcataccagtccaacccacctttacgatccaactccttgccattatacttataaggctgg

SEQ ID NO: 3024 - DNA, 95007 bp, Unknown
  gut microbiota DNA sequence
atttccttttttatacaatatgtcaaagaacacttgatgcttactttttacacaacctccgggaaggaggggtggctgaaagccggggtggtaggtgcgcctatttgttttaataatagacttatgtactcacctaccacctccccctacggggactcctccttcccgaaggaggagagtattggatactatcgactatgaactgttgaattatttttccctaatttatcttgtcgtcaaatttgacaaagaacccataagaaaacacttgtgtcgctaaataataagtcactaataacgtataataagtcgttaataacgtataactgttaatgtcttgtcttgttaataatgctaacccggtaattttcactttcaactttcaacctaataatagccctaacgacaaaaggactcccatgagcagcatattacgcgacgtttcgcctaatatgttgtttagttttttaccattatatatacgtaccatttttttccatgtgaagaagtgggggatcagataaagttgcggaagcagtcccgcataaaaatgtccttcactcaagaaccggagacagagcaaggacgctgttattcccagtgccagataaaaatagcgtccgaacttctcaccgaaacggacgataatggtttgttttccgcttcgtgcatccgcttcgcggtcgcggtaattattgacaacaagtaaagtgtcaatgagcagtccgcaaacgagtgaggctacggtaacatccggcgtccatgttagcgcttgcacatagtaggttccacctacggggacaaaaccgaaaaaaatgattactaaaacatctccccaaccgttgtaggataggggataaggtccggttgtatagagaaaagcaaaaagtacacagagaacgccgacgataatcagctcccaccccgcatagaaaagcagcgtgcaaccgatgaggcaggcaagggtaaccgtgacgatgattcccgttttcattgcctgaagagaaatccaaccttgcgcacaggcgcgttcaggccccaggcggtcttccctgtccgtccctttgaggaagtcaaaaaggtcattgataaagttggcggcaatctgcatcaggctggcgaacacgcaacagattagtgcaggtaaccattcaaaatgcccgtccatggcggcaagtgcagtacctattaaaacgggagtaactgcacctgtcagagtcttggggcgtgccgctaatatccatgcttgcagtgagttacgctttatttctttcatgctttaatatattatagagagttttgacggacaaagatagatgatttttcgtatctttgcacccccgaaatacttcaaaatacttcaaattaagagaaaatgaagaaaataatttatcccgttatcttgttgacactgctttcgctggcctcttgtaagtcgaagaaaaatatggtgtccactttgccttcgcctgttttaaatacagattccgttcatgcggataccgctgccactgtcccggcagatgtttttgcgccggatcatgccggactcaaagagctggatgtctcgaaagaaaagaaaagtgaaccggcaaagaaacaaaccattgccggaaccgaatctgctgatcgtgtacttcgtgaagccaaaatcacttcatcaaccgaaagtgtgtcatccgcttatacaggtgtcgaccgtgtcgtgaaatatgatttcactcaccgggatgttcccgaagcttttgaaggcttccgcatcgccttcgtctccgatttacattataaaagcctgttgaaagaacaaggactgaataaccttgtccgtctgttgattgcccaaaaggccgatgtcctgctaatgggaggtgactatcaggaaggttgcgaatatgtggaacctttgttcgctgccctttcccgtgtgaaaacgcccatggggacatacggcgtaatgggaaacaatgattacgaacgctgtcacgacgaaattgtccgtacaatgaaacattatgggatgagggtgttggaacatgaggtagatactcttcggaaagacggccagcagatcattatcgcaggcgtacgcaatcctttcgacttgacacacaacggcgtgtcgcctacattggcactctctcccaaagattttgtcatattattagtacatacaccggactatatcgaagatgtttcggtggctaacaccgaccttgctctggccgggcatacccacggcggacaagtccgtgtctttggagtcgccccggtgttaaattctcattacggaaaccgcttcttaaccgggctggcctacaacaccgcaaaaattccccttattataacaaacggaatcggcacttcacaactcccgattcgcattggtgcaccggcagaagtggtaatgataacgcttcatcggttggcggagtagtattgtaaatttgtttttatatattcccaagctgccggatgcagaaaataccgtatatcttttcctgtgtccagtgctttgcgaataaatgtagaactgatctcgaatacaggtgaatggacgaggcgtacagtttccggcaattcatcttcttttacggggtagttggggcggggataaatcagaatgttgttctcttttaggatacgctccgactgataccaacggtcgaaacgcgcccagttgtcagagccgataatgaaatagaagtcccgttcgggataagcagcgcgtagcttttccaatgtatgcacgctgtaagagggacgtggcaggtgaaactcgaaatccgaagcttgaaaatgcggataaccgttgatagataactccaccaatttaagacgcagcccgtcactccataattcggactgcgtttttaagggattctgtgggctgaccataaaccagatttcgtccaacccttcgtattcgcaaagataattggccaaggcaagatgtccgatatgaatcgggttgaatgagccgctaaagattccggttttatgtttcttcatttgtatctttctgtctggcaaaagacaattaactaggcctccaaaaactttttaattactttcaaagcttccgccttagccgtctccagatcgtcattaacgatcacgcaatcgaactgcggagcaaagctcaactcatattccgctttggcgatgcggctttcgattacttccggcgcatctgtgccgcgaccttccagtcggcagcgcagttcatctaccgaaggcggttggataaataccgacaatgcacggtcaccgtaaaacttcttgatgttgcatccgcctactacatctacatcaaacaccacattctgaccttcttttaactgtttttccacctgttctttcagtgtgccgtagtaacggtctttatacacctcctcgtactccagaaactcattgttctcgatacggcaacgaaactcctccggagtgagaaagaaatactcaaccccgtgttgctccgttccgcgcggcgggcggcttgttgcggaaatagaaaacgcaagattcaaatgctgtgtcagtagatagttgatgatagtagatttgcccgagcctgacggggcggagaaaataattaatttacctgtcatgtgattctttctatttgaaattacattacattcagtacctgttccttgatctgttccagttcatccttcatctggacaacaatcttctgcatttccgcatgattggacttgctacctaatgtgttgatttcccggcccatttcctgtgcgataaatccgagctttttcccctgtccgttaccgctttccatagtactaataaaatacttcagatgattgccaaggcgttgtttttcttcgtttacatccaatttttcgatataataaatcaattcctgttccagacggttcttgtcataatctacgctcaacgtcttttcgagtgcgtccgtgatgcgttctttcaccttttctacccgttctttctcataaggagcgatcttttcgagcaacagcgagatattcgcaatcttttcgcggaacttcttttccagtgcggcaccttcctgtttgcggaaatctaccagatgattaatcgcttcaagcaccgtggcgtgcactactttccattcctcttccgataattcctggatttccgttttcgtcatcacgtccggcatacggagcaacgtttgaaaccaatccgtagggacaggaatgccgatgttttccgagatagcctgaatctgtttgtaatatccttccaccaatgcctggttgataggtgttgcactctcggcgccctcttttttctcgatccacaggctgaaatctacttttccgcgctccagaaccttggaaatctcgttacggatttctatttctttttcacgataagccggggcgatgcgagtggataaatccattgccttgctgttgagcgacttgatttctacgtttattttcttttctggaagttcggcagtagctttgccgtaacctgtcattgactgtatcatatttttaaagttttgcgcaaaactacacgaatattttaagaattggaaataatcatgtaattttatatttatatctgattatcagaaacttatatgccgattttaatgctggctcatatctgtcctaataaactagtcgcaaatataactattttcaatgatacatctaaaaatagctgcaataaaaaactttgattgcagaaaaatcagggaaacaggcgtgaaattataagcatgttttaattgtctgatatctgaaaatatatgtcttttttgttaaaaacaaacatcttgattacgatgttttctaaacgtaattattttaagatataacatgaaactacttaatttgtctgagcaccgctcctgctttaattatcagcttaattttgcaagtgggtttactcgatataaattggctgcacaagaatgtgggcaagttgataatgacagctgtttttgtattttattcctgttgaaaggagaattgttagttgatatagggcaggaacatcatatttctcttctcagaaacaggatgctccttattccacagcgggaggagaaccggattaaaagtgttgtaccggcagaatgtcttttattgttttggaacaaacagataacggcttgtgacaaaatgtattttgattctatttcccgtgacaagttgggagagagggataactgtattcttctaattcgcaaaccgctgcttcacgtgttaaggcagttgcttatttatctggatgcaggattattatgtaggcatatgcatattctcaaacaacaggaaataatacttgtattgaggggattttataccaagcccgagcttgcttccttcttttcaggaacatccggagtaggaagaaaatttgaagattttgtgctggaaaattatcggaaagtgaaatctgtgaaagaatttgccagtttgtgttgtgtgtcagaacgctctttcaaccgcaagttccaagattgttttaaccagagcccctatcaatggatgcaggaacggaaggctgagattgttcgtgagaaagtctgtgatccggatgttgctttccgggaaatagccatggaatttggatttagttctcccgcccatctcacctgctattgtaaaagactgtttgggctaactccgacagaattgcggagcgaaagcaaaaaagataaaatttgaccgtatgataaatacctgtcttttttaatacaatattaagcaatatggaatcttctattcaaaaagtaagcaagaaggaaaagacttttatttctcttcgtgcacatggcttgtcggtatattgtttccgtctttataaggatcttgtcaaaatgatgtccatgtatgtaagggatgaaaagaggcaggatattttttattccctgatgacagggactgatatatccgatctgtcctacaggtataatctttccatacgagaattaattttcatgtatgaggaaggcgtaagggaagtaagtcgttgttgggaaagtctggttcaagaacagcaaaggcttcaatcagtccatctccggtatagaaactataaggctgttttacacaggaacaatgttgtttgcggacaatttaaagtctttgttccactcaaagaatatgatatacctgcggaatgtgtggataaactttccactcctttggaatatttggagatacaaccgagaatcttacggaacctcaggaggtataatatctatctgttggaggacctgttgcggtttatcaagaaaaatggttttgacgcattgggcaaattacatggtgtaggcaagcggtcttgtgaagatttatatctaatcttaaaagataaagatattttgacgagtaaagatacttgttatctgtttcgttatattcttatatagaatagatattttgcattactttacatttgattgaccggcttttttgacttcacattgggttctgtgagtatgatacatttacacaataatgacattttttctaaaatagtcatgtatttgttaatttctgtcttttttgtataatgccaatgcgatagcagcgtggtacttttgcaacatcaaaaaaacgagaaacagagtattaataataatgataaaaatctttagtatgaagaggactatttttcttttctttttatttttttgcacccattcttttgcacagaaggtggcaataaaaaataatttggcgtatgatgccctgaagactccgaatctttcccttgagttttcaatggggcggaaatggacgcttgacacccaagtggggatgaatttctttttctacacgcaggatgctacctcctcccggtataaaacaaagaaggctagtcactggttggtacagcctgagctacgttactggacgtgtgatgttttcaatggctggttcttcgggttgcacgcgcatggagggcagatgaacatcggtggcattgatgtaccttttgttcttcaaaagggagacgggaaaatgaaggagcaccgttatgaaggatatttttggggtggtggtctgagtgccggctatcagtgggtcgtttccaatcgtttcaatatagaggcctccttgggcatcggttatgtacatacccgttatgataagtacaagtgtactacctgcggaaaaaaggaggggaagggggatgctgattatatcggtcccaccagagcggcgatttccattatttatatgttgaaatagtcttcttacgtacccggattttttattttttatgcaaaaaagtatatcatgaaaccgttacaatattataagaaacaaatttttattatgggctgcctgggaatgtttcccatgttggtttttgcccaggaaactttatcgtcagctaatggtctgcacggggattattccggaagccgtgtagagagaagcgcggacggggataaattggatatagaattttcgatagggcttgtcgaaaagttgaaaagccagcaaatgatgtatatttctccccgttttgtttcagtggatggaaaaaaaagtgtggaactggaacctgtatgcatttccggccgaaggaggtataaggttgttaaacgtcgcaagaccctgcataatgtgaagagtgaccagcttggctatggtgaggtgcattccgtcaaggagctgaaagaaacacccttgacattcaaaagcagtttcccttttgaaagttggatggcagatggtcatcttgttgtggatgaaaagttatatggttgtgccgaatgtggtatgagtaaaaacgatggtattgcattgcaagccggtattccactctttggagcgaaagattatgcctacgattttatcgaaccggaaaaggtgctggtcaagtgctacaaggattcttttgattgtaaagtgacttttcccgtggcacaacacgatcttcgcaagacctttgcggataaccgtcaagagcttgccggactcggccaatttgtatctgaaaacctattgattaaaggggcggagctaaaggatgtgtatataaaaggttacgcttctcccgaaggagattttaattataacaaatcccttgcgcaaagacggactcaaaccctttcaaattatatttccagtcaatatcccgccctcaagaaagcaccggtttatcgtaccgaaggggttggggaagactgggaaggtcttaaggcagcagtcagtggttccactctttccaataaggacaaaatcctttttatcattgaacataactcaaatgatacggaacgtgagtcggctatccgtgagttggataatgataagacttaccatattcttttggaagagttttacccggctctgcggcgtacaacattcagcctcagctttgatgtaaggccttatacgtcggaggaactccccggagtttttgagaccaagcccgaatgtcttagcctgtacgaaatgtaccagctggccggattgtatgcttcccggggggagaatcctctgccggtatataagaaggcatacgagcagtttccgggggacattgtggcggttttgaattatgccaatgccttgttgaaatatggcaaggatgcggacggtgcgttgcaggtattggaagtggtaagagaagacagtcgtgtcctgttcccaatggcaattgcctatgatatgaaaggtgattggaggaaggcagagaaactgttggaagaggcagcggctcggggatgtaaccgtgcgaaagcattcaaggctataagggtaaatgaataaatcgtgggttgcggatgtaactcagttatatattgtattagtaatttcaatttaaaacaattcaaatcatgaaagtaatgaagtattttgcagtggcttcgctggcgttgtttgctgcatgtaacaatgaagaaaatctggttgtaccggagggtgctaatcagccggttgatgtgatgatgtcagtagcattgcccggtcccggtacacgtgccgccatgggcgatttgcagaacactgccaacaatggtgatccggcaacggttgaaaaactgcatgtgtacttgttaaagggagatgatattgtctttgcgaaggagtttacgaaggggtctgatgattttactaagttgacttcatctaccgccgtgggagctggtgaagcgacaggaggttataaattccttaacgtggacaaaggcgcaacaaaagctcttgttattgcaaaccctcaaggtgcattggttgagaacaagcccgtgtctgatgttagcaaacaactgttgaaggctaaaattaatgaagtgatctatgcaggttccaaagaacttaccactgttggtgccgaatcttatggcgttgatccccaacaggataagcgtaccgtcaagaaagcggaactcaccttggctgccagtatgaaccgtttccaagtgactggaaccaaatttatcaaagttacttggaaagacggaaaaaaggccgaggcggaacagtggtgcaagacatggctgggtaaggctgaaaacaacggaaaaaccagtgctgatgcatggacggctttcaaagctgctgccgatggcttcaataacgaagtgtgggatggtaagtctgaccttagcaagaaagccgctttgagcaaatggttgcaggttgttgacgtgacctctgcaaaccagggtatcctgatgaaccgtttcagcagaacactttctattcctgcacttacagtagaagaagaagcaaactggttctgggccaagacttatgcaggtgacagatatgattttaccaatggaacattcaaacctgatggcaagacagacctgtccgatgtatcttcctactttacagcaactgcttttgatttcggagcaggtaaaaaagctgcggcatttaacttcttctcaaatggaattaccggttacggaaagactaacaatgctccaaaactcgctttcgttttcaaaacaggtgatgcaggcgtatctgtagacagacgttttgtagttatatccggttatgcgaagacagaaggtgcaacagacggtacgactgatgttccggccggtaagggtggttacctgatcaatctgaatcttagcacattgaacaacggacagggtatcctggtggatacagatccgactattccggaaggagtgactccagaaccaggtggtcaggaagatttggaagatgaaaatgtgaatgttattgttcgtgttcaagtacaagcttggactgctgtgaacgtcttccctatcctttaacagataggagaataatagtcacttgccggagcggttctcccgtgttggctctgacaggtcaataccggaatccgcctgacttttggggaggggaaaggttatctcctcccttttttattattcccgggagaagtatacgttatctcttccggggaagttatctgcatttgatttataataattagtataaagtatgaacataagatacatacccacttggctggggctgctactcactttatacctcgtgaccgcctgtgatcgggtatatgacgatttgagcggctgtcttggcaacatgattgtcttttcttatctggctgatgacaatcaggaacatttacaggaatatgtggatggtattgatgtctttatttttgatgccaaaggcgaagttcttatagaaaagcatcatctggagagagaacggctgctttcaccactggaggtcacgcttccggaaggggattataaagtggtggccgtaggcaacgctttgacagaaacgattatcggtaaagaggacagctacaaaggttcgtcggtttcccgccccgaactaatggaaaaggacggacgagcatccggtacgtttgacaggttatacttgggagaaacagctattacatctaaagttatgaacgagtcccgtgacgtagttcgcctttattcccagcatgtgaaaatccatgcggtagtcctttctgatgatgataacaattcgcagacctggtttgagcagaacaaggaggcaggttttcgcctgacaatggaatcactttccgcacgtttctatctttccggacagcgggctggtgaaacttcttttgaccttccgtttatcgcaggcgaggagaatgatcgcttcgtgcttgacttcaataccctgcgctttgatgacaaggacccgctaatgatccgtcttatgcagggtgacaaggttctttgtactgtaaatgtggcacaatatatcgcacaatatcccgagcagatacggataacgggacggcaagaagcggttcttccactgtttttccgccagaatcccctctcactgagtataagtgtaaaaccatgggaagctgttgatgtggttcctataactgattgattaatgttatgttgaaaaatattaaatatattcgtatgatgaaggctgtgaggtactctatgataacgatgtcactggtcctttgctttatttcggtatcctgccgaaatgaagatactgtttcggaacagtttttcgatgaggatactgtgactgtcagactaaatcttacaacgagaggtgttgaaaccggtgacagcgatctgctggatgaactttcctctgatccttttcagtggtttaagaccggtactctgtttcctcaggctcccgcccagccaaggatagcacttatgatctttaacagagatttgaatcggtatgtgtataatcaactgcttcccttcaattcaaccggggtggacggacaatatcagatcaatatacgtattcctaagggggaaaccgagttttatgcattgtatgctcctaaccagacaggaaaggatctaccttattatactcctgaaggcaatcttcagaataagattccatgggacttcctgggagctggtacggaggaaatctccaaagaggaatttgcaggtgctgcttttcctgctattattaaggaacagcaggatggaagtttgggattacctgtgaataatccttatgacggtgtaactccttctccagcagatgaaaagattattgactggaaaggaacttctgttgtcgcttgggcagatttgcccggcgtgtctaacagactacatttgagtttgctttcggggaaaacggtggcatctgttctgcctgcatcaggaaagctggcgcaagagataacagttcccctattccgtgattttgctcgtatcagagtatatctggcaagcgcaccccgttacggtcaggttacgtataattaccaaaggatttcctttttgaactttcctgtattgatgtctccctctttcagggaaaatgattccgagaaaactcagttggctgcctccaccccaggaacaggaaaggctatggaacatacaggtacatattcttatggggtaaaacatgaaggagcatcattgactgtatacgaggctccccttactgccgagggagaaattgattatgtggcaatggaagctcgattatacgaacagtttgttgtgccccagtatctggccccttatattccggaaagtaattcctggcagaaaaagcaaaatcacccgaaaatacagttgacattggattattttacaggaggagatgaatcacaaacaaaaacgagaactttcctgcttgatgttggtgaggagacttctcccggagtatattccggtcctatttatccgaatcgggattataaagtattcatagtcctgccggaatcttcagataaagagattatttaccgggttgagccttggaatagtaaagaggtagaccttcctccattccaatgatgtatacgagaatttattacgataatttttattatttatgaaacgatacaagctgaaaataacttattttattctgctgttactactcctctttgcatcctgtacggatgaagaaatctttcaagggagcggtgtcacggagggagttcccacgacggtggatataagtgtcggtacggcagctaatacggccaagacacgttccgccttactggaaagtgaagagagaaaaatctataacctttatctgtgggttttcaattcttccggtaacgtggaatgctcacgtgagtattcaagagccgaccttattcaggctgcaactgatcttacaacatccacaggtgaagtggatgcagatgcgcccaccagcatgggattgttgaaaaatatcagtcttaccacagggaaaaagacactgtttcttctggcgaactataaatcggatgctgacgggttgtttcatgtggagcctgaagtattaaacgggatttcaaaatattcagacctggaaaaagtaagagcggccatgactgttcataccctgtttcgtccgaatggtaacttattgatgtcgctaacccaaacagtaacggtttctaccgctacaaaacaaatcgaagtctccttgaaacgctcggaagccaaaatcacattgaacctgcaaacaattgccggactcacttttgagcctggaacatatcgtcttggtaatgtgccgggatcgaccttcattgcggaacatgcaaaaggaaccgatcagactgcttcatgggatgctgacggggtggacaaaaaatcatactgggtttcggaatatttccagttcgagggtgatgccgacaatattaccacttcattctatatgcccgaaaaccgaaagatcgcgaagaaggctatttctccggcttcccccggttataatgcggaaaggaagggatatgatctgagacagaagcaactgaagtctcccgttgcaggtgcaactgacaaacctaatctgcaaaacggtgagacggaatatgccccggatctggctccctatattgaatttacaggtgagttacgtcagaatcttgcaaccggtgatactcctaccgagcgtttcggaagggtgacctaccgcatttatctgggatatacggcggaaaacgatccggccaatgattatgatatagaacgtaacgtacattatacctataatgtgaccattaaaggcatgaatgatctggttgtagaagcaaaatcggacaaggcgaaagaggaggaacccgctcccggagtagaggggctggtgtatgacgcacaccggtcattcaattttgactgtcattatgaacagggactgatgcgttttaagaaagatgaacttgctatcttcaatccggacggtactctgaaagatgatgccatgatttcttttgccatacgcacaccgttctgtgataagattatctcttatacgaaagcggaattggaacagttgaagaataacaattatattccttctaaagaaaaaaaggctgatacgaactggctcaaattctatatccatccaagcactctggccgacaatggaaacgaggatatgcaatatttctccgatacgggtgctaatctgctttcgctggagcagtttctttacaggctgatgaatgaacctgattatgtattcaatgcggcttcgggactttgtaaagtaactgtttatgccaatgaatatttctacgaacaaaatcctatgcaggagaacgctcccaaggataaaaatttgtggaaaacctttgccaattccccggatcgtacgtttgatttgctggtgaacacgtcgcatgaaatttctcctgacggacagtcacgttatcatcaagctattgtaaccattcggcagatgtccataaaaacggtgtttgtcaacagtcctgacggtatgcgcgtttggggagtggagaatgtgaatgaaacccctgatttggattggtctgtaagaggtcccagtgaagcggacgctttttataataaatactattccaatggttggacaaacacatggtctttgatgagcagacgtacaggaggattagatgaagccgataatataatgcctgatccgatgttgagacaaaaagaaaaaactttatggcaagttatgacaaaagtcaataatgcgaagttgacactaagtaaagatcacaccaacctggctatgaagtattatcatgctacatacgcctgcttcaccccgttcctgagaaacagggacaacaaccgtgacggacagatgcaggcaaatgaaatgcaatggtatattccttctatttgtgaagtaaacatgttgtatgtagcagagcgggtattgccgttaaagagcaggcttgttgggcacgctccgtcggataatgctacagcattatttacctcaagagctttcatgggaagtaccaacttgacattgaacagccctaatgccattatctttgtagaagaatcgcatagtatgacccctttatataattttgattaccagaaaacggcaagtcccggagaaagaactcctttttcggatgtgagactgatcagggatttgggaatcttggaaacctcggaggatcatagttatcatcttgatgaaataggtaaggaactcagcaagacactggtcaacaaatggacagagcatgagtatctgattttcagggctgacaatttacctgctaatactaccagggcctcaagagctatttatgaacttccggcacataatgagacttcacagattaatacgatttatcacaaagggttcgaagttgcccaatatattgcgaatacgatagacaagccgaaggatttgaagaatcctaacaggagcagtgaatactactacgaaacctggactaccttgatgagcgatatagagaaaggaaactctccgtgtgcttattattatcagaaaccggataagagtgatttggggacatggcgcttgcctaatgaggctgaactgatgataatggccggcagtttgtttgactgggatgaccgggagaaacctaaagtctatgactttggtggtaatttatcttctttgaatatgaaagatggacaggtaatccattctcggacaggattttctaaacgggatatgaacggaggaagatcatttagtgccggctatcagatgtattttgatggttatcttagattcgtcacgactgtggacacgcagtggggaggcgataaagacaggcttgtcaatgacaaaaaaggatacgtgcgttgcgtaagggatcttgaataaagattcttttacctgttggacttatgccgaagaaaagatagatatttctttttcttcggcattttttttatctcaatgttcgggacatacttttactcctgtcggcaatttaacctgcttttggtttatgtgtactatcaaataactattagtcagcctctcactttttaactgatgagtattgaaattagttttacaattttattgataaagacttgccttgtcatcacctcattctttgaatcggttctttcatttggtgcttcaaatccgtccttttggactgaatatgatactttgtatagattagaagtgctcttataccccttctgagaatatctacgcaaatattaggtagtttccgacaaatcatgtaaatttgcgacaatttaataagctgatttttatgtcgtgtatactgaatattgaaacctctacctctgtttgctcggtagcggccagtcaagacggacagacgatttttgtgaaagaagacttgaaaggcccttcacacgccgtgtcgttaggagtttttgtagatgaagcgttgtcgttcattgatagtcatgccataccgttggacgccgttgcggtaagctgcggaccgggttcgtacaccggacttcggataggagtgtcaatggcaaaaggtgtttgttacgggcggaatatcccgttgatcgctatccctacaccggaggttttaagtgttcctgtgttgttgcaccatgatttgccggaagacgcattgctctgcccgatgattgacgcacgccgcatggaagtatatgcagccgtttatgaccgcgccctgaacgtgaagcgggctattgccgcagatattgtggacgaaaattcctatctggaatatctgaatgagcacccggtttactttttcggaaacggagccgccaaatgccgtgagaaaatcacgcatcccaacgcacatttcatcgacggcattcacccgttggcgaagatgatgttcccgttggcagagaaagcggtggcgacagaagattataaagacgtggcttatttcgaacctttctacctgaaagaattcgtagcttccatgccgaagaaactattataagccgtgtccgttatgaataaatatacattatccattaaagatttatccagtaaagagatgcaatacaatacccaacagaaaagaatgccgcttcccgaatatgggcggagtattcagaacatggtagattatgcgttgaccattcaagatcgtgcagagcgtcagcgttgtgccaacaccattatcaatataatggggaatatgtttccccacctgcgtgatgtacccgatttcaagcataagttgtgggatcacctcgctattatgtccggttttgaactcgatattgactatccttacgagatcatccgcaaggacaacctcgtcacccgtccggatcatatcccttacaacactacccgtatgcgttaccgtcattacggacatacactggaagtgctgattaagaaagcgatcgagtttcccgaaggaaacgaaaaacgcaacttgattgctttgatctgcaaccacatgaagaaagactacatggcgtggaacaaggacacggtggacgataagaaaattgccgaagacctgtacgaactttccgacggaaagctccagatgaccgatgatattgtccgtctaatggcagaacgtctcaaccagaattaccgtccgaagacgaactataccaacaatcgtcagaataaccagcggagaaactaccgtcagaataaccaggacaggtaattctcttttttggaatcgtaaacaattaaaattcaatcaatggcttcatttgtaatcgaaggaggacatcggctaagcggggaaattcatccgcaaggcgccaaaaacgaagttttgcagataatctgcgccacgttgctgactgccgaagaagtgacggtggacaacatacctgacatcttggatgtcaacaacctgatccagctgatgcgggaaatgggtgtgacggtttcaaagaaaggcattgactcatatagctttaaagcagaaaacgtcgatctggcttacctggaaagcgacgaatttctgaagaaatgttccagcctccgtggctcagtgatgttgatcggtcccatggttgcccgtttcggaaaagcgttaatatcgaaaccgggcggagataaaatcggccgacgccgtctggatactcactttttgggcattcagaacttgggtgcggacttccgttatgacgaaggacgcggcatttacgaaatcaccgccgacaggttgcaaggcaattatatgctgctggacgaagcctccgtcaccggaacggcgaacattgtaatggcagccgtactagccaaaggaactaccactatttacaacgctgcctgcgagccttacctgcaacaactgtgccggatgctgaaccgcatgggtgcccggatcagcggtatagcttccaaccttctgacgattgaaggcgtggaagaactgcacggcacacagcacaccgtattgcccgatatgattgaagtcggtagctttattggtatggcagcgatgaccaaaagcgaaataaccattaaaaacgtctcctacgaaaatctgggcattattcccgagagtttccgtcgtctgggtattaaactcgagcagaggggagacgatatttacgttcccgcacaggaggtctacgagatagaatctttcattgacggctctatcatgacgatagccgacgcaccgtggccgggactgactcccgacttgctcagcgtaatgcttgtcgttgccacgcaagccaaagggagcgtgcttattcatcagaagatgttcgaaagccgtctgttctttgtggacaaactgatcgacatgggggcgcagatcattctttgcgacccgcatcgtgccgtagttatcggacataaccatgggttcaagttgcgcggcgcacgcctcacctctccggatatccgtgccggtatcgccctgctgatagccgccatgagtgcggaaggaaccagtacgatcagtaatatcgagcagatagaccgtggttatcaaaacatagaaggacgcctgaacgctatcggagccagaatcactcgaatatgataaagaaagaagaagtatataaaataggactattcaacaagccgcacggcatacacggcgagttgcagtttaccttcacagacgatattttcgaccgggtggactgtgattatctggtatgcctgctcgacgggattttcgttcctttctttatggaggaataccgtttccgttcggattccaccgctttggttaagctcgaaggggtggacacggccgaacgtgcccgtatgtttaccaacgtcgaggtttactttccggtgaagcatgcggaagaagccggtgaaggagaattgtcgtgggaattttttgtcggtttccgtatggaagacgtgcaccacgggatgttgggagaagtggtagatgtggataccgccacggttaacacgctttttatcgttgaaagagaaggggaagaattgcttgttcccgcgcaggaagaatttatccgggggatagaccagcaacagaaactcatcacagtggaacttcccgaaggtttgttgaatttggacgaactggaggaggaagaataagtaatcagaataaagttaaagtactaaagcgtaatcgcttataatttagaataaacgaaatgccgaagaaaagacgaagcagagctttctggaaaaatttcaagttcaagtataaactaacggttgttaatgagaatacacttgaagaaattgtagggcttcgtgtgtcaaaactgaatggcctttcggtgctgcttagtgtgctggcggtgcttttcctgattgcggcctgcatcattgctttcacccctttgcggaattatcttccgggatatatgaacagtgaggtccgcacgcagattgtggacaatgccttacgggtagactccctgcaacagatactcaacaagcagaacctctacattatgaatattcaggatattttcagtggaaaagtggcgatagacagcgtgcagacgctcgactcgctgaccgccgcccgtgaagacacactaatggaacgcacgaaacgcgaagaagaattccgccgtcagtacgaagagaatgaaaaatataaccttaccacggtcacttcccaaccggatgtgaacggactgattttatatcgtcccacacgcggaatggtttccgaccatttcaatgcggaaaagaaacatttcggaaccgatatagccgccaatcccaatgaaagtgtgttggctactatggacggaacggtcattctaagcacttataccgccgaaacaggctatctgataggtgtacagcataatcaggatttgatttcgatttacaaacattgtggttccctgctgaagaaagagggcgaacgtgtgaaaggcggcgaagccattgctttggtgggcaatagcggcacacttagcaccggtccgcacctgcatttcgaactttggtataagggacatcccattaatccggagaaatacattgtattttaatgatgagtatagagaataataaaaagaagaaacaaatagctattctgggctctaccggttctatcggcacacaggcattgcaggtgattgaagaacacccggacctgtacgagccttatgccctgacagccaacaaccgggtggacctgttgattgcgcaggcaagaaaattccagccggaagtcgttgtgattgccaacgaagcaaagtatgccgaactgaaggaagcattgagcgacctgcctattaaagtgtatgcaggtactgatgctatttgccagattgtggaagccggaccgattgacatggtgcttactgccatggtcggatatgccgggttgaaaccgaccatgaacgctatccgtgcccgcaaggctattgctctcgccaataaagagacgctggtcgtggcgggtgagttgataaaccagttggcacagcaataccgcaccccgattttgccggtagattctgaacactcggccgtctttcagtgtttagcgggagaagtaggcaatccgattgaaaaagtgattctgacagcttcgggcggtccttttcgcacgtatacgttggaacaactgaaaaccgtgaccaagacacaagccctgaaacatcctaattgggaaatgggcgcaaagataacgattgattctgcttccatgatgaacaaaggctttgaagtaattgaagccaagtggttgtttggcgttcagcccggccagatagaagtggtcgtacatccgcagtcggtcattcattcaatggtccagtttgaggacggtgccgtgaaggcgcagctcggtatgccggatatgcgtttgcccattcagtacgcgttctcttatcccgaccgtatcagcgcttcttttgaacggctcgactttgcaaaatgtaccaacctgactttcgaacaacccgacacgaagcgtttccgcaacctctctctggcttacgaagcgatgtatcggggcggaaatatgccttgtattgtcaatgccgccaacgaggtggtggtcgcctctttcctgaaagacggcatcagctttctcggcatgagtgatgtgatagagaaaacaatggagcaagccgctttcgtggcgaatccgagttatgaggactatgtagcgaccgacgaagaagcaagaagaatcgcttccgagcttgtgcgccggcaaaatcctcagaaataatttgtaattagtaatttgtaaataataaacatggaaacatttttgattcgtgccctgcaattgataatgagcctttcgttgctcgtcattattcatgaaggcgggcatttcttatttgcccgtttgttcaaagtgcgggtggaaaaattctgcttattcttcgacccttggtttactttgttcaagttcaaaccaaagaaaagcgaaacagaatatgctgtcgggtggttgccgttgggtggctatgtcaagatagccggtatgattgacgaatcaatggataccgaacagatgaaacaacccgaacagccgtgggagttccgttccaagccggcctggcaacgtctgctgatcatggtgggcggtgtgttgttcaatttcctgttggcgttgttcatctactcaatgattcttttcgcgtggggcgaccaatatataaaagtacaggaagctcccctcggtatggattttaatgaaacagccaagtccgtaggtttcaaagacggagacgtgttgctctctgccgacggtgttcctttcgaacgttatgacggtgatatgttgagccagattgccgatgcacgcgaagtcagtgtgttgcgtgacggtgcaaaggcttccgtttatattcccgatgatatgatgcaacgtctgttggcggacagtatccgcttcgcttctttccgtttcccgtatgtcgtagacagtgtaatggtgaactcgcctgccgcgcaagccggtatccagccgggggatagtattatcgccttgaatggaactccgatttctttctccgatttcaaacaagccatggcggagcgcaaaaagaatgctgcgactctccttaaagacagcatagaccctcgcttcatcaccttggcttatgtgcgtgacggcgtgacggatacattgagtatgcgtgtcgattctgcctatctaatgggagtaaccgcctgccttgtcaccgaccgccttcttccaatggtgaaaaagcaatatgccttcctggagtctttccctgcaggcgtctctcttggtgtgaaaacgctgaaaggctatgtgggcaatatgaaatacctgttctctaaagaaggagcgaagcagttgggcggtttcggaacgatcggcagtatcttcccggctacgtgggactggcaccagttctggtacatgacagctttcctgtctatcatccttgctttcatgaatattctgcctatccctgcgttggacggtggccatgttcttttccttatttacgagatgatagcccgccgcaaaccgagtgacaagtttatggagtatgcccagatgaccggtatgattttacttttcggtctgcttatttgggcaaactttaatgatattttgaggtttttcttctaaactctactctgacacggtagttgtcagattggcaatctcattaaaacgggatgatcggtatttggtgtggatgttagcgcatgagtatgctgcattgtgttgatattcaatgaaatggaatacgtgattcctgtgatgcaagaacggcgttttaacattgtgttaaaacgccgttcttgcatgcagaaatgccctggtctgcatacaagaaacggcgtttcctctttttcttccgtttgtaatcagtcatgactgttaaatcgttaacattttcttttcccgctccaagtcagtttcgtccagttttggggagggaacagtacacgttttgatgtaatctccttcccggcaggtataattataatatggctccagttccggtgtcagttccgctttcgggaccagtttgctctccatttccaagaaagtccggatgtccgtgctgtccgattgtttcactaatacgatgcgtcgggcaatggggttgtggttatagtccagacaaaggtacagccctttcagcatagtgggaaattcgtaatgcggcagttgcaggtaaatggtgaccaaagcaaactggggcagatcccgttcgttgaacatcaggtatgagttttggtgattactgataattccacttccccaatgaacagatttataagcgtttatcatgcccattttcacatattcactgttttcggaagcgcaaatcatgtaaggttcgattttcaggctgtccgtagaggaggagagactgtaactgagataagtgccgctgtaattgaaaacatcttgtacggattctttcatttccttttccagcagcttgatgaatgagttaccgctgtccgcttcattctgttgttccggttccatttcctgcagcagtattctcatcgagcttacattatttaataagcgttttttcgacacattgttcactagtgtcagcgcgtcgtccaatgcctcgtccggtgtgcgggttttcagcaggtcgatgtaggcaggcagtacgctggagtataaggcggacaatacgcttggtgccatatctacacggtcggcaatttctttcatctttacgccattgttgcgcaggtattctattcttttgtaaatatcggtcagttcatccatgattcttgaggttgcaaattgaatttcgttgcaaaggaatgactaatgtattatgattttgttgcatgaatattacattaatatttcactctgtccgaaaagaaaaatatacgatatgattcattgaaattcattttttcactcgtcccggtgtcctacatttgcaccggaaacaaaaaaatgacgctatatgaatttcaaagaaaaactgtcgccttcggctcaaaaaaaactttctgatttactttttatcttctatgcgggaggtgcggcgctgttgtcttactcactggtgtatgcgcttcgcaagccattcaccgctgctacattcgacggcatggaactgttcggcatggattataaagtggcaacaagcatcattcagatatttgggtacatggtatccaagtttatcggaatcaaacttatttctgaactgaagagagagggccgcctgaaattcattcttgtctccattggggttgccgagctctctttagttcttttcggatgtctgcctcgtccgttcaatgtgctggcgttgttcttcaacgggctgtcgttgggttgtatgtggggcgttatcttcagcttcctcgaaggccggcgggtgacggacttactcgcttctcttttcgggctgagtattgcggtgagtagtggtacggcaaagtcgatcgggcttttcgtagtcgatatcttgaatgtcagcgagttttggatgcctgcgttgattggtgcggtagcgctgcctctgttggcggggctgggatacattctcgaccacctacccaagccgactgccgaagataaagcgctgcgtgtggagcgtgtcacgttggacagacaacaacgttgggaacttttccgcaactttgcccctgtgctgacgttacttttctttgccaatctctttctcactgtcctgcaagatgtcaaggaagactttcttgtgaagattatagatgtgaatgccgccggtctttcttcttgggtatttgccaaagtagacggtgttgtgacgttgattattctggctgtttttgccactcttgcattagtgaaaagtcatatcaaagttctttcgaccttgctgacgctggtcattgcaggtgcggtaactctcagtttcgtcgctttcaattacgatagcttgcaactttctccgttggtgtggttgtttattcagagcctttgcctctacttttcctatcttagttttcagacaattttcttcgaccgttttatagcctgtttccggattaggggaaatgtgggtttcttcatcgcaatggttgattctatcggctatacgggaacggtattggtgttggtatttaaagaatgtttcaatccgaatctggactggctcgaattttacaatacaatggcgggcacggtgggaatcgtttgctgtacggcgtttacagtttccttgttctacctgatgcagcgctaccggaaaggcaagcggaaggaaatacgtgaaaaggcaacttcttgttcggttccttcccttgcatcttcttattgaaaagataaatcataaataaattaattatatataggaaacaagaatgaaaaagattaaatgtgtaattatggattgggccggtacagccgtcgattacggatgttttgccccggtggcagcttttatcgaagcatttgccgaaaaaggactgattatagatgtggtgcagacccgcaaaccaatggggttaccaaagattcagcatattcgcgagttgctgtcgatgcccgaggtgaatgaacagtttgctacgcgttatcagcgtgcctggacggaggaagatgtggtggaattgaaccgtctttttgaaaaacatctgtttgcctcgctcgaaaattacacagaccctattccgggcgtgattccgacactggagaaactgcgtgccgaaggtctgaaaatcggctctactaccggatatacccgcgaaatgatgaatgttgttcttcctgctgcgcaggcaaaagggtatcgggtggattactgtgctactccgaacttacttcccgccggacgtccggctccttacatgatttttgaaaacctgataaagctgggtgtcgacagtcttgatgccgtagtaaaagttggggacacgattgccgacatcaaagagggagtcaacgcaaaggtttgcagtgtgggagttgttctcggaagtaacgaaatggctctcaccgaggccgaaacaaaggccatgccggctgccgaacttgaagctcgcatcgctgaagtgaaggaacgtatgtttgctgcaggtgcctcttatgtgattctttccatggaggaactgcctgcattgatcgaaagaatgaacgctgacagatgataagcggaacggtaaccgcttctgtactttttataacaatatatcgcaaagaaactttattccagcactgtgctggtaaaaaaatgtatcattatgaaaccatatttattattaactcccggtcctctgaccacgtctgaaacagtaaaagaaactatgatgactgactggtgtacatgggacgaagattataacctcggcattgttcaggaattgcgcaaagatctggtgagcattgccacaaagaatattaaagattatacttctgtacttttgcagggaagcgggacctattgcgtggaagctgtacttggcgccactatcactccgaaagacaaacttctgatttgcagcaacggcgcttacggagaccgcatgggtaatattgccgaatattatcacctcgattatgatatgcttgcttttgaagaaacagagcaggtatctgtggaatatgtagacgactatttgagcaataattccgatgtcactcatgtggcttttgtacattgtgaaacgactacgggaattttgaaccctatcaaagagttgtcccacattgtcaaaatgcatggcaagaaactgattgttgactgcatgagcagcttcggaggaattccgttggatgtaaacgaattaggaattgactttcttatcagcagttccaacaaatgtattcaaggcgtacccggattcgggtttatcattgcccgccgttcggaattgatgcgttgcaagggggtggcccgctctctttctctggacatctacgaccaatgggaaactatggaaaaagggcatggaaaatggcgcttcacttctcctactcatgtagtccgcgctttcaaacaggcgttggccgaacttctcgaagaaggaggggtagaagcacgttaccagcgttattgcgaaaatcatcgtatattagtagaagggatgcgttctctcggtttccaaactttgctcgacgacgctattcagtcaccgattatcacttctttcctttacccgcataaggattttgactttaaggctttctatctggcactgaaaagcaaagggttcgtcatctatccgggcaaaatctcaaaagccgacactttccgtatcggaaacatcggtgacgtatatccggaggatttctgccggctggtagaggtgattcgtgaaacggaatattgatttttttactgcgaggccggtagaaggtcagtagtagcccacctatcgtgccggcctcaatttatgaattgttttttaatgtagaaggttgcgaaagtctcaaactactaacgattgccgctaccactgcaaatatgcttcctactatcaggcagaccgccgtgcttttacctggaataacgaaactgaaaagtaatgcgacgagcgtagttcccgatgtctgtcccaacaggcgtgccatacccagcattccgcttgctcctcccgaacgtttcgtcggagcagaagaaataattgtactgttgttcggtgtctgaaaaagcccgaaacctgcaccacatagcatcagccgtaggattaagctgatatcggaggactcggcagtcaggccggacagggagaaaagccccacggcaaacagcaccataccgacgcttcctaatattcccggatgaatccgttccaccaggtatcccgccaacggagcagtgacgagggtcgccaacggccacggggttagcaggagtcctgtcataacttcactgtgtcccaaggtgttttgcaggaaaaagggtaaagaaaccattgccgacatttgcgcgataaacgaacaaatggaggtcaggatagacagtcggaaaatagggatacgtaataggtccaagggtagtaacggagtggtttggctgagttgacggcgcacgtaataagtacccaccaccacgagaacaattaattggatgaaaagaaaatccattttttcgtgatgtgcgaatccgtccagcgtgtaaatcagtaatccgaaagtaatagcattggctatggcactgatcgtatcgaactttcgtttcgtgcgttcttcttgtctcggtaaatgcttcatacccagcactaatgccgtaattcccaagggtacgttgatcgcgaacagccagtgccaactggcaatggaaagaatcccgctggctacggaaggtcctgcggcggcagagatcgctactaccatggcattaattcccattccgcgtccgagctggcttttcggataaatatatcgtaactgcgccgtgttcacacttgtaatagccgaagcgctgaatccttgaaaaatgcgggcgatcgtcaatgtccagaatgaatcggacagggcgcaaatcagtgaagtgatacagaataacccaatccccgaaagatatacttttcgataaccgataatctcccccaaagcggaaaaagacaacagagaaacaacgattgccaactggtaaccgttgataatccaggtagtcacggcgggtgaagtcccgaaatcgtgcgaaagggtggggagtacgatgttaataatgttaacgtccaatactgacatacaaagagcgaatccgacggagattaccgcccagatacgtctgggcattggtagtccgtcggtttcgtccgttggagtaggatttactgattgtatcataaaaacttattcttgtagaattttcttttttctgtaaaagtaaacaaaacagcgctttacgtgttttcgttttcttaaaaaaataagtttttttagtgcagtcggtggtgctgtctgggatgccggggagactttgtctttagtgccggcaaccgtctgtttttatggttgaaaacggtttgataattttaggattcgttgattactacttccacgaaattccagataaggagagaaaagatcctgttcgaaacgtccgtctaccaatacgtttatataaggaagaaccgcattcagtcggggttgttcccggatttcttcatacgtatatcctgtgtaacaccatatattcattcctgtttcctctttcactcttttgacaagcgccagaaattcttccgggtagaacaagggatcccccccggagaaagtgactccatccagtaaaggattcgctttgatttcccggataatcgattgtatcttttcttccgtaagttcttcacctgcgttcggattccaactttccgggttatgacaaccgggacagtgatgggaacatccggcaagataaatggaataccgtatcccttcaccgtcaacgattgtttccggataagttcctaacaagcggagagttgaaagttgagagtcaagagttgtcattgtaaattaggatatgaaaatataagtaaagttctcaactctcaatttttacaagtgttttacgcggtctttttcttccgcccgtttagcggagttccacgaacttaagtcacctgtcaggtagccggtgatgcggcgcatccggagaatactttcactctggcatacggggcatttgtcgaaaatcacccctttgtagccgcagttatggcaggtgtctaccggatgattgatagagccgtaaccgataccctcgtcgtgcatcacctttactattttggcaatggcacgtacatttttctgtgcttctccgtccagttccacatatgtgatgtgtccgccacgggtaatagcgtggaaaggagcttcgcatttgattttttcaacaatactgataggctctttcacgtctacgtggaatgagttgacataatagtccctgtccgttactcccggaattttaccgaatttccggcggtccattttggtgaaacgtccggaaagaccttcggcgggagtagccagtacagaatagttcaggttatatttcgctttatattcatccgctaccttgttcatttccgttacggcctcgtacaatgtgtcccatgccttttggctatgcccgtggccttctccgtagagagcaaccattgcgttgtgcccgccgatgaatccgattcccagtgtaccgctacgcagcacgtcacctacctgttcgtttgggttcagtgtgccgccgcctttccatacatcatttcccatcataaaggggaactggcgtgcaagggctgtacgctgatattgataacgttcgtaaagctggtcggccactaaagtagccgtgttacgtaccgattccatgaaaatctccttcgctttctgttcgatagcgtctttgttgcgttcgtcctctatcagattttcagctttgatacgagcttcgatagccagtcggggcatatttagtgttgtgaatgaaaggttgccgcgtcctaaagacgatttctctccggctacgttttcaaacacacgagtgcggcaacccattgttgccagctcgtaaatataacgtttcgggtcgtctgctttccatttttcgttcttgttgaaaggagtatcgaggaacatgaaatttggaaaaagagctttcgatgtcgtctggcaggctttcagcagcaggtcgaaattaggagcttcgtaagttgctttcatggcctcttcgatgctttccattttcatagccttctcatagtccttttccgaataagaaactccgtctttcactttgaagatctgaatcgggaatacgggtacttcaccacgggttcccaacccttcaatcgtggccttcagtagctcctcaatcaccatgcggccttcagcggaagtatccgtgccgtagttgatagagctgaataccacctggttaccaccacgagaatgcatcgtgttcaggttgtgtataaatccttccattgcctgatgcgtatctttccgtgtctgttggtatgccttctctatgatgcgtgccaagtgctctttgtcaatattgatttgcagggctatcagggcgatgcgtaacgtttcccgttcccgttcaccggattggatagacggcagatattctttaatcagtgtgcggatcgctttttcatcggcctgtataccgttttccatggccacatagaaattgatgaaagaagataaatgcttgcggaatgacttggccacaccctttgccatgaaaaagtcgaaggcgggaattgcctgtccgccgtgctgctcgttctggtttgtctggaagatgatcgtagccagagttgcataactttgaatgctttgtggggtgcggatactgccgtttttggtacggaaaccgcgttcgaacaaatcatccatgtcatattggatacaagtcgtcgtttttgtcggataataatccaagtcatgaatatgaatgtctcccagttggtgagcttcggcaaaacgcttcggcaacaggtatttataagtataatctttggttacttccgatgcaaatgtcatcatctgtccggcaggtgtatggctgctcatattggcgttgcttaggtttacatcgttcttgtcgatagcgacaataccatccatgacgtgcttcatctgggttttcttgtctcgttccgtattccgccattcacggtagatgatgtactttttggcgacctccggccgtaccttcatcaatgctttttctactaagtcctggatttcctctacggtaatcgtaggggtggcaaactggctgattacattcatcgtgatatcagcaattaattgctgttcatcctgaatgcctgtcgcactgaatgccttgctgattgcattcttaatcttgctgatagagaaatcttctcttttaccatcacgtttgatgatacaaatttccgcgtagttcataactttaactcccgaaagtgttagacattaataatatggttgatttgttccggcaggtcttctgacttatctctccctcgcaacgccttcccacatcagccgatgcagtgacatagtgtgcggattcacagagaattacagcagcgggtactgtcgccgatttgcacagcgttccctcattgactaaacctctttttagttccgaaaccggatacaaagataagtgataatctaatatcccggttaccttttaacattaaatttcgggaaacttttctttcttgctgatacagaaacttttccgttttagaaaacttttttctgaatttaactcgtgaagtgttctctttttgcctgtttcttttctcgaaaccggacatgattcggtgtgttttcctttatttgggctgcaaaggtgcgaaattattttcttatgttccgtacaaaaataaaaaatatcttctttgtcttattccgccgttattatttctacatcatatccgatgaacagctcgctttcaatcgctccggtgattgccttcacttgttcctccaaagaagagtcaatgtaatgaaaacgagtatcagggataaagttgccgttttcggtaagaaccggtccatctttcgccatggtcgcaatttcgcatgctatacgttctttcgcttcccggttgataattgaatccgaccattgcagattttttatcagatgattttttccggttcatgatcttacattctcgatgattttaaatatgtataacaaccggatgaggatgtttggttcaatcttgctttttgataatcgaataactgtcttctgcctttttggttaatttttaaatttaattccgttaattgttaacggttgcctgtattctattaaaccatgttataagatgccctgctttgccttgaaaatttggagatatgcagaaagtccgtatctttgcaatgtgtttttcatagtattagatttaaggttaacaaaaaagattggctgtctgggatagatagccttttttttgtctgtatgtctacaatcgttatgtctccctctataatatcagccagatagctatgatgtgcccgatacttcctcccaagcagaacagatgaaaggtggcgtgcatataaggcttgcgcaatgaatagaatacggcacctgtaatataagatacgcctcctcctatcagccaccagaaagccggggtggcattcagcaatgccagatgatccattaaaggcttcatagcgaccaaaatactggctcccatggccacataacagcacgtttccagattactgtgttctttcagctttttgaaactcaaaatgaaaccggcgatagccgacagccagacgaaggcgaaaataccccacccccaaccgcctgcctgacgcaaaacgagtaatgtgaagggtgtgtatgtgcccgctatgtgaagataaatggctccgtggtcgaatttgcggagtagctctttcgttttgcccggacgcgtaccgtgataccacgtagaactgatataggatgaaagcattcctgtcaaataaacagaaatacaagccactgcccattgcggttcggcattttcggttgctttcactagcaggaagtaacctgcgataactccaagcagtatgcctgctccgtgactgagcgtgtttgcccattcttctccgttgctgtatcttttgtttttcaatgtttcttacgtactttgttgaagttacaaagatactttattttctgtaagtagtcatcttattctttttttaatatgatttttccattgtactgttccgccacttgtttacggaaatcgaggaaagcggtatattcgccgggcttgtatacccctttacgcataaacagtcgatgaacaatatatatcttattgtcttttgtatagatactggaatgaaagttcccgaatttactttttagatcgattggtttgggaagtccttccacgatatatccgtcaggtagtttgatgcagatactatcagtgtccgaatacccgtagttaatatggataggatatttccggctgatggcacgaggtacactgaatccttttttaaatatgttagtcgggatgaacagccggtttcctgttttgtaaccgtattgctggctgcttgccgtataactgaaagtgatagatggattcgcttccttacattctttgatttgcaggcgaaggatgtcggcttgtgagaggttgagggtcgaacggatgtggtctttctgtttgttagggtccaaataaacgattcctgcctcattttcgtactggaataatcgggatatttcgttcacttctatttgtgtttctgccgtaggcgatagggtgatagtagctatgatgtgctgtgtgttcaatgaatcgggatacgtgggcagacgatgtatgctgccaccggcgggttcgataagcaatgcgtcatgtccggcaatgccttggtggatatagccgaagggaagcgatggatcggtacattccagccacagagtgtccttggggagaggtacttgcagaatgacgtgattcatctggttggcgctggagaaatcaggcaacaggcgttcgttggtagtgcttatcaccgtataagtagaaggtatgcctatttctttcagcatggcacgggtgtaattggaaagtcctttacaatcgccaaatccggtgcggcagacatcggatgctgcgataggctgcaatcctccgatacctagctgtatactgacgtagcgggtagtttttgccagatagtcataaattgcctttactttttcgcggtcggtagagcagtgagcagtcagtccgtgcagcttgttgcggaaaggttcggtgagttcgtcgcgtccgtcgagtaatttgtattgccattctccgtatttttgccaagtactcatgtccccttccgatttgtcatatttgaaagcggaaggagcgaaataaatccgtggaaacaattttgcgaaatcgggaccgaacggctctttctgtaccggcagcagtttcgaagcggtgacttcaatcacttgctgcccgtccgtaccggtcgactttgtcacttggatattttttcctccagtgtttagctcgcggtacctgcattcttgtccggcaggcaattcgatccggtatgtcgcttgttccactccttgctgaaagtctgtttgcggaaggaaggactggtagccgataagcccgttattacattttatttcccattcatattttacggtgaaggggaaagaggggaagttacattcgtaataataggcatagtcatctgtgcttaacgaggaactatattcgctcttttgcagttccgatttttttatctttcggacgctttgaccggatgcgttaagtatttctcccgagaacttctgtaaggaacggaacatatcgcattcacagacgaagtgtgcagcattcagtcctttacggttaagaatgagaattgtgcggctttctttttcgatagattgcgtcattgatttgcagaggacttccgtccgcgaatccgttataatagaagtggcgtcttttgaaaggtcttgtgcctgtacagacatgatagaaccgaggtagagaccgaataataatccgatgattttcattgctgattttttcattatcagaatattgaatgatttttcttatatttttttgagtactatcaacgtgtgattcttctcaatgatttttgtccacatatcttgcagttgtttataatgttcaggaaggaatatatattctttgaggtggaatctgtagctgaccaggatcgtattcccttgtttttgaaccatatatctgcattgcagatgatccccctctgctcggataaattgcgattggggtagttcttccacttcatagccttcgggaagggccaatttgcataataatgtgaatttatacggatatggaaattcgacaggaagcactcggtcggtctgaataaatggattggtctccagttgtgggaaaagcatcggattgatgtagaggtgatcacctacctgttcggtttgtatggtgaagtcgagttcctcttttatcgtacccggatcgttttccgtatgttccacttttaggttggtgacggttagcctgtctttcggggtaatttcggttgtcgggtctggaacgatactgtcttgttcttgttgtctctttttctggtattccaccgcttcctgtccgtgcaagactgtactgcggtgtcctttaattaggttaccttctaatttagctttaatgttcataaagcttgtgttttctgtgagcatcattaagtctacccatttgttctcctccttttctgttggcgaaagtatgcgtgcttggttaacagacaagtcgggcggcagaatgttaagagaaggaatatccattgaactgtccaaaaagacgtatttttctttgtccgtatcgtaaacggcgataacgaaggtattaagcttttgcagagacgggaaattatgaggcaacattcctgctgaacggcggcttaaaacaacagggtaggctttcagcccgaagtctttaaggatgctgattaggataaaattcagatcagcattgctgccgcttcctttttgaattactttttcgaggtctttgctataaagattatatcttccgttccaagccagtttcttttttagcagacggaatgagtggatgattctttcctcaaaattcattttgctggtaaaaatctctttggtctccgggcggaacgggttgatgaaagagaggaacacgccgaattgtgtattctccggcttaatcagttgtttatctacatcttcccatttctggctatatggttcgtattctttgccggggaagttggtaccttgtaggtcaaaacttatttgtactttataatcttccggacaccagcaatagggttcgtcctgacggatagctgggaggttctgagaaatgaatgtcgtttcttgtgccaggatagtgaaatctttgttgattcctgccgttccaccttcacgtgccgttgcgtgaagggcagattctttttgtttcatttgtatgtagtcttttccccgaagttcgatgttgtagatgaatacattgggaattgtgattttgtattggttgtatagcatgggcagttcttcttgcatcatccagttatctatgtggatgaagtagtcggagtagagcttgtagtgatattcgataatagtcccctccttgacagcgggtagggagaatttaagaattttgtatcgattgtcaatccgttcgaaagatatggattcgcgtttcataggtgtttttacacatttcccgttttccatgttataagagcaaccttctacttcgctggccctttcttctccttcctctttatccgtaggggcataaaacgggacagaaacatcggcgtatgccgttccctgtggcttcaggatttttatgcgtatccagtgttctgttatcagttgaaaaccatcgtggtaggtaaagttgctctgcccctggtggaacagatagagggctgtggcagtagtatccggagtataagtggtgaacaagagttcttctttggagggtttaccgtatttcagactgggagtgattactgttgcggcttgttgcgggtaaatgggtgacaaaagctgtaacaggagtgtaaatagaatgaatagctttttcataatcttgtgcgtgtttttagtattcggacaaagataaaaaaaatagagaaagattaacagtctttctctattttttttatctgttatgcggatcatgttttataccagatgtccgatccattcttcgcggtcacccggaaggaggtcgatcaccggaatttccaccattgtgtagcaacccggttgctgcttcatggaagcacgtgctacgcataccagtacttgtgcagtcagtgcagggttgttgatgcgcatattaaattcaaatagctgattctgggttttgcccgatacgcctttgcgggtgaggtttactccgtgtcccatgtcgagaagggcgtccacgctcggaacctgtttcacgtgtgtttcgtcattcacgaaataaggatctgctttgatagctgcggatacttcttcaaatttgtatccgtctttcagctcgatatataccatgcgacggtggattcccgtacccgtagggatagtcatagacagagcggctttcactccgtcaatggctttcacggctactgtatgtcccatactcattcccggaccgaagttggtataagtgatccctttcggagcaatggcttcgagcatagtgcgtacgatagagtcgcttcccgggtcccagcctgcggagatgatagatacggctttgtgttctttagccgtagcatccagtgtgcgtcgtaagtcaacgataccggtgtggatgtcgaagctgtctacggtgttgattcccatagccagatattcttttgcatatttctcaacgctgcgggtcggagtacaaaggatggcaacttctacgtcttccaactcttttatatcctttacaactgcataatttgccaactcttccggtttattctcggctcctgcacgacgaactactccggctatttcgaaatctggtgcggcttgaagcgcctcaagtacataatgaccaatgttgccataaccaacgatggcagctcttacttttttcatccttttattggttttagtgaacaaatttctttcttttgcttgcaaaaataaacattttactagtagctttggttcgttagcttaattatttttaattttttcactagtaatgaatatatttgttgcgaacgtcaaactagatgaacaaaaataacgtaattctttaattagtatgctatcatctcattgaaaaaactctgtgtcctctatgtcctctgtggtgaaattgttttatctttgttcccattatgatagaatatgttagaggcgagcttgccgaactcagtccggcaaccgcagtgatagactgtaatggggtggggtatgccgccaatatatctctgaatacctattcggctattcaggggaagaaaacttgtaaattatttatttatgaagctatccgtgaagacgcttacgtgctttacggatttgccgacaaacaggaacgggagatttttctattattgatttctgtgtcggggattggaggaaatacggcacgaatgattctttctgctctttctccatcagagctggtcagtgtaatcagtgctgaaaacgcgaatctcctgaagacggtgaaaggtatcgggctgaaaactgcacagcgtctcattgtcgaactgaaagataagataaagacggtaggaatggctgccgtaggcggaacaacatccgccggaatgttgttgcagtctgccaatgccgaagtgcaggaagaagcggtggctgcgttgacaatgttgggttttgctgccgcaccttcgcagaaggttgttctggctgttttaaaggaagaaccggaagccccggtagaaaaggtgattaaactggctttgaagagattatgaagcaacggaaaatttatatgaaaacatggctggaggctcatcgtcgtgtaaaggtggtagctacggaccagtggtatcttgattttgtcaatgaattactgcctttggtggcagaatctagtttatactgggggactgcggaggaagatcaacagcaggttgctttaatactagctttgtatttggaagactgtgtggctgacgggggaaactggagacaatttatccgttggcatcagaaaagttacggacgttaccttcctttttattcgttgacggacgaatatctgcctgacgagataaatcgtgaggatgtcgcttttcttttgtgggctgtcaattctccggtaggtgactctttcgatggagtggaaaatccgttggatgaagatttgttgaagtttgcggatgtaatctataaccgcttggatgctgtttttgaagaggctcttatcagtgagaatctggctgtggactggataatggaaacggaattgatgcagagaaaacgggagccgttgcctactgccgtacccggtgaaaagttacctacgaatgtcgaacgctttttggaggcaagcaagggagaggcattaatgttctttgattcttatgaggcattgaaagtcttttttgtgcaagcactgaaatgggaggacgaagaggattctcttttacctgatttgaaggagtttgataactttgtgttatatgccaatccgaaaggtctgttgatagggccggatgttgcttcttattttgcagataagcataatccgctttatagtgctgaagaagcggaggaggaagcgtacgaactgttttgtgaagaaggcttgtgtccattcgatttgttgaaatatgctatggaacatgacttattgccggaggcccagttcccgtttgagaatggaaaggctctgcttcacgagaattgggattttgtggcccgttggtacttgggagagtattacgaaggggagtaaattagtataaataccgagaagagtatggtaatcaaaaaaagtaataatccctttgccggaaaggcaaaacccggagtcggaaagaaaaaaacttcgggaaaaagagtcgggaagtcgaaacaggaaaaggctaataatcagttgaacagaagggtgaaataaaataattctaatatgaaaaacaagtatcttttatctttattatgggtgatagtaagcggatttggaatcttgatggcacaagaaatagctatcattccgcaaccggctcatttgatcgtgaaaaatgaaagttttaaattcggtaagcagctcaaagtctgtatcgcttcttatcggggtgatagcgttactcttgttttcgattcatttaaagatgatttccaaaaggctacgggcataaaagttacgtctgtgcgtagtgaggctaaggctggaatcgttttaagtgtgaatcaaacgcttgcaccggaggcttataagttggatgtttcgccaaaacagattcgtattgaagctgcgcgccctgccgggttttattatgcacttcaaacattgaagcagttaatctcccgtcatgtaatggcaggggtggcagtaggcggccggcaggagtggagtattccgactgtagaaatagaagatgttccccgtttcgaatggaggggctttatgctggacgagggcaggcactttttcggaaaagatgaggtaaaacgggtgattgatatcatgtctacttataaaatgaatcgttttcattggcatttgactgaagatcagggctggagaatagaaataaagaagtatcccaagttgacggaagtaggtgcttggcggaatagcaaagttttggcgtatggcgatgtgaaaacggacgggcagcgttatggaggattttatacccagaatgacatcaaagaaattgtagcttacgccaaaactaaatttgtggagattattcctgaaatagatatccccggacattcccaggctgctgttgccgcttatccggagtttctggcttgtgatcctgaaaatatgcatgaggtgtggctacggcaaggcatttcgacggatgttatcaatgtagctaatcctcaagccatgcaatttgccagggatgtaattgatgaacttatcgacctgtttccattccgttatattcacttgggcggtgatgaatgtcctactaataaatggcagaaaaacgaagagtgtcagtccttactaaaagaaatgggctctactaattttagagatttacagatttatttctataaacaactaaaagattatatggccacgaaacctgccaaccaacaacgacgactggtgttttggaatgaagtactccacggaaatactgcgctcctaggtaatgacatcaccattatggcatggataggggctgatgctgcggctcaaaatgcagcaaaacaaggtatgagtacaattttaagcccacaaattccttattatataaacaggaggcaatctgatctccctacggaacctatgtcgcagggacatggtaccgagacggtggaagccgtttataattatcagccgatgaagggagtggaggcggacttgcaaccttattatagcggtgtgcaggctaacttttggactgaatgggtggttgattcttctgtacttgaatatctgatgttacctcgtcttgcggctgttgcggaagccggatggactccacaggagaaaagggattatgtaagttttaaggaacggattcgtaaggatgccgtattgtatgatctcaaagggtggaattacggcaaacatataatgaagtgatttgcctggtatttttaagtatgtgttcttaaaaatgaaataaggaggagccggagatttttattatcctccggctcctccttattttagaattacagtttatgataggctgttgactattgctctgttgcagtttcctgtgctttccgttctttctttttattgatgaactcgattttcagattcgcagcttcctgttctttcttgatttgctgcattgccgaaaggatctgtgataattggtagatatttgctgctgcctgacggtcagtggggctcatggtcgttttgtaaatacggtcgccgagatattcaaccctgatattcttgtctttattgagattcagaaattcgattacgcttccgtcttctccgagtttatagtccgctttttctatcttttcgttcatatcgactgtctcataactgtccttggatgtaggagtttctgcaaaactaccgtcaggagcaattactttgacaccgacgtgatgaatgttattactgccacaataaatagaagtcatactcatgataccttgttcatttacctgaaagcgtagatatgaacggtgcagattcttttcaacggtttgggtaggccacagataatttcctatttgctggtactccgcatctttctccagcgtgaatttgtctttgattgcatcaaattcctgttgttttacttgcagggcactgtccagatacgcaagtgttttttgttgtgctttcgtctcaacatccagcattagttcctgaccggctttacgcgcttcgaatgctttcggatacaaaattttgatactgtcgatttgagactttgcttcttcgtagtcgccacgttcataagcggctttagcaatcaccagtttctcgttcgcttttttttcaatgctatttccgcaagctgtcagcactaatgtgccgcaaaagaggtaaatcagtttttttatcatactgtatatattttattgttcatcatccttcgtttactttattagcgacaaaaatacaaatatatcccttatttttgtaattttgccccctcaaaacttataactaaaaggaatgatagagttgactcaagaggaattgaagcagcatttcagcgaaccaatcttcggacaaatagccgaaactgccgatgcactgggcttagagtgctatgtggtaggtggttacgttcgcgatatttttctgcaacgtccctctaaagatatagatgtagtagttgtaggcagtggaattgctatggcagaagcacttggaaaacgtctgggacgtggtgctcatgtctctgttttcaagaatttcggaacggcacaagtaaaatataaaggcacggaagtagaatttgtaggagcccgcaaagagtcatatcatcgggattcacgaaaacctatcgtggaagacggaacactggaagatgatcagaaccgtcgtgattttacgattaatgctcttgccgtttgcctgaataaagcacgttttggggaactggtagatccgtttggcggtatggaagatatgaaggagaagacgattcgtactcctcttgatccggatattacgtttagtgatgatccgttacgtatgatgcgctgtatccgtttcgctacccaactgaatttttacattgatgatgacacttttgaatcgctttgccgtaatagggaacggatcaacatcatatcccgtgagcgtattgcagatgaattgaataagataattctttcgcctgttccttcaaagggctttattgacttggagcgtagtgggttgttgtcgttaatctttcccgaactggctgctttgcagggggtagaaacacggaatggccgttcgcataaggataacttttatcatacgttggaagtacttgataatatcagcaagaaaacggataatctttggctgcgttgggctgccttgttgcatgatattgccaaacctgccactaaacgttgggaaccaaaagctggctggacgttccataaccataatttcatcggtgaaaaaatggttccgaatattttccgtaagatgaagttgccgatgaatgagaagatgaagtatgtacagaaaatggttagtctgcacatgagaccaatcgtgattgcggatgacgtggtgacagattcggctgttcgtcgtctgctttttgaggcgggagatgatattgatgatttgatgactttgtgtgaagcggatattacttcaaagaatatggagcgtaagcaacgtttcttgaataatttccagttggttcgtcagaaattgaaagacttggaggagaaagaccggattcgtaattttcagcctccggtaagtggggaggaaatcatggaaaccttcggtttgcagccttgccgtgaagtcggggctttgaaaagtgcgattaaagatgctatattggatggagttatcccgaatgaatatgaggccgctcatgcctttatgttggaaagagctgcgaaaatgggattgaaaccacttgactaattggcggttgtttttactatttgtataagtctaaatctgtataaacaagaaaacagtgaacacttaatgaatctactccatacagtgttcactgttttcttgttttgttgatctggttactgcttaggcagtgtcacagaaaaatatgggttaggtatgcgttgttcaaatataacttttttcaacttttctacgatatccggatgttggagtgccacatcgttgtcttcgtgaatatctgtctttaggttatataggaacggctttccttttttaacgattaatttccaatcatccatgcgcactgctatctggttggtttcgttaaattcccaatacaggaagtcatgttgtttctgttttttcttgccaagcaaggtcggtgcgaaagaaattccgtcgaaatagtcaacttctttttctttattacggtatttcttttcataatttttgatgccggccacatcacagaaagtaggcattaaatcatagaaagcgcagatgtggtcattgactttgcctgccggtacgtgtcccggccaacgggcaatgaatggaatgcggattcctccctcgtggcattggcgtttcagtccgcgcaattttccgtctctaccgaagaaagtagggtcggctcctccttcttcgtgagggccgttgtcgctggagaagataactaatgtgttttcatccaatcctttttctttcaatttcttcaaaacttcccctacataatagtccaggcgggtaatcatggcggcaaattgagcgtgtgtatgggtgatagcattgtatcttgaacctttgcttcctttgtaaaccttatccggatcgaattttgctttatactcgtttaagatcgaatcttccggttgcaccagttctgcgtgaggcaaagtgtaggtaaatatgccgaagaaaggctgtttggtatcctgttggtccagccattccattgctttctcgtgaatcatgtcggcagaatattgcgagcgtttctgatattcaggaccgtacatcgggtatttgatgttttcgtccattactatacgtactactcctgtatcgcccagagctttactatatcggtttaagaaattagggtagtagaggtgagcttggaattggcaaatgtaaccataatattcatctatgccgcgtttgtccggagtagagcaagatccttcgtaacctccggcccatttaccgaacataccggtggtatatccgttgtctttcataatttccggtaggataacgtgatccggatcataaggatgttgtcccactaccgaatattctttgttgtttccgtacatgataatgggtgaatttccccaatactctttgtttccgcgtacttcacagtgacctgtatgttgtcctgtcataaatgaagctctggaaggtgcgctgaccgggctgcctgcatacgcttgtgtgaagcgcattccttcgcttgccatagcgtctatatggggagtgcgtatgaatggctggccgtagcatcctaagtcgccatatcccatgtcgtcacagaggataaatataatgttgggtttggaatcctttttctgtccgttggcggagagagtggaaaggagtaatgtgccgcttattaatgatatagatttgtaattcataatgttacgtaattaaatgttgtatgggttgtttaaattatttgccgataaggtcttttccttcgcgtacaccctgaaggatagtttgtagctctgccactttttccggcatttgagaagcataattagttacttctttcacttcttccattttatacagttgcggttcttttgagttaccggtttcgattttcggtccccactggatcattttcggtcccccattcggttcgatatatttccaatcttttgtgcggacagatagtgtatgattggaagcttgttcgattacccacggacggtctttcttttctttgcctagccagcttcccaggaagttgtaactatcaggtgcagtgcctttgggcataacagccccggtcagagaagccagtgaagctaaccaatcgacctgagaaaccaacaaatccgatgttttaccttttttcacttctttcggccagcttaagatagccgggatacgggtccctccttcaaatgcactatatttattacctcttaatggtcctgcagggctgtgtccgttaaggagttcctccgccttatcatcatatccgtcgtcaactaccgggccgttgtcacttgaaagaataattaatgtgttttctctcaagcctagtttttcaagtgtattcagaatttcaccgacacaatagtcgaattgtacaatggcgtcacctctcagtcccattgggttctttcctctaaaacggtcatgggggaaacgaggaacgtgtacatcatttgttgcaaaataaaggaagaaaggtttatccttattttcttcaataaactgaatggcatgtgttgtcaaagagtcagcaatgttttcgtctttccaaagagctttacctccacctttcataaagccgatgcgggaaatgccattgacgatagacatatcgtgtccgtgactaggtttcaggttataaagcatttccggattgctctttccggtaggttcaccttcaaaatttctttgatagcttacttcgataggtgcactaggatcgtagttggctactttcccgttttcaatgtatacgcaaggtacacggtcagcggtagctgccataatgtaatggtagtcaaatcctaagtctcccaatgcacatggcagtggagcgttccaatcttgtgtaccggctttgtctcctaatcccaagtgccattttccgatagctccggtagcataaccggtacttttgaacatatccgccatggtatattgttcgggacggataatcatgccggcatttccggcagctacgtctgttccttttttgcgccaagcatattctcctgttagcatggaataacgggaaggggtactggttgcagcggtggcgtgggcattagtgaagcgaatacctgattttgctaatctgttgacattgggagtttgtacgtttttagctccgtaacattccaaatctccataaccgagatcgtcggcatagataaacacaacgttgggtgtttttgctttttcgggggtggtttgtttgggggctttgtctgcggctgtggccacacaggcagcagaagataaaagggtaaaaagcaaaggttgtttcattgttttattaaatttatattgattaaggtgtttaattttttattgtccatgtgtttttaagacgctaatatagtatatttaatcattgaaagcaactttattctcattctttaaaaaaaatagagagtaaagttgctttatattaataccccggaagttgttttttggcattaattgatatatcccggatttgtcagcatattttttgaatataaactatttcaattcaataatttcttcgttacagttcgtcagtttttctattctttcgttcgttactacccaagagttttctattcctaccggacctatacccggaagaacgattttaggctcaagagcaaagaccattcccggttccagttcttgtttcatgcggggagctaacacgggtgcctcgttgatttcgagtccgataccgtgaccgataaatttggcctgctgttgcgtgcccataaatttatctgcaaatccggcagcagtcaccatttctatggcagtgttgtaaagggtttcgcaaggaatacccggcttggcgatagaagcgattttttcctgaatatccaggcagacctgatgagcagcatacgcttcctccggtaatttcccaatagagaatacacggctcatgtcacccatgtatccattgaagttgccgcctaagtcaatcattacactctggccttctttcagtggggttttattcgcccctcccggcagggcagggtcgaggccttggccacctaaagcaaagtcgtatggagagggggatccggcattgtctccggtcagcacgctacccatgaagatttccatgctacgtccgaaaacgcggaagattcccaaattgccttgcagacgcatcagacgttcgatttcgatagaaaattcgatgtccgtcatgccggggcggtatacgctggggatttgttcgtaggctttggcgtgagcaatgcccgaacgacggaacatttcaatttcaatggcagtttttacactacgtgcctggcggattaacggagtgccgttgaatacttccgtttcaggaaacaagcttgccaaccggcaatattccgagtaagggagttcgtcaccttccaacattaacttggcaggcatgggcaatcctttttcttttagcaaatctacaatttgttctggtttgcggattgagaatgaatgttctcctgtgatattgttgggacgtttaaaaaacagtaaagcaggtgagtgtagtgggagatagagataaccactgactacgcaaccatacgtgtaaattaaattagcattacaagtaataagtgcggcgtcaatgccctgtaacgccatcagactgcgaatcttatcgcggcgaagttttaattcgggttgtagcattttatatttgttacatgattaataattacacaattgctaatagtaaatcattaattgtgagttgtttactgtgaacaacaaattcataatctattatttaccttattatgccacaaagataattaattccattgaaaataatgttaatctcaaaaaaatagcgctacccgcgtcctgtcacaggaggcgagtaacgcaaaaccacaaatacaaatacaactaaacaaagtctttttaaataacgccttgtcccatcattgcgtgagctactttcataaatccggcaatattagcacccttcacataattaatatatccgtcgggttctgtgccgtatttcacgcattgggcatggatgccgtgcatgatcgcatgaagcttttcatctacttcggcagcgctccagctcaggtgcattgcgttttgagacatttccaggccggaagtggcaacaccgccggcattgactgccttacccggagcatacatcgttttatgttcgataaataaatcgattgcttcgggagtacatcccatgttagaaatttctccgacacaaagtacgtcattttttatgagattttgtgcatcttctccatttaattcgttttgagttgcgcatggaagtgcaatgtctgcttttacttcccacgggcgtttgccttctacgaatgtagcattcggatattgttcagcgtaaggagctacaatgtcattacccgaagaacgcaactcgagcatatagtctatcttttcgccgctgattccgtccgggtcgtagatgtatccatccgggcccgagattgtgataacttttgcacccaactcggtagctttcgtagctgctccccaggctacattaccaaaaccggagatggcaacggtcttacctttaatatcaattccttttgtctgcaacatttgattgacaaaatataaaccaccgaaaccggtagcttcgggacgaatcagcgaaccgccaaattccagtcctttaccggtaaatgttccggtaaattcgcgggtcagctttttgtacataccgaacatataacctacttcacgtccgcccacgccaatgtcaccggcaggcacatccatatccggacctaaatggcgccacaattccaacataaatgcctggcagaaacgcataatttcagcatcgctctttccacgtggagagaagtccgaaccacctttacctccgcccataggcagggtagtcagcgcgtttttgaacgtctgttcgaatccgaggaatttaaggatggaaagattgaccgaagcatggaaacgaataccacctttgtacggaccaatcgcattgttgaattgtacgcgatagccgagatttgtttgaacttctcctttatcgtctacccaagtgacacggaaagtaaaaatacggtctggttctaccaatctttcgatgattttggctttttcaaattcaggatgttgattgtagatgtcttcgatagaaagaagtacttccttcactgcttgaagatattcagactcaccgggatgttttgcctccaaagaggacatgattttctggatgttcataatagtatgtttttaaaaaggttgttctgataaaatgtcaactaactatactgcaaatataggaaaagttttcaaatgtgattgattttatggctatattttgattaaataatgataaaatgatagagtcggggatgctagctaaggagcttatagtattcgcacattaataatgttacttttttcatgtgaataaaaaaatcgaggataaacttaatgttacaaatctacaaaataataagagataagcaagtaaactttataaagaagatgatagaaaatgagatttaaaaaattaactttgcaaaccggattttggaaacatgatgatttggaataagaaaggagaataattttatgctcagtaaatataaattaaaccagctttacttcaaagatacgcagttcgccaacctgatgaccaggcggattttcaacgtgttgttaatagccaacccttatgacgctttcatgttggaagatgacggacgtattgatgaaaagatattcaatgaatacacctctttgtccttgcgttatccgccgcgtttctcacaagtatctacggaggaagaggctttgacgcaattggagaatatgtcgttcgacctggtaatttgtatgccgagtacgggtgataatgacagtttcgacatcggccgtcacattaaagagaaatatgagcatattcctattgtcattctgactcctttcagccatggtattacaaagaggattatcaacgaagatctgagtgcgttcgaatacgtattctgctggctgggtaatacggatttgttggtttctatcattaagttaatggaggataagatgaatctggaacatgatgtgcaggaagtcggtgtacagttgattcttttggtggaagacggtatccgtttctattcctccattcttcccaacttgtataaattcgtgctaaagcaaagccaggaattttctaccgaggcgttgaatgcgcatcagcgtacactccgtatgcgtggacgtcctaaaatcgttctggcacgcacgtatcaagaggcaatggaggtctatcgtaaatatcagaacaatatattaggtgttatcacagacgtacgtttcccgaaggtggagcgtggcgaaaaagacggtctggcgggtattaagttatgcgctgagatacgtaagaatgatccgtttgtaccgttgattatccagtcttccgaatcagagaacgcttcgtatgcagcaaagtatggcgctagttttatcgacaagaactccaagaaaatggacgtcgacctgcggcgtatcgtttctgataactttggtttcggcgactttgtgttccgtaatccggagacaggggaggagattgcccgtgtacgtaatctgaaagaattgcagaatatcctgttcgctgtgcctgccgagtctttcttgtatcatattagccggaatcatgtgtcacgctggctttattcacgcgccatgttcccggtggcagagtttttgaaacctattacgtggagcagccttcaggacgtggatgcgcatcgccggattatctttgaagcgattgtgaaataccgtaaaatgaagaatcagggagtggttgccgtctttaaacgtgaccgtttcgaccgttattccaactttgcccgtatcggtgacggttcgttgggaggaaagggacgcggtttggcttttatagataatatggtgaaacgttatcccgaatttgaagagtttgagaatgcccgtgttgccattcctaagacagtggtgctttgtacggacgtattcgatgaatttatggacattaacaatctgtatcagattgcgctttcggatgcggatgatgatacgatattgcgatatttcctgaaagcaaaattgccggacagactggtagaggacttctttactttctttgatgtggtgaaatcgcctattgctatccgttcttcttctttgttggaagattctcactatcagccgtttgccggaatctataacacttatatgattccttatctggacgatcggtatgagatgttgcgtatgctttccgatgcaatcaaaggcgtttatgcttccgtttattttcgggatagtaaagcctatatgcaggctacatcgaatgtgatcgatcaggaaaaaatggccgttattttgcaggaagtagtcggcaatcagtatggtgaccgttattatccatccatgtccggtgtggcgcgttcgctgaattattatccgttgggtgatgaaaaagcggaggaaggaaccgtcaatctggcactgggattgggaaaatatattgtagacggcggtatgacgcttcgtttctctccttatcaccccaatcaggtgttacagaccagcgaaatggaaatagctctgaaagaaacccagacccgcttctatgccttggatttgaagaatgcagggcatgatttctctatcgatgatggcttcaatttgttgaaacttcatgtgaaagaggcggaaaacgatggagctttgcggtatattgcttctacatacgatccttacgatcaggttatccgtgacggtttgtatccgggcggacgcaaggtgattacgtttgcaaacattctgcaacatgatgtattcccgttgcctcggattcttcaattagtgctgaagtatggcgaacaggaaatgcgccgtccggttgaaattgagtttgcggctaccatgagtcgcgagcaggataagacaggcacattttatttgttacagatccggccgattgtggatagtaaggaaatgttggatgaagatttgaatgagatacgggatgaggacgttatccttcgttcttataattcgttgggacatggcattatgaacgaaattcatgatattgtctatgtaaagactgagggttacagtgcttcgaacaatcaggctattgcttgggaaatagaaaaaatcaaccggcagttcctgaatgaaggtaagaattatgtacttgtcggtccgggacgttggggaagcagcgatacatggttgggtattccggtgaaatggccgcatatttctgctgcccgtgtgatagtggaagccggtttgactaattaccgcgtagatccgagtcaaggcacacacttcttccagaacctgacttctttcggagtaggctatttcactatcaacgcttttatgaatgacggtgtttacgatcaggatttccttaatgcccaaccggcggtagacgaaacgaaattcttgcgtcatgtccgttttgagaagccgatgatagtcaagatggacggaaagaaaaaactgggtgtcgttttaaggccggaagattaagtgattctgttaattaagaccgatgttgtttatccgctattcctatatgctaatggactcatgccaacatatcgtttgaagtatttgccgaagaatgatgtgttggcgaaattgagtgagttggaaatttcctggatggggatattggtcgatttcagttgtgatttggcatccataattaccatgtgtgagatgatttcgacacaggtgtttcctgtcactttctttacagtagtacagaggtgaatatttgatattttgagtttctcggcataccatgctacattgcgcgtcttattgtaattttgtatcaccagttgagtgaagtttttgtagattaactcgcttttagacgaatactctttcgtgttttgtagctggttgttatacatggcagctattccggtatgtatattattatacaagtgcggagtaattcctttgcgggttgattcgtcgaaaaaatcatatagctttatcaagaattgaaagtattctgccagtagtttggctccttccggctttaatgaaataaccggtcggcctatcgttataaatagggtgttgatagccgaaggaagtaaattggcttgctctatgtattttgatgagaagcctccgaaataaagcatcggttctccattgacactgtgtatctgaagaatacttccgggcataattgtaacgaagtcattagcccgtactgttatgcgatttagattgaccgaggcttcgatttctccctccatgcatagcacgaatatttccgatttcagtcggcaaggaaagttggtatacaagctaagcaatgccttgtttactcctgtacctatgagccattcttcgggtaaatctattttgggtagttctttcatttctcacactttttactttatacaaagatatatggattatgattaatgggctgtttttcttttcaaaaattataattttgactcgtaaaacggtatcttataagatattttaggcgcttttctttaaaaatagaacagaaacaagaaaaatagaccttgcaggtgtgtgaaaataatagttactttgcgcctgtgaaattttggcatttgtgtgcgatgggaatatcacgcatttgcttttattaattaaaaagagaatttagaaatgaacaagagattattttattatctgtttgctgtattgtgtacagtgacattgtttacatcttgtagtgatgacgatggtgatgatactccgacagttattcctattgagcaagagatggcaggtgattataaagggacaatggatgtatattatgttggcgtgccagatccaatagcttccggtttatcccaaaaagtctatgtaactaaggcttctgatactgctgttaaattagaattgagagattttgttttctttttaggtagtgaggaacttaatcttggtactattgctgtggaaaactgtcctgtaacggtagaaggtacttcttataagttttctggtaatcaaaagatgactcttttagtaggagactgtgatgtagcggtttccggtactattggtagtggaaatcttgcaatgattgtcgacgttaaagttggtggtggaacattgcaggttaaggttgattataagggaactaagttggctggaacagaaagtactgaggctaaaattttgagttttacttttgataaatctgttgaagctaatgctgtcgttttttcagaaccaatagtcaatgaagaagacgggactattgtttttgaggttttaaaagatgtaacaacagatgatttgaagaaattggtgcctactattgaagtttctgctaaagcaactgtaacacctgcaagtggtgcaactgtggatttttcttcaaataaggctatttttactgtcgtagctgaagatggaagttctaaaatttatacggcttctatttcaggacgtgcttttgtagttagttatgattttgaagagtgggatcctgttacacataaaccgatgttggggaatgaggaaacctttactactccaacaggatggtgtacaagtaattatggcatagtagaaatgggaatgtttaaacctatgttaggagtaagtggttggttagttactgaagaaagtgaaggtcataatggtaagagtgcattacttagaactataaattccaaaggtggtgttggaggtttgatacctacaataacaacaggctctctatttctagggacatggagtactaatgcgggtaatactctgaatagtacaaaatttggtaatcaatttaataattctttaggaagaccagttgcagtaaagggatggtataaatatgaatcaggtaaggatttctatacatgtgaatcagatgcaactgataaagctaccatagatgtatctaaaggtgaatatgctgatcaatattctataaaggtatctttatatactacagaagaatatgatgagactggtttttcagattatctgacaggagaatctggtgataataatttttatacttctagtcgtgttgtagcaaaaggaggagttgaaggaggaagtactgacggacaatggaaagaatttactataactttagattatggtgacgcagagtttgatataaatcagaaatatcgttttgctattgtttgttcatctagtaaagaaggagataaattttggggagctccagagagtaaattatgggtagatgatatagaagtaatatataaaaaataaatcaattcatatcttataaaaaaagccggaatgtagaatgcattccggctttttttataagataatgtgtaccctatcggcacggctttttcatttaagctttgaattagtcgttcgattcccccatccatgccaatgcggcatgagaggaattcccgttattgataatcactgatttacgaatatctcaaatctgaatttttctcctttttgagccagaaaatgcaacacgttagtgaagcttactgatagccccttattatctcagccgtgcatgaatagtctgcttttcttctgaaatacttgacaaacgactttttattttgtatctttgaaaaaataaaagtgataaacagtatgagaaatataagaacaatggatacataaataacattccgactgatatattttagtatcaggatagatatgatatagggtaatagtctaacgattattgccctattttgtttatatttttactttaaacatttaatccatttccgaaaaacgggaaaaatagtttttaataaattcggataccgtttataataaactatccaaaagtttattataaacagaaatcaagtttattaatagcggaatagctggttgtaaaaatagagaaaactgtattatagaatagaggagcatcgaaaagtgcattcgtttacgaagtaatataagataacatttttcatttcttccaaatatgcagataattcaaaccatcaacacaaggagatagtatcccgtcaaaaatgaacgataagaagaaacacctaaggcggtgtttccgcatcgctgcgcagtaggattttactacaataacaagcgatgaacaatatttcttaaatgaaaaagccgtgccctatcggggcaaatatctcctttcttctcttttattagaaaaataaactttattttgtatgtctaaaaaagaaataatgagattatgaaatacttagatccaaaggcggacttgacttttaaacgtgtatttggtgagcatcccgatttagtgatgagcttgcttaacgccttgcttcccatttctgtcggtcaggagattactgatattgaatatcttcctgccgaaattgtgccggataatccattgcgtaaaaacagcattgtggacgtgcgttgcaaggataagttcggaaggcagtagtttattgctgagatgcagatgatctggtctctggaattcaagcagcgtgtattgctcaatgcttccaaagcatacgtacgccaaatcaattcgggcgagtaatatgaactgcttcaacctgtgtattcgctcaatctagtgaacgaaatgtttgaatctgaattaccggttttctatcactattatcgtctggttcatgaggagaataccgatagagtgattgatggcctgcatttgatattcgtagaactacccaagttcagcccgcatacatatagtgaaaagaagatgcaagtgttgtggttacgctatctgaccgaaatcaacgaaaacactcgcgaagtgcccgaagatttgatagataatccggaagtgaaaaaagctattaatgcattggaggaatcagcttttaccgatgcgcaactgctgggatatgaaaatttttgggacattatcagcgtggaaaagacgttgtataacagtgcggaacgcagaggattgaaaaaagtgtcgagcaagagaagtttgaagttgcccgaaaaatgaagtcggacggattagcggttgatttcatatccaaatacacaggactgtctcttgatgaaatcaaagagttataggctgcaaaagcaatgttgcaaactattatagcatttcattcgtctccgtacggtaatgagtgaaattataaatatattcctttcctactgaataattttttctgttggaggttttcttttgttaaattaaatatagcttcctttcgcttgaaaactaaactaaaaagaggctgtctcaaaatagaattgctaaagcaaaaatcttatagattgaaacttaaaagtaaaaaatctcctggttttagccatatcattaagatagatgaaagctaaaacaggagatttttatatcgtaacttatagattataagtaagtctatccaatttttctattttgagacagcctctttttgtatactctcttaaaataatatttcggttttacataggagattccctgtgtacttatctttagaatgcatatccaaatcctatattcaaataaataggatacatagcaaacgaaattgtagtaaagtctttcttgaaaatatcgtttagtccccatgttaggtcagcgtacacatttaggtgtttataggctttccactctccgcctagctgtaatccccattgaaatttgcgtagactgctagagaaatcataagttgctatattatcaccctcgaaattaacgcggctaccagtagcatccggggagcggagatggccctcgtaaacatgtccagagaaatcaccatccatcatatatgatagataaggccccgcaaccaatttccagcgatcactgattttgtagttggctaatatgggtattgtcaaaagagacattttgactttagtcttgactcctcctgtccaaagtccttctacttttccgcctatgtcgttgaatatttccataccatagtttttcactagagcctcggtagtcatgtttttgttagcaagacgtactcctaaactaactccccatttcttttggacatctatccattttgttacattaccttccagagtaatagcaagtccgggagaatagctttcgatgcttctgatttcttcgggaaggggaagaggagatgtcccaccaatatttacacctgctttgaattgatagtctagtccatgaagagaagaccatagtagtcctttgtgttcggacgattgtgcattgatttggctgataccgcaaaaaaggataacaatactagccaatatatatttattcatatataaattactttttaagttattattcgttgtcttctttacactgaatagttacctcgtctatccacaaagtacttcctactgaacctttaaattctgctccatttatgctggaagagaatacaacagcgagtttgtatttaccttccttgagagctgattcatctattgcttttttatattcaaaaggtaattcaaactgtttccactcactcgtcttttctattgacggaattcttgcaagagctataatcttattggaatttagggaattatatccatcaaggaaatcttccacatcgtcagcttcgtataagacggcatatatatcacctttatcctttccttccattgaaggatctattataggctttcggttttcatcagtgcccgaaatataaacagtgccaggttgaaatttataatatccttttaatgtttttggatgtttgaaaaatgggaatccgaattttgtagcagctttggcatctcttaatgcatcttttactatgaatgtaccgatgaaaaggttacctgctgcaattggcatcttaactttttcgccaaaatctcctgtactctttgtctctagtcgaatacctttacctatataaccttcagtttgtaaagttgggtaatcaaagggggactttgccataccggtaagtttgaagcccggatttccactcgcccattggagcgtttctccttgttgctgattaaattcataaagttcatggtaatcggaacttccatctactaagttttcgaaatggaaatttgtaggaagttcagatttgattacagtaatggtatagacagcttcagttgtttcactttcagatgtaactctgaacttacgttgatactgttccaatgtttgttctggagtaatggggatctgtgaagtagaaaagtcatatttgggaggagcatcatttgctattgcattaacaggttctatactagctccgtctggtaatgtgaatttaatttctaatgcagataagtctgtagacttagatacataaatagaagctgttttactactagggttaatagtggataattggatgttagtaccgctgcatccgtctatagctgcttcgacattcaaagcttcatcttggatgcaggaaaccattgtcagacataagactattccggctgatacatttcttagtttcatctgtttattcagaattaatggattattcgtatgcaaaggtagataaaagagttgaatatcaattgacattgaatgttaaaagaaaaaatggggttgtgagaatgatatggcaactcccgttctgtatgctggatttgttttataacatgtatgtcgctgtttgatgaacaattcgaaatttttcatggagtctctgtattatatcgggaaaatcctgtcatttcccatataaccgttcagttcgtaaccttttgcggaaccatactttgagactgtataaaaaaactcccgctttcacctaagggaaaagcgggagtttttaataaactatagcttacttatatcttatgggctgattatacgataccttgtgccatcattgcttttgcaaccttcataaatccggctacgttagcacctttcacatagtttacatatccgtcggcttcagtaccatactgaacgcaagcttcgtggatattcttcataatgcttttcagtttctcgtcaacttcttctgcactccaactcagtttgatagagttctgagtcatttcaagacctgatacagatacaccaccagcattagccgctttacccggagcataaagaatcttagcatcctgaaatactttgattgcttccggagtagaaggcatgttagcaccttcggaaactgcaattacaccgttggcaaccaatgtcttggcatcgtcgccgttaagttcgttctgagtggcagaaggcagggcgatatctgctttttcgccccaaggacgagctccttctacatatttgcaaccatatttctctgcatattcgcggatacgaccacggtagaggtttttcagttccatgatataatccagcttttcgcggtcgataccatccggatcatagatgtaaccgtcagagtcggacatggtcagcactttgccacccagttcaagaactttttctgctgtgtattgagcaacgttaccggaaccggaaattaggcaagtcttgcctttcaagtcagtacccttagttttcagcatttccattaagaaatagatgttaccgtaaccggtagcttccgggcgaatcaatgaaccaccaaattcgcgtcctttaccggtaaatgttccggtgaattcatgagtcagtttcttgtacataccaaacatgaaacctacttcacgaccaccaacaccgatgtcaccggcaggaacgtcagtctcaggacccacgtgacgccataattcaagcatgaaagcctgtacgaaacgcattacttccatatttgacttaccgcgcggagagaagtcggaaccacctttaccgccacccataggcagggtagtcagtgagtttttgaatgtttgttcaaaggcaaggaacttcaagatagaaaggtttacagatgcatggaaacggataccgcctttgtacgggccaatcgcgttgttatgctgaacacggtaacccatgttcgtctgaatgttacctttgtcgtccatccaagtcacgcggaactgatatactctatcaggaatacacagacgttcgatcaagtttactttatcaaactccgggtgtttgttgtattcttcttcaatcgtagaaagtacttcttctactgcttgatgatactccggttcattgggaaatcttcttttcagatcgtctaatacctttgctgcattcataatctttttttcttttattggttgtttaaaattcgattatctatttctcttatgcggttgcaaaagtaaagataaaaattgaactaacaaacattttataaagaaaaatgcgataaaacatcaaatttgatattttatcgcattaaaagcagaaaaaaagatatttatttattctttttgatcgacttatagacaggaataaagactaatgctgccgaaatgacaagcattactactgtcattccgtcaattcgttcggcttttgtaagaaccaaatagcaaagagccagccaaagtagactgatacaaactatttgtgattttgataacggccttctcatttgctttcctttttcttcttgtctacgatagcatcaatcacggctacggcggtgatattgacgatgtcgcgaacagagctttcgaagtcggtgaaatggataggcttgttcaatcccatttggataggcccgataaattctgtgtcagggtccattgcttgcagcaatttgtatccggcatttgcagaactcaagttcgggaaaatcagtgtgttcacatctttacctttcagacgggtgaacggatacttggcatcgcgcaactcacggttcatggcaaagttgacctgcatttcaccgtcgatagccagttcgggatattcttcctgcatatatgacaccgcttcgtgcactttgacagggctacctgcggtgtcggcgccgaagttggagtatgacaacatcgaaatgaccggtgtatgattgaagaagcggactgttttgtcagacagtttggcgatatcaatcaatgtgcttgtatccgggtggcggttaatcaatgtatctgccaggaagtaagtgcctttcttggagttcaggatatgcatggttccgaaatgtttgaatcccggttggatgccgattacttctttggcaactttgatcgtgttgctatatctcgtataaagtcccgtgataaacgcgtcggcatctccggtttcaaccatcatcataccgaaatagttacgttcgaacatcttgtcgttggcttcttcgtaagtaaagccttcgcgtgaacgtttctctgccagaatgcgtgcataacgttcgcggcgttccgattcgtccgggtggcggaggttgacgatttcgataccttcgaggctgaggtcgagttcttccgccagtttgccgattgcttcgtcgtttcctaataagataggatggcagataccttcggctttcgcttcaacggcggctttcagcatattcgggtgaatgccttcggcaaacactacacgttgcgggtggcggcgggcggtgtcatacagttggcgggtcagtttggattcatatcccataagttcgcgcaagtgtacgcaataagcgtcccaatccttgatatcggtacgtgccactccgctttccatagcagctcttgccacggcacaggaaacttcggtgatgaggcgtgggtctaccggtttcgggatgaaatattccggcccgaaagaaagattgttcacgtggtatgctgcattcacgacgtcgggtacaggctgttttgccagattggcaatagcgtgtacggcggcgattttcatttcttcgttgatcgccttggcatgcgtatccagagcaccacggaagatgtacgggaaaccgattacattgttaatctggttcggatagtcggaacgtccggttgccattaatacgtcagggcgtgctgccatagcgtcttcgtaagagatttccggtgtcgggtttgccagtgcaaatacgataggcattggagccatgctgcgcaccatgtcctgactcagcacatttccttttgacagtccgaggaatacatctgcacctttgattgcttcttccaatgtatggatatctgtgcggtcggttgcaaaatatcttttctgttcattcagatcggtacgcgccttgctgattacgcctttactgtccagcatgacgatgttttcgagacgtgcgcccagtgatacatataatttagtacaagatacggcagaggcacctgcaccgttcacgacgatttttacatcttcgattttctttccggccacttgcagggcattcaccagtccggcactggagatgatagccgttccgtgctggtcgtcgtgcatgacgggaatgtccagttcttctttcaggcggcgttcgatttcgaaacattcgggagctttgatgtcttccaggttgatgccgccgaaagtaggagcgatagctttcactgctgcaatgaatttttccggatctttctcatccacttcaatatcgaacacgtcgatacctgcataaattttgaaaagcagtcctttaccttccattacgggtttgccgctcaatgcgcctatgtcacccagtccgagcacagctgtaccattggagataacggcaacaagattgcctttagctgtatatttatacgcatcttgcggattcttctctatttcaagacaaggctctgccacaccgggagagtatgcaagtgataagtcggtttgtgtactgtaaggtttggtaggaactacctcgatcttaccgggtttgccctgtgagtgatagagcaaagcggcttctttggttattttagccatggtatctgtatttttattaataagttatcatttggctgcaaatgtaggaataaaagtttgaatctgtcgtctttcggagataatttctattaattttatagcaaaatgactaaaataatgagtcgatatgtaatttgactgtaattgtgtcctgtttccggtcaataagtctgttcgctcgttattttattcgcaattcacatattttgaggcggatacaccaaattgactcttgaagtgtttcctaaaagtttcataatcattatatcctaccatttcagtaatctctaagattgaatatttgcgcattgccaataaggaagctgctttgttcatgcgcatttttcgtattaattctgtaacagttaggtgaaaatgttcttttacctttctatataatgtaggttgactcatacaaagtgtatcggccaatatttttacattgaagttctcatttgctatgttatcttctatcacgttgatcactttctgcatgaagatatattggttagactgtttgaattcattgttggtgttagattgttgagggacgggggcttccagataatcagaaagaggatagtctttttcttctgatggattgtttaaattactgtcttcattgtctttaccataatttgtcccttgttcttgtacatgtgacaattgatctgcttgttgatgttgtagtttatagatggcgatgccatgttctaactcagcaattagttggtcacgttggtgtttccttttaattgtaaatattgagtaataaatacctccaatgattactaacaatacaaagaaccgaaacatccaggtttgtgtccaatgtggttgtatgttgatttttaaggaggttatatcttcctctttgactgctttttggttttttatctgaaatgtatagtttcccggtaataggttagcataagaaattttctctttactattacattctatccattcattttgataaggtatcaacctgtatacgtatttttgcgcagtgggataaggactgttgctgaatgataatgcaaaatctctgtttttgtgtgacaaagagatgtaatctgtgtactcggctgttttcgtcaataccatttgtccattgacgggttttcccggaatcagaggtttgttattaacctcaatacctgtaatgattattgggtttttagtatttgctttaaaagtgtttattgcctgttggggtgagaagaaaagtaggtgcttgttacctccccagcaaagcatatctccccaaagagccacagaacggctgcttccggaagcataataattataaaactgatttatggatttgtcatagcaactgaaccctgaattagttccaatccatatatagccttgtttatcttccaatagacaatttatccaattacttcccaaaccatccatggtggtaaacacttgttttacagttgtctctccgtgtgctacaatccctaatccattttgatagcctacatatacggttccgtcttttgctgctaatacagtctgagctgtatatgtatgtttgtttgtcggaaaatgttgtatatgttgtttgttgttggcataatttagttttaatagccctaaactggtagctatccacaaattgccttcattgtcttcagctatatcaaatacacagtttacagtctgttttaattttacttcctttttcttttttttgtcacagtcgtatagaaataggccattttctgttccaatccaaaagtttttcttggaatctgtaaacagtacattgataggggtgtcagttacattatacttttgtacttcttttttttgtggagaataaaaaacgagcattccatttttgtaaccgaaccatatattcccatctttatccttcatgctgcatagtactgtttttctatctgtttgcgataactcacgtaaaccgaaatcttttaggtcatataatggtggagtgtaaaaaataccttgttcataagttgacaaataaatcctcttttcatcatcaataatgatgctttctacttcattgtcttctttgaaattgtattgtttgataaaattccacttccagtcggaaactaatacgcctcctccgtgtgttccgatccataaaaatccatggggatcatagtaagaagatatcatgcgtgcttcgaagtttaatgactgccacgttggttcgctggtacgtatttctgtagtccatccacctggaatgttattatcggccaaaagcatagtatatccataccatgttgtagcaaggatagatgaatctgaaatgggaatgatgttgtaaacatcgttatgggacaaatgagtgggaaatatattttgttgattggcaatatgactgaggttttccaatgaagtatccataataaaaatgccatgtaacattgaggatataaatagtttcccattgtggcatacaaccgaagaagctccaaactcatgttttgtggttaacaaacgtttttgctttaaaacgcgtcctgtgctgatctctaataaaagaacgcgtgcgctgttagtcactaagtagattttcctatggttattggttatgcagaatttcataaatcgctctccttttgccatttcaaacgggtaaactttttctaattttgaaaaaggatgaccgttttggtctagcattattctgaagctgcttaacgtctgattatcgcaagcaaagagagtggagtcattgagcaaaagaaaatctgttacctgataatctttgttttttacaagagtatgaagtcttcctgtgttttcatccttacaatccatgtatgtgatccaatcattggtctgcaaatataatatatgtcgactatcctcttctatttttcttacattcatgctaaaatattggtctagtgtgtaattagtaaaatgattgccgtcatatttacttaatccagtgcttgttcctagccacattatacctttagagtctttgtgaatggataaaacagtgttgtctttaagcccatcttgaatggttaactgcttaaaatttgtatggtttgtataaaacggagatatcgctttactgtttaattttcctaatagtaatcctaaaatgattaagagatataatttcattactttcattttcaacttaaattaatgattgtttcctaaaagataaaaatagtaacaaaaagtatcattttgtgatattttatataattaccactgtgtttttcgagactaaagttacggaattttattaaatgaaggatattttctgcaaagaatttgtgttgtatcaggaaaatgtgtggcgggtagagtgaaaagagaattgtaatgtgctcattgcagtatattatattttgaaaagatttcattattgatgtcgaaattattaataatgaaataaagagtgtagttgaattatatcgaactcgcattatactccagtagctaaattgcgaagaaaaatatgatattcttttgatgagaatagctgtagaggcattattgatagaaaaaaggggggaaattgataaaattacgtggggtgggcaacttgtacattaactaattttgtgcccaagaacttaattctaataaagctatattaacaaaaaaatcatttgcctatgaaaaacaaatccggcccttaagccatacggttttaactcaagtaatataaaaagtattcatgatttaaaatttaagactaatgatgcaaagtaattattatcaccattattgtctatctcaattattaaaaaaagggctacttgtgatatttatatccttgcctattttgggaatatcagccactacgacgatagacgaaaacaattttaatgtgctggaacaacagcagagtcgcaaactgagcggtgtagtaacagacgacaacggagaacctttaattggagctactattttacaaaagaatacctcgaacgcaacaatctctgatgcaaatggtagatttactgtcaatgtgtccggtgattctccggtgattgaggtatcttatgtaggatacttgactaagactattaagattggtaaccgcacttcgctaaccattaaacttcaagaagatagtaaacttatagacgaagttgttgtagtggggtatggaaagagctctgtgaaaagattaactagttctatatctagtgttaaaggcgatgatttggtaaatatgcctaataccaatattatcagttctttggaaggtagagcaaccggagtctttattcaatcggcaggaggtgagccgggggcattacctagtatttctatccgtggaggtggagaacccttgtatgtaattgatggtatacctagtacaaaacaagagttttcggtgctttcacctagtgatattgaatctttttctattttaaaagatgctgctgcagcggctgtatacggtgcacgggccggtaatggtattgtgatggtcacaaccaaaaagggtacaaacgaaaaaatgacaattagttataatggttcttactctttaagttcacctacacagcctattgaattcctcgacaactatgtggttgcagagttatcagacagggccgcggtctataataacggaatgcctacttttatgaaagtggatgcgaatggtaatttgtattggccggaaggtgtactggacgctgtgaaaaatggtactttcaacgatgtgacaggaaacacggactggaatagcttgttattccacaaatttgctcctatgcagtcgcataacatttcgttgaatggaggaagtaagaacactcattattttatgtctgcacgttattacactttaggaggtatttataaaacagatatttctaaaaatgatcgtttaaatatgagaatgcatgtggaccactatttcgatcaaataggattgagactaaatggagatgtttcttttagtcagaacaaaacacaatatccccctaatggtttgtatactatttggacacatgtggcacgtttaaattctttggctagatgttttaatagtgcaggtcatccgacgggtggtcaggaaaatccatatgtggaaattgatccgactgctggatatagaaaaaatgatacccgctataccaatatgagtttgtcgatgcaatgggatgttcctaaagttaccggactgagttttggagcacttgtgaattataatctgtatgatagttttaataaggattggcgtgctaatgaagcaggcgtaggacctgtatgggaatggaatgatgaacctactaatcttggaaaagctcgtttggatgaagatatgtaccgttccaatgaggtgacttttgaagcacgggcagattataatagaacattcaaagaagctcatacaattggggcgactgctgttttcaactcttggaagtacaattataacgaattgggagcattgagaagacaatatgagactagcgttattgaacagataaacggaggaccaagttctacagcggaaaacaacggtactgcaagggaaaatggacgtatgggattggtaggtcgtttaaaatacgattataagatgcgttatattgtagaagctaacttccgttatgacggctcggacaagtttcctaaaggccagcgttggggattcttcccatcagtttctgtggggtggaatgtagataaagagcctttcatgcaacctttattgaataacaattggtttagcgccttgaaatttcgtttctcatggggcaaaataggcttggatgacgtaggtaattttaaatatttgtcggtgtataataagggaaatgatttctacgaaggaggaaaatggaattctaccttgcgtgaaggtgatttagttagtcaggatttgacatggtatagcagaaatactatcaaccttgctgttgatgcagagtttttccaacaacgtttatctgctaactttgagtatttctattatcgtacgaccaattatttagctaatcctaaagatgcttataccacaccgttggggactgctatgcctatggttaagacaaattcggctcatcgtagagcggggtatgaattaaatttggcatggagagataagatagcacgtgacttcaagtataatgtgggacttaatttgtcatattataatgaactctgggaaaggaaatatgatgaacaagaatccgatttgaagaatccattacgtcgtctcacacaccaaaaatcatattttgacttattgtatgtctcaaacggactttatcaaaatatggaacaaatattggatagtccccgtcctcaggcctctaccttgttacgaccaggtgatatcgcttatcaggatatcaacggtgatggtgtgatagatactaatgaccggatacgtcaaggtgctccacgattcccgcatttgacttatggcatcactttgggagcatcttataaaggatttacacttgacgtattgttacaaggtacaggtgcccgaaatatgttgttggaatcattcaaccggaagtttaatacaaatcagattggtttggcaggtagtgaaaaattctattatccgggtaataccggagaaatactctaccctcgcttaactaataatgcacaagaaaacggggggaacaatgatatggcttcaacttattggttgctggatgcttcttatcttagactaaagaatgtcaaatttagctatgacctgaaatacagcttgttgaaaaatttgagctttatttctcaatttgagctttatgtaagtggtaacaacttgttgactttctctccggttaaaaagtatcacattgacccggaagacggtagagatgatgagtctatgggacaagtaggttatccggtgcagaagattattcagtttggagttaacctaacattttaaataaaagggaaaatatatgaaaaaatatttatatatagcattgataatggtgtgtggactggcatcttgtgatgtgcttgatacagaaccaatggactcgtacaacgaacttttaatatggcgtaataaagatttggccgaaaatgtgctgagagaagcttattggacaattcttaaggatttgtattgttcgggagataataatacagaatgtttgcgtacagattcgtggacagataatgtttggaataaggataacaactctgtagcagcggaagctatttctcctacaaatattgaaaataatataggaggttttaataaatactcttatatccgtagaacgagtcttatcatagaagaattgactaacaatcctgatattgacggacaaagttgtaaacagtttattgccgaagctcgttgtctgcgcgtaatggtgtatagttggatggtacgtcgctggggaggagtaatgcttgttgataaactgatgactcctagtgatgaaatgttaatgtctcgtagtacagaagaagaaatgtatagatttatggtcaatgagttgaaacttgcgattcccgatctaccctcaactgccaataaagagcgttttacaaaaggagcagcactcacgttactaacgcgtgtatcattggaaggcggtctctatgatgaaactattgctgctggaaaacaactgtttgaaggagaggaagctgctaactggagtatagaccctgaatatcgtaaaatgttcggtagtttttcttatccggaaacgagtccggaaattcagttctattttacacaaggtgataaaaaacagtattgtgagaatttacttcctatgtatgttgccggtacattagcacccggacgaaatattatggggccggcttttaatgataaagtggatgcatggtgtgctaactggccctcccatgaactgacagaagcctatttggcaattgatgtagagggagaccaaactgcaaaacattatacagagacagcaaaatggaaaaatgctccggtaaagactgcttccattatgtatagtaacagagataaacgtttggatgctactatttgttatgatggtactacttatttcacttctcctattgagatggatactaaaggtaattgctactgggaaaatacacagaatcatggttttatgactcaaagtggatatatgtggcgtaaatacatttatgaattggacggtacagatgcacttccgggataccagatcctttatgattttcgttatatcctatttagattgggggaagcttgtcttaactatgctgaggcgcttggccgcaagggagaaatagacaaggctattagaatgatgaacatgactcgtactcaacatggtggattacccgctttgccggaaagttcttcagaagcagatttctggaaatattataagatagaacgtcgggttgaattagctttggagggtgaccgctatttttctgtcattcgttgggcaaaagtggaaaatgcaacctccgtatctgagtttaacaaacgtacccactgtattattattgatggggacgatgatacatttactttaattgataccagtcatggaagttcgacaggaagcgaccgagtgttctcttggcctagacgcatgtatttcccgttgcctgaatcagaactcatgtctaatcctaatttacaacaaaataatcattggtaatgaatatgaaaaaagttatagatatctcttggctaagtgcctttacgttcttcatgttattgactttatcttcttgtttggaagcagggctggatgaactggaatcttataatgacgcagagatcagaggatttaagtttgaacatcgttgggaacaaactataaatgggggaaataacactcaattgggtgtggtttcactacctactaatgtaaaaatagaaggaaatactgtttattgcacaatcactgttcctgaagctggaaatcccagttttttcactgaggaggtacgcaataatgtaaagttggaaaagattgtaggtattgctacaatttctaccgcatctactatttatccgctagaaggtgcacctgccttaggcaaatggggcgatttttccaaagtttccaaatacaaggttgttgcagccgatggtaaaacaaccaaagaatggattatacaatgtacgttgataaaatagctccaatagataatcagtatatataattaacagaggggataagcattattctgaatgtcctgtcccctcttttttattctaaattttataaatgataaagtttccatgaaatatatatttgttacgtatattctattggtagcagtatctttgcaggcccaaaacaaaaaaatggttttagaaagtggtagaacctattatgtttatacttgccctgacgcccccaaagtcgtaactcatgcagccgatgaattaagcaaatacatcactcaagtatttaaagtttcatgtgttcgacattctgcttcattggatcgacctgaaatgttagtatttactaaagagaaagatagtacaggatacgtactcccggcgaatattgcacttggtgaagatggttattacttaaacatacaaaaaaatgcagttgtcatcagtggacaaaatggtagaggtgttctatatggagtatattcttttttagaaaaatatataggatgtcgctggtatagctctgaagtttcttttattcccttattaaataaaaagcaattaccttttatagaagaaagctatacacctgttgtgaaatggcgggaagtttattattatgatttgtgtgatcctgttattgctgcacaactgaaactgaatgggaatatgcttcgaaaaggactgacagctcctaataggtgggctataaaaggtggtcgtcatgctgattgggggctgtggtgtcattcactctatgatgtggtttctcccagtctttatgatactcatcctgaatatttttctgaaattgagggaaaaagaattcaaccacgttcggaaggaacacaattatgtttgactaatccagaacttccttatcatgctatcaattctttaaatcgactgattcaaaaaacacaggcagaagttcctgtatgggctgattcattagcacattattggagtgtgagtcaaatggacggaagagggaactgtacttgtcagcaatgtcaaacatcagatttgtatgatggaagccccagtggaacgatgttgaaattcgttaatcaaatagctgagcactttccgcacaaaaaaatagcgactttagcttatacttacactagaaaggctccgctatatactaaaccggcatctaatgttgtaattcaaatgtgtgctatagaaacagcccggcaaggtattaattttcctatcgctacttcaaatattcatgctacatttagaaaggatttggtagactggggaaagatttgtaatgaaatattggtttgggactatgttatccaatttcaaaacttagtttcaccatttcccaatttcagtactatgcaggacaatattaatttctatatagctaataatgtttcagctgttttttgtcaaggaaatagggaaaaagggggtgagtttgccgagctacgtggttatttgctagctaaattattatggaatccacaatgtgatatgaaacaggagatggatgattttttaacagggtattatggtaaggcaggagtttatatcaagcgatatatcgctgacatggaacaagcattaaaaaaatcaaaagccatactttctatggatggtgatcttgaagctcatcgtgaaggttatctgtcaaaagaatgtatagagcgttacaaacattggtttgatttagctgaaaaagctgtaataaaccaaccggatgtattgaaacgggttcggaaagagcgaatggctataatgtatgctcaaattcgtttggaatatggcacgagagaagaacgcaaacaactgcttactcaattaattcaactggctgaagaaaatgatatctggatgttcagtgaggtagataatcgtaatgatcagagtggaaatagagagatgttctatcaaaagtatagataaatttgaaattatgagaaaactgttacttacattatattatctgtttgtggtatgcttgggtacttctgcgcaagaaccgtgtccttgtgttattcctgctttgcagcaatggaagggaggaaatggaaaattgctcctgcctgctgaaggaagtatcgttgtaaatccagccaatgaagcagaacttttatccactgctcgtatattggtcgatgacttgagagatttaatgaattggcattacatcataaaaacaggaaaaccacaaaggaatgatatttatctatcgttgataaaaccagacaaacagttaggtgacgaggggtatgtgttggctacaacccattatgtcagtattgaggcacctactgtgaagggactcttttgggggacacgcagccttttgcaaatcttgtataatcagcaaggtaaattgccgaaaggaacagcacgtgactttccgaaattttcgagtcgtgggtttatgttggatgtagctcgtaaatttttcacgttggattatttgaaacaatatgtcaaaatactttcattctataaaatgaatgagttccagatccatttgaatgacaatggttttccacaattctttaacaatgattggaagatgacctacgctgctttccgcctggaaagtgaacgttttcctggattgacggctaaggatggttcgtatactaaacaggaattttctaatttacaacgtatgggaatgagctatggagtaaacgttattcctgaaatagatattcctgcacactctcttgcttttacgcattacaaaccggagatcggcagtaaggaatacggaatggatcatttggatctttataaggatgagacttatcattttcttgatacgctgtttgatgagtatctttctggtgagcatcctatattcattggtcctgacgtacatatcggtacggatgaatataacaagaaggaagcggagcaatatcgttattttactgatcgttatctgaagtatatcgaaaaatatggtaagaaccctcgtatgtggggtggcttgaaatggctacccggtaaaactcccgtaaaggcaggaggagtgacagttaatgcatggtcgtatgactggatagatcccgaagcctctttaagggagggatatcaactaataaacacatgcgatacttatctatatattgtgcccagagctggttactatcgtgaatttttagatcataaatggatctatgaatcatggagtccatggttgatgaatagtaagcagacgcttcctgaaggaactccgggagtgttaggtggaatgtttgctgtatggaatgacatgtgtggcaatggtatttctgaacaggatgtacatttacgttcttttcctgctattcaagtgttggctgaaaaactttggaaaggagataacaagattgtttcttacgaaagttttgaagccttatgccgcataatgccggaagctccgggagtgaatttattggcacggattcctaaagaaatgtgtctgactcctttaggaaaggtgtgtttattgagtgggacggatactattcgtactgctttgcaggaagtgggttacccttacgtagtatcatttaaaatttatccggacaaggataccaatatcaacggaattctatttgaaggaccacattccaaagtatataccaactgggaaaataccggacggattgctttcagtcgtgatgggtatacttttgttttcggttcttattgccttccgaaaggaaaatggacagatatttgtatttcaggggattataaaggcacatcactatatgttaatggcaaattgcaagaacgtttagaaggacgtaaaatgaaagtttattgcaaaaaaaacaagcgtatggattatatgccttatcaggagacgttaatcttccccttacgctggattggcaatccgttgaatgggtttaaaggaaagatacaaaatgtgacttgtgtacagaagtaaaaaatcaatcactatcaaagagtaaatgtaaaatgaaaaatatagtttctgctttaattgttttgttttgtaatgtatgtgttatacaagcttcttccctttttaaaattgacgataactatctgagtcagcatgatattgtctatctggaaccggagtttgacagtttcaatggttttcctcttggtaatggagatctcggaggtatgttatggtttaccaacgagggcattactttacaaattaacaaaatagatttatatgataaaccagctaatgggaggatgactttgcgttcggcgggacggttaaatgttaatttaggtgtaccgtgttatagctatatgcatctggctgattttgaagctcgtttatctctgcaaaacgcagatttaaagattaagagttcgacaccgtttgccgatacggagataacatcttgggtagatgcaaactctaatgtctgggtgatagattgtcaggctgattataagaaaacattgccttctggagctgtaaatcgaatttctttggagcgttggggcagttgtgactttggaggatggtatggttcacgtgaccgggatgtggccaatggattaggtactgcaaaggtgaatagacaggaaaatgacatcattttggaagaaaagtctgaaggtggtcttcattttactattgcgtgtcgggtacttgagaccccgacagagattctgcgtgtcagtgatcgggaaagctcaatgattacacctttgtcttctaaacagaaatataagattttaatatcagttgtcagttctaatgattcggacaatccgactcaagaggcaatttcattactggataaagcggaagtaaaaacgtttacagcgcttcggaaagaacatctcagttggtggactcacttttggtcgaagtcattcgttcatctggcagacaattatctggagaatatttattatattcgtcgttatcttatgggaagttcttcacggggaaaatatccggtaccatttaatggcgggttatggactactaattatgatcatcgtcagtgggctacaccccatcactggaatacccaagaatcttattgggggcttgctgttcagaatgattgtgatttattacgaccttatattgaaacttatgtcaatatgattcctcaaggaaaagcattagccagaaagaaagggacaaaagacggattattaataactgaggcgcatgatttttccggtaacatggttagtgctaattggggaaatatgacaacgaattatactccggccagtcagataagtaaaataatgtgggagtattatgcttatacccaagaccgtgactatcttaggaatacaatttatccgtttatgaaagaggctgcagaattctacttgaactttcttcagtgggatgatgtccgaaaagaattttatatttatcctgcacaaccttacgaacatgaatggagtagtaaattaaagaatacaataacagatagatacatgattgagtcattatttaaaaattgtattaaagctgctcaggacctaaatatggataagtcaaagataaaacaatggaaacatgttatatcacatttatgggctcctccgattttggatgtacccgaaaaaggaaaggtatttggattggcgtttacagaaaataatgaagtgtatccggatgcgaaaacaaatatacaaggctatcattttgacgcacatactacagctgtttttccggcaggtgtgcttgggttggatcataaagggaccgattattttgaaatagcccgaaacattgctttgcatcatccgaaaaaccggaatgctattactcccggagcgattgtttccgcacgattggggctgggagataaagtgttggagcgtttgcaatgtagcgttaattatttgcagcattttaatcaagggctattttacaatttagaccattggcattatttttctcgttatgttgatcagattcctaatgccgaattatatgctcagcgtgactatatgtatgactcaagattgacttacaatcgtcctgaagccggaaaatcgggctttcggacaaagcctttcgttcaatgtggtatggaaacaatgggtattttaggtactgctatcaatgagatgttacttcaaagtcatgaaggaaagataagggtatttccggcgataccttcgaaattcgcatctgcttttactctacgcgctgaaggagcttttattgtttcctcggttatagatagtttagggaatattccatttgttgagataaaaagtttagcaggaaaagaatgtcgtatacagaatccttgggatgatgatttagttcaagttgtcacgcagaataatcgaaatgtaaatattgaagtcaataaagataacgtgatttcttttaaaactacaattggggagtcttatatagtaagaaagaaaggtatcgatgtgaatcatgtatcaaaaacatatcatgctgtacctaatatgtttccaaagaaatatggtgaggctatgttgggtaaagagtgtacatttatagatcgtgaacactaacttgattttataaatatatagatatcgcttgtactgattattgtcaagaaaagcggctgctcctgtatttgggtgacagtcgctttcttttaagaaactattttgatgtcattcgtatagttagttatttatcttttttgatgtcccttgtgctgtacgccaaaaagagttttttacatcacgtgccacttctttccagcttggcatgcttttcaacgaacggcgcaccgggaaatcataaagcagcaacagcaggaataagaagatacaggcataagccacccagccataaatctgcttgatgctcacttccatcatctgactgataaactcttccatgtaatggccgagattgaacggactgctgctgaatgatacatggtcgattgccgccccgtagcgtgccaggttatcaggaacgtaataagccagtccttgtgcatagatcgcgcaacccaatacaccgccgactaccatgtgaagcatattgaatacacttaacgattgaaaaaaatgttggaaagtcatgatttcttccaggcagaccataaaggtggcgcttaataccgcataggcgaatccccggcatattgtcggaagataaagctgtgagatgtgaatatcagtagagattgtcagatagaaccctatcagatagccgataagccctaagaaaccgacaatgataagacgtacataattatagtgtttgatatgcatccaccaataagagaatacgcagccgattactataccgataatagcaaaccacgccaattgcacgcttaccagctcctcatacttcatcacttcctcataaaaaacttcttccaatacatgctcggttgccagaaatgcttccactagtgtgattagtcccaataaaggtaagaggtagcggtaactccacattttaggctctaagaacgggtgacggatagtcagcatgcgccagatgcaaaaaaacagggttatcaggatagctaccgacaactgacggataaccggactgttccaccagtcataccagtcaccgtagttgaagaggaaagctatctcggccagcaatgccgcccataacgctgcccccagccagtcaatgccgaacaacggaaacttgcgcataaaccggaaatgctttacgcaaatagtctgtatcaacaggactattatcatcaatcctgcaatgaaaagattcatatatgtccagtgataatgatacatcagataagtcgttatcaggtcggacaactggatgcttcctaagacgacgatgtgaagccagggaaagaaaacggtaaaatcccgtttgggcgtcatccacaactgaatgttggacatacattcaaaggttccctggattttgcacatgccttcgatgaaacatatcaaccacaatagcggaaggaaagtaatatgcggagcaatcaggttacagaccaatacccccaatgcagccgatgtgagcaacgtcttatttgtaaaacggaacttcatgcggaacagcaaggggaagtagatagccatacctgcgagattggcgtacatacacatcaatatatcctcacgcatcaacgccattcccccgatcatctggttcaatgctcccaaatacaccccgcccgaaagttggaaagtaacggcaatgaacagataaatccacggttgtatcttccgcggtacgaagctacggaacatgggcatcacgaaagggccatttaaaacaggtgtttccatacgttaatatttcacctcacattctacattgaaaccggcacgcaagcgttttaaatctttcggcttgtttcctttcaggctgatgcggacggggattcgctgttctacctttacaaagttcccggttgcattgtcctgcggaatcattgagaaagccgctcccgtagcatcggaaatggattcgacgatacctttgaaagtgacgcccggcactgcatctgctgtcatttccacatctgcaccttctctgatattggaaagctgggtttcacgataattggcgattacccacaaatcgctgctgtctacaatatccaccatggtctgtcccggttgaaccaactgaccctccagaatctctttctttcctgtggtaccgtcacacggggcgatgataaccgtataggaaagattcagacgggcaagctctaaagctgcttctgccaggcggacacctgcttcgttctgtcctaggcgatgtgtctgttcgcttttcactaaagacgtagattgtttggcacgcgatacctgttcgtaacgggctttggctgtttcataagccgtatgcacattatcatattgctgcttcgtcacagcatcttcctgcaataatttctcaaaacggttcagttcacgtttggcattttccatttgtacgcgtacttcttcaatacttgcgtcacttacgctcaggttgttttgggtagtggcaatgcctatggtcgttgcctgccgtcccgcagtggcattggccaaatccgcttccgcctgtgctacacgaagacagaattccgcatcttcaataataacgagcgtatcaccttttcgtacctgctgatattcttcaaagcatatcttcttgataaatcccggcacacgggtattaataggtgtgatatgttgtttcacctgtgcattgtcggtatattcgatgtttcccaaatgaatgaaccgggaacaaacataagtggcaccaccaatgagaaaacaaagaatcagaatgttgtatataatcttttgagtctttctagctatcataatctgttctatttaaaagggtatgagtaattgattttcaattaaagggtatgtgtgatatatttcattttatagaaactgtaaaccacgttgatacgtgcgttgaccagaccgaggtctgcgcttaatttcatgttgctggcatcgagcatgtcggtaagtaatgcaaggtcattcttatagcgattactggttacgtcgtaattctgattggcaagctccacgcttttctcttgtgtgcgaaggtcggtaaatgaggtcaggaaattgacataattggcttggacgccgttctctatctgttcctgcgctagtgaatattcttcctgtgccttacgcatattcagttttgcctggcgtactttcttgttgttcttgaacagtgatgaaagattgtatttgattcctacccccacataccaataattgaagttattatccagcacggggacttcaatagtgataggcccgtccagatgctcaccggctacgagagctattttcggaagaagttccgagcgttccagtttgactttctgtttgctcatcttcattgccagttgtgcttgctgcaaaccgacattgctctgcgaagccagtagttgccagtcgttttccgccagagccttcacttcttcgtccagtagggtggagtcggggatgatttccgttccggcaggaagatgcagtgtagtcaccagttggtgattcattattttgcatgcatcctttactttggctaattgcagtttcaatgtctctttttgtaactcataacgggtgatgtcatttttcagagctgttccttgtgtgcgtcgggcttccatattgcgaatcacctgttctgtcaaatcgaggttcttctgcaacacttgtacttggttattcaacttatataaatccaggtagtagccggtcagaagaaaacgtatctcctgccggttcttctgccagtccagcgcagccatttgctgactgagttctgctaaagtaatactgctgctgatagcaccgcctgcataaatgacctgttgtgcttccagcgcaaagttattaccaaaatgaggcattggaatgttctgcccgttcttgaagtcacggtcccacagatacccgtcacccaaataactgaaggagagcgatgcgctgatgtccggcaaacgttgtgacttggcagctttcaaagcctcatcggtaacttccttcccggttttatacgtttgaatactctgactgttctcgtctgccagacggaacatctcgttaatgcccaaaactttcctggtaagtgtttgggcaaatgaaccctgactgcatagtactacgcatagcggtactatgagccatctttttttgctcataaaataaaaaagaaatttagttgataatgataaatatatgttcctatatcatgccgcctccaaagaagggaagccagcatttcgcatcgtggcgagtagttcttatagaaataatcaaatctgcactgctacaccccaaccgtggaagtcatgcattttgttctcgtagcgaatggaaatttgataatactttagtttcatcttgatacctgcttttctaattcggtttgcaaaattatggaaaaaaacaggtaagttgtgaccttgtatatacggaaatataatgttttttaacgatttctgttcggagattcatgtaggagacacggataaaagatctaagagatacaggtggaatatattccctgtatcatcatttcggtagatcggagcagtacttatttcctgcttgtcgaaataacggtaacacttatcataaacaagtggcaaactgcttcaccgagattcagattcgaaacaggagataaggtttttctcaaagtattctcactatgatgagaaaaaattctcatcatagtgagaactttttctcatagtaataagtattttttctcataagggtgagaatacttccttgtcagagcatactggaacggcatattttattgcaatttattgtaaggataataaaaagagactgaactcaaaacggaattgagccagtctcttctttatgatgtaatactgtaataatcagtttttatgcattcagcgcctgttcgatatctgcgataatatcatccgcattttcgatacctaccgacagacgaatcaagtccgggcgtacccctgcttccataagctgttcgtccgacaactggcggtgagtatggcttgccgggtgaagcacacagctacgtgcatctgctacgtgagtgacgatagctatgaattccagtgaatccataaacttgatagatacgtcacgtccgcctttcagaccgaaggagataactccgcaagaaccgttcggcatatatttctgtgctaaagtgtaatatttattatccggcagtccgcagtagtttacccaagctactttctcgttcttggacagatattcggcgactttctgtgcgttgccgcaatgttgaggcatgcgtaagtgaagcgtttcaagtcccaggttcagtaagaatgcgttttgcgggctttggatgctgccgaggtcacgcattaactgtgcagtggctttagtgatataagcacctttgccgaaagcttttgtgtaagtcagtccgtgataagattcgtccggcgtgcaaagtccggggaatttatcggcatgagcatcccagtcgaagttaccgctatctacgatacaaccgcctacgctggtagcgtgtccgtccatatatttggtagtggagtgaacaacgatatctgctccccattcgaacgggcggcagttaatcggagtcgggaaagtattgtcaacaatcaaagggacaccgtggctgtgcgcgatacgggcaaacttctcaatatccagcacttcgagggaaggattggaaattgtttcaccgaacaatgctttcgtattcggacggaaagctgcggaaatttcttcttcgccggcatccggattgacgaaagtaacctcaataccgagttttttcattgtcactccgaacaggttgaaagtaccaccatagatagcggaagaacaaacgaaatggtcacctgcctggcaaatattgaagatagcgtagaagttggcagcctgaccgctggaagtcagcatggcggccacaccaccttcgagggcggcaatcttagcggccacagcgtcattcgtcgggttctgcaggcgggtatagaaataaccgctgtcttccaaatcgaaaagacgtgccatttgctcgctggtatcgtatttgaaagttgtactttgatagatgggcaatacgcgtggttcgccctttttaggcgtccaccctgcctgtacgcacagggtttcgggcttgaattgttttgccataatgttatcgggttttaatgatttatttcaaaaaatgttttaatggcgcaaaagtagggaaaataattgtatttttgccctgtttatgagtgaaatgatactcacgtgaaggagataattgtgtagatatgaaaaataaactctatattcttttattcttaatttttcttttctcgggtacggcactttgggcgcagcagagggctactccgaagtcgggagaaggcatctcgtcttttctgttgaggcacaaccgttctccgaagaagtactacgatgactttatcgaactgaacaagaagaaactgggaaagaataatgtgctgaaagtgggcgtgacttatgtcattccgccggtaaagaaatcatcgggaacttctgccgggaatacagaggctaaaaatacaacagctaaaggtacaggaacccagcagagatcttccaaagctaaaacgactaaaataggaaccactatcaaagaacctttgttcggaaaggaactggcaaatgtcaaagtcacttccaaccgccttgcaggtgcttgcttttatgtcgtcagcggacatggcggacccgatcccggagctatcggacgggtagggaagcacgaacttcacgaagacgaatatgcttacgacatcgctcttcgcctggcacgtaacctgatgcaggaaggggcggaagttcatatcatcattcaagatgccaaagacggtattcgagacgattcgtacctgtcgaacagcaaacgggagacttgcatgggcgatgtgatcccgttgaatcaggtacaacgtcttcagcaacgttgtaacaagataaatgccctttaccagaaagaccgtaagaattattcctactgccgggcaatcttcatccatgtagacagccgtagcaagggaaagcagactgatgtttttttctatcattcaaacaaaaaagcggttagcaagcgcttggcgaataatatgaaagacacattcgaatcaaagtacggaaagcaccagccgaaccggggattctccggaacagtgagcggacgcaatttgtatgtgctttcgcatactactcccgcttctgttttcgtggagctgggcaatatccaaaattcttttgaccagcgccgtctggtgataaattccaatcgtcaagcattggcaaaatggctaatggagggctttctgaaagattataaagagaaaaaataaatataaaacatctttttcgtgaacaaaaccgaaataggaatgttttatatatgcaaatcgcctgatgactacttgtaggtatgcgagtatatatgagtcggtgaatatgcctccccggcataacaggtagattgcatagtagttttgtcgtgttttattttgtgtttgtgttgtgacggtgctgcgatgtgaatcggggtaccgtttttatgtatgtgacagaaagaaatttttgaaacaagtaaatggctgcattaaaaaaagaataagcacgaaaccataatttattccggcttcgtgctcactctttacttatatactgcaatcaggtagtactatttccattcgctgtgctgttccaacatcgggtttgtatcaatctcactttgcgggataggccatactaaatcttgtgctccacgtagattattgcgttcgactgctccgaagccatagaatgacttgtcttcctgcatacgtttctgagcattctcaaaatctttccagcgataaaggtcggcaaagcgtaaatcttcgaaggccagttccacacggcgctcatggcgtacaatggcgcgtagttcatcttgttccagattagttccttctacctcttctacagcaggcatacctacgcggtcgcggacttcattgatatacttggtaatttccgcttgggagtaaccgcctttttcaatcatagcttcagagagtgacaatagtacctctgcatagcggatgacatagaaatctaagctaccgtcatattcgtttgccgtattttcgggagtaaaccatttacggatacagcatgtggagctggcaggtaagttgttagtgtacaactttccgttccattccattcccggaagcatcaatgttgccttcatacgagggtcgcggttctcataacgtcccatatccggattctcttttgtatgagctcctttgtcaaggctacccttaaataaaggagacttgtcaataggtaatccatccgtgcaataaaaatcatcgcataaattcattgatccttcgatggcattcatcggagcagaccagcaaactccaaagcaattaccttcacccagtcccgggcctttgtagtgaacactcagtaatacttcaccagctgtttcattggcttccttgaataagtctgcaaagttagctgccgggtcgctgccgtctcccgatttgaaaagttgtattttaccaacaacgtttttgtaggcatttatagcctcgtcccaatgctggttgaaaagggctatccgtcccataatagcgtaggctgcttcttgagtcagacgtcctgtctgtgcttttcctatcacggggatcttagggatccatattttcagatcttccaacaaagaagagataatctggctgcgctccgttttgggtgcttgggcttctgacagagtgagaggttttgtcagatagggtacatcgcggaaaacagaagtcagattgcaatacatcagggcgcgcaatgctattgcttcagctttgtatgcttctattttttcttgttccattggtatgcgttctacgttttccactaacatattgcatcgcttgataacttcataattggcgttccagtacattgaaaaacattcatcggtggtagccgaggtacattgtgaaatggaactacctagcatccagttaccccatgtgtggtcaccattgtctgtgctggtttcgcgtcccagaaatccgaatttccagccgtcaatgttgtcgtcatataagttttggctttgcatggcgtcgtagcaagcggtcagtgccatcaatgcatccgattcggtttgccaataggtcgtttgggaaggctggttcggagaatctgtctgtagaaaactgtccgaacatgcgctggcagataataacattccggataatagtaaaactctgcatatattttttgtattcttaatcataatatttgtcctccttgtaattagaattgaatgtttaatccaaatgaataagtacgcatattgggatgtacgtcatttcttgtatcacccgatgacttttccggatcccagttcttcaacggtgtgaacgtcaatagattacttccggcaaagtaaacacggatgctggaaataccaactttggcaagttcggcctggcggaaagtatagccgaattccagattcttcagacgtaggtaatctgatttttcaagccagaatgaagaataagaatcgttcatggtgttacctagtgcaggcatgggagcatttatgttgtcagccgaataacggttcacccaacggctcgtgaggttgcctcgaatgtcggtagaagtctcccaactgtaacgatagatacctcccaccccttgccagaaagtagacaaatcgaagtttttccaagatgcgcccaggttgaaactataagagtatttcgggaatggattacctataatatcgcgatcttcaggagtaatattaccgttgtcatcaaggtcggcgtacatgatatcgcccaatttgggagccacaccgttttgtttgataacttcacccttcgagttggtacgttgcaagtcggcttccgtacgatagatgcctattgctttatatccgaaataagcgccaatagggttgccgatacggttgattatattgccgtcaattttttcctccaattcacccatttcaaggatttcattctttacacgtgacaggttgaaaccggcgttccaagcccagtcacctctactgtcggagtaatttacagtccattcccaaccgcggttacggactgcacccacattctgataaggagcggagagagaacccaggaaaatgccgggcatagccagttgcatcaagatatcggaagttttcttgtcgaaccattcaaaggtggtttgtattctgttgttgaagaatccaaggtcgagagctatgtttacagagcgggttgtttcccatttaatgttttcattggggacggatgtctgtaccatacctgcctgcttgtctgcaccttggtcgaagaagtaatttccgcttgcacccaaagtagctgcataagcgtagttaccaatttcctgattacctaatttaccccatgacagacgtaactttccgagagagaagtttctgtagtctttcataaacccttcgttcgagaatacccatcctgcagacaatgaagggaatgtggcataacgattggctttgggcatacgtgaggacccgtcatgacgaatattgaattcgaataaataccggtcatcataactgtagtttacacggccgaagaatgattggagcttatattcttctgattcccccgttgctcccggattgattgtacctcctttgagctcataaatattctcggttgggaaaccctgtatggatgctgttgttttgtagaaacgtgaaccgatgaccgaatgccccaacagtacattgatattgtgtttgtcgaattgcttgttataagtcagcaagttttcatttgtccatgttgcgttgcggtaccaataatcctcttccttattagtctctcctgctgcctttacaatgtttccgtctgcatcatagcgggcaggagatttgggagtgtaagacttagtcgcattcaggtcgaaagcataagcaagacttgtttggaacttcaatccttcccatagttcaataccggcaaacgccttaccgttgaaacgccaatattcgttgctgcgatgtcctaaggacatcaactctacagggtttttcaccatttcggcgctcattgacgaaccgtctacatagccataatgtccgttggagtacatcaccggtacggtggggcgagtgaaccaagatacgaaacgcatgataccgccttcgcccgaaggagcaacagcgggagccgtcacgttgtttttgttaccggacaagttcagcccgaatgtgaaacgtttgtagcgggtgtcaaggtttgaacgaaaagagaaacgctctacacctgtttttaccatgataccatcttggtttgaataagctaccgaggccatgaagtgcgtattttcgctaccacctgatacggacaaatgatgctggtgcatactggcattgcgcaatacggcgtccaaccaattggtgtttgcataatgatcgggatccgaaccatctttcagtttttgtagagcttccggtgagaaagtgtcagggttcacttcgtttctcataagagcccagttataactgtctacatagtcgggaacgatacccggagtctgtaatgtatagcttcccgagtaggatactttcactctacttgaggcctgtcctcgtttggtagtaattaagataacgccattggcggcacgtacaccatagatagctgcagatgctgcgtctttcaatacagagatattgtctatatccgcagaggggatttcggaaatttgtgaaagactgccttccacgccgtcaatcaataccatcgggttgttgttaccaaaagtaccgataccacggattcttatttccggattgtcattaccggcctgtgcaccgttttgagtcagtaccagacccggaagacgaccttgcaacaaagtagctgtattggctaccgggatgtcctggatatccttggatgacacagaagccacggaacctgttagattcactttcttttgggtggcatatcccaccacgaccacttcgtcgagtttcttggagtcttcttccaaagtaaccttaaaattattttgtttcctattgggaggatgacatccttatatcctaagaagctaacgaccaacgtctgtgaaggttgtgccttcaactgaaaagcaccgtccatgtcggtgatagttccttgtgtcgtaccttgaatcactacactggctccgataataggttcgcctgatacatcgtacactttacctgtcactgtgttttcctgtgcatatactgcgaaagagagcagtataagaacgcccgctaagaaaatgcggaaaaagttttgtttttgtccgttcataaatttaaagtttaagcaagttaataagttctttattatctattttcttgtaactaagaatacttttatcgttttatttccattggtaatggcgtacccagtctacttccaactctacgggtaagtcggccggatctaccgtaccgacccaacttcctcctaactgcatatcgattagcaaatattgcgggatattaaaaggaaactgtccttcttgttcggtttcaattcgaggataaacaaagtttcgttttccgttgacatggaatacaagactgtccggccaaaaatccactccatatacattgaagtcttcgggattaatgggaatagtgtttccgtgtttcgggttgttttctattcctagtgtataggtatagtgcgagtgtacggtttggtagacaatagagtcatggttcagacgttccataatgtccacttctcctcccataggccatgagtatttgtctgtttcataaggcaatgtccatatagcaggccatgctccctttgctccgtgtagtctggcacgtacttcgatacgtcctccgtggaaagcacgtttgtctttggtccataatcctccggtcaggtattgggctgcgtctgcctctgtattgtcattgacgattcctttcaagattaaaaggccgttacgcatttcataacaacggtcgtcaaaagactgggtgttttgccaatcaggtttgccgcgaggtatgcggctccatacactagtgtcgggctctgcaccgtcaaagttgtcttcccacaccaattcccatttgggagtatgagtgcaagcaaatatgctacatgctgataacaataaaagtataacctttttcatacgcttaaattttggttcatagaatttactttaaaaaacccgttggcggaattaatttaagttgataa

SEQ ID NO: 3025 - DNA, 31518 bp, Unknown
  gut microbiota DNA sequence
agaacacttgattcttactttttacacaacctctttggaggtaggattgtatattctgcttttctggattctggaatggtttcagcgagataagccatatgcgttgcagattcaatttctaaaaagtaaatcattgcgcgttgctatcctgacgtttgtaatcttattcatagagataaccatgggtaagtcctcggagttcatttattttcaattctaaataaggaatatgagaaagttcttaagaaatcttcttttagcattaattcccgtagctgttattaatgcattgtgttggggaacgttggtctttttagcatggcaagatgatttgacatatgtgaattatgcgtctgcactggataaagaaaagcgtttggaagaattgggaaatcagtcccgcttgctaataataggtggttctaacgcccgctttggctttgattcttccattctgagagatacattacatctggaacctgtgaatatgggaatacatatcgggttgggattgaattatatgtttgaggaggtttacgaccatttacgaaaaggagatgtgttgctcgtttctgcagaatataatcattttcttaaggagggcagttattatggggatgaaggtctgactgatatgtatctgataaagcatgaatggggaaaggccttatataatatggtaaatacacataattttttttcgatgtatcgcttgattcgtaaacgtgtaaaacggataggtatggatatagaagatataccggagaatatggaagttcgtaccaaatataatgaatatggtgattataccggacattataatctatcttctgccggatattgggacagtgccccattacctatggtatcacccgatgaaaaagtttttatagatttaaaagagaaaatatctactttaagtgagcggggggtgactattttcttcttgcctcctccatattgtcgttcttcttttcaaaatgattctttggccattaaccgtatctcggagagtttgaaggctataggctttccttattatttggaaccttccggttgtgtttatcctgatagtatgttctatgactcgcgttatcatctgattagggaaggtgtggtgatacattctcggaagatagcaggtgagttgaaaagaactttataaatatatgtgagaaattgttttattcaatttttattatgtaggctttttcttctcttcgtaacggatagtttccccgtaattcttcaaacagttccggttgagctttcagccggtcgctgtcttcgacagggttatatatttggagcaatgcttcttcctgactttgtgcatgaatgataggagaggtgggtgcgggagcgttaatttcatactttccctctatatggaagaacttacagattgcatccagcgacattcgcgttgcgttagccttgccgtcagcggaatatccggcaatgtgtggagtgccgataatcactttctctaataattcacgattgatttccggttcgtgttcccatacatcaataatagcgtctgagatagaaccattgttcaatgccttcaagagagtgcctgtgtcgataacttctcctcgtgaagtattaatgataacaggtttgcgttttagcgaattgaagaaatcttcatctgccaggtggaatgttttgtatttgccttctttatataaaggtacgtgaaaagtgatgatgtcacattcttccgctatcttatttaaagaggtaaaggattcttttccttctttttcttcccgtggcagatcgttcagtagaacgcgtatgccgaagtcttcggcgactttggcaactttactccccacatttcctactcctacgattccaatagtcagttcgtccagtttcttatttttgaaagacttccatatcaggagtgaagattgaatatattgggcaacagaagctgagttgcaaccgggtgcatttgtccattcgatacctgcccgcttacaatattcagtatcgatatggtcgaaccctatggttgccgtagctataaactttacccggctgccttccagtaattcctgattgcagtgagtacgggtccggataatcagcgcatctgcgtcttgtaccagttccggagtaaaatcctttccgggggcgtagattatttcgtcggctattgtctggacagcctcttttatataaggtatcttattatcgataataattttcatatacaatctgtatttagttcccacaaaggtaggaaataaaaaagtaagaaagggttgcttgtctgaaaaatattacatagatttgccctattatatatctataagctagttaagattatgacatttagtaacctttgcaacgagattttttggaaatcgacgactgattaccacgtaacggatagtgtagatgcaccgatgaacaatccttacgagttgaagacgattgagtattatttatacttgaaaaattggatcgatgccgttcaatggcatttcgaagatattatccgtgaccctcaaattgatcctgtagaagcactggctttgaaaagaagaattgataagtccaatcaagaccgtactgatctggttgaactgattgatagttattttttggacaaatacaaagctgttaaaccgctttctgatgcaactatcaatacagagagtcctgcatgggcaattgaccggctttctattcttgcgttgaaaatttaccacatgaagcaggaggtggaacgtacggatactaccgaagaacatcgtgagcaatgccggaccaagctgaatattctgttggaacagcagaaagacctttcttctgctatcgaacagttgttggcagacattgaagccggaagaaaatatatgaaagtatataaacagatgaagatgtataacgacccggcgttgaatccggtgctttatgcaaaaaaataacgaatggcgcgtattctcattatccgtttttcagcccttggcgatgtagccatgacaatacctgtgatacattcgcttgctgtgcaatatccacagcacgaaatcactgtattaagtcgtggcgtatggcaacctctttttcaaagtttgcctgaaaatgtgaattttgtcggagctgatctgacaggtaagcataaagggctatggggattgaacagcctttactcggaactgaaaaggatgcatttcgattacgtggcggactttcatcatgtacttcgttcgaaatatctgtgtctgcggtttcgccttgccaatataccggttgctttcatttgtaaagggagagccggaaaaaagaaactggttcgccgccgtcataaagtgctggagaaccagaaaagttctttccgtcgttatgctgatgtgttagaaaagttgggactgccggttttattgaacttttcttctatttatggagaaggaaagggtgatttcgcagagattgaaccgatgacaggaccgaaaggaaaacaaaaatggatcggtattgctccttttgccaagcataagggcaagatttatccgttagaattgcaggaacaggttgttgctcattttgctgctaatcctgcggtgaaagtttttctgtttggcggtgggaaaagcgaacaggaagtctttgactcctggattgctaaatatccttcggtggtttccatgatcggtaaattgaatatgcgtacggaactgaatctgatgagtcatctggatgtgatgttgtctatggactctgctaatatgcatttggcatctctggtgaatatacctgtggtttccgtttggggagctactcatccttatgccgggtttatggggtggaaacaattaccggtcaatacagtacaactcgatttatcctgtcgtccgtgttcggtttatggacagaagccttgctggcggggcgactatgcttgcttgagggatataactcccgaacaggtgattgcaaagattgagggaatcattgattaatcataaatagcttttgaatgtatatgaaagaatatgactatctggtagttggagcagggctgtttgcggctgtgtttgttcgtcaagccattgatgcgggcaagcgctgtcttgttatagataaacgtagtcatatcggcggaaatatctattgtgagaatgtagatggcattcatgtacatctttacggagcgcacatctttcatacagacaataaagaggtctgggattatgtgaaccgtttcgtaacatttaatcgctacactaattctccattagctaactatgaaggcatattatataatctgccttttaacatgaatacttttaataagttatggggagttaacactcctaaagaggctaaggataagattgaagaacaacgtagcgaatatgcacatatccaggctcctgccaatctggaagaacaggctttgacgctttgtggaaaagatatttatcagaaactaatcaagggatatacggaaaaacagtgggggcgtcctgcaacggagcttccggcctttattataaaacgacttcctttccgtttcgtttatgataataattattttaatgacgagtatcaaggcattcctaaaggcggatacaataagctgattgaaagtttgtttgaaggagctgatgtgcgtttggggacgaattatttttctgctcgtgaagaactggattcgctggtggataaagtattgtttaccggatgtattgacgagtattacgattttcgtttcgggcatttggaataccgtagtcttcgttttgaacacgaacgtctggaaatggaaaattatcaggggaatgcggtcattaattattgtgaaagagagattccttatacccgtgttatcgaacataaacatttcgaatttggtaagcagccgcatacggtgatcacccgcgaatatccttctgcattcactcccggggacgaaccttattatccggtgaatgacgagagaaatatgcggttgtacgagaaatacaaggagttggctatacatactcccggagtcttgtttggcggacgtttagctcaatacgcttattttgatatggacgatacagtggctgccgcattggttttggcgcaaaatgaactataaaatatcattcctatgatttgttatctatcaagaaattaccgaggtgtcgataatgccggaaataaagcaaaaacagacattgaacagataatggagtcgcatggcttccggaatgtcgggctgaaacaaacccggtatagaaatgtcgttgtagctttttgtcgtaccttattcagtgtgctgaagagtattctctgtttgcgtaaaggcgatgtgctggtactgcaatatcctttgaagaaatattatgcatttgtctgcaatatggctcatctacgtggctgcaaggtggtgacgttgattcatgatttgggtagttttcgtcgtaagaagctggctatcccccaagaaatagcgcgcttggatcactcggactgtgtgattgtacatagtgaacgtatgagggactggctgcttgaacatggaattaaggccaagctgcaaatattggagatatttgattatttatccgatagccaacctgttgccggcaatgattcgccgaaatcaccgaaccgcatcctgtttgtcggtgctttgtcttcttatcataatgatttcttatataaacaggcaaattctccccgttcttatgatatagtgctctatggaagtggtcttgaaaccgaaaaactggaaggaaaagttgattataaaggctttgtctcttcggacgagctgatagcgacggcagaaggcgaatatggacttgcctggtatggatcttctttagagggaggaagtggtgctttgggagaatatcttcaatataacgctcctcataaaatgtctctctacatacgttgtggtcttccgattatcgtttgggagaaagccgggctggcgccttttgtgaagaagaacaatgtgggtatatgtatctcttctttgacggaacttgaagatattttacctaaaataagtgcaggacaatacatggaaatgaagaaaaatgtattgcaaatagccgataaactttcgcatggatattattgctttaaggcaataaagcaagcctgcgcagacttgggagtcgaaataaagggctaaattgtccccttttatcttagttttgcgataaaagaaaaaaatatagtcggaatatgccctaatttctttatctttgcacaatctttgtaagtaggatttatagaagagtgtaatgagagtgattgtaaatcccaagtacacacatttgcaaaaacagatagaggagattcccaagttctttgcggatgaaggaaaggtggtgtatgatgggcgtaatattctaaaacggattagtctggataacgttgatgttgttgtgaaaagctttaaaaagcctcacatcattaatcgtgttgtctattcatatttccgccaatccaaagctgcccgctcctatatctattccatggaacttcagaagcatggtttcaatactccggaaccgattgccatgatcgaacaatttcagaaaggtcttcttacaaacagctactatgtttgttgctatgacaatggtgaaaccgttcgttatttgatggacggtaaggttgagggaaatgaagacaagttactggcgttcgcgcgttacacttttgcattacatcaggcgggtattttacatttggactattctcccggcaatattctgattcatcagaatggagcaaatgaatatagcttctctttggttgatgtgaaccgtatgcagttattaccggaaatagattgtgataaagtttgccgtaatatgtgccgtctgtgcatatcccgggaagtgctggcatatataatgaccgaatatgcttctttgcggggttgggatgtggcggctactgtcaagctcgctctttattacagtgatcagttctttacccactacatttaccgtcgtgcagcccgaaaagagaagtcaaaacatatcgtttcgcatattttattgttccgcttatgtcgctctacgcgtaagttcctttcctgggagcctcacttctcgcattatttattagcgaaggaaaaacatatttatgatacctacttgtgtaagtatgattattgcgatttgctatcttctgactatcggtagttaatttactttcttgttgcctcgaagaacaacactcctgatcttgtgtctgaaaaatcctttttgatttctgtatgtgcagttgtgtttatcaagaaacgcagaaataacctcctcgtcatcatgtaggtgataagtacagatggcgaaatctattttcttgcaatcccggaaaagctgttcacatccggccagcgcacggcgctcagccccttctatatccatttttataaatagatgctcgtccggtttgtctctgaagaaatcgtccagtttctgttctttgggagaattacggttgctcacatacttctgaacaatggttaccttgtctttccatggctcaaaagtggccctgatagcttccagccacgattcgttctgctcaaataaataaacatgtttggcttcttcgataatctccagcgaagaatatccttcggcacatcccacgtcaacaaaaacctttcccgttacgtccttattattattgaaataatggtgtgcggagcgttggtcttgctctatcatcaacgccctgtaatacttctggattttatggggaggtgttgttctttggaagtacaggcgtttaccatcctcctttagtacataatacaaattcctattttcgtctttccgtacatcgacaggcatactcaaatactcatctttgaattcgtataagtgtcttgaatatccatgttttctgatgtatttataatacttcagataaggagaatccggcttataccctttcataaaataatatggaagcgtaccatatataaatttctttattgagtgtttaagtatgttcatcgtattagtttcttgtagatgttaataatttcttccgattgttgtttctcagagaaccgtttcgcgaattcccgtcctttctctaccatgttcttccttttatcggaatttgaatatatttgtttaaatgcatcagccagtccggtgatatcatccgggtttacgtagatagagtcgggccctccggcttcttccagacatgagcctgtggcggctaccacaggagtacccgaatatagtgcctctatgatggggataccgaaaccttcaaaacgggaaggatatacaaaaatctctgctgattgataaaaagcgggcaaatcgttgaaagggacattactgataatatgcactctttcgcctaaaccgttatctttgataaactgttcaaccttttctgtgtagcctgtacggcgtcctacgataacgatatgaatatgttgcggcagcataggcaatgcctgtactgctgcaagaatattttttcgttcttcaatgctgcctacattaagtatatagtggtccggcagctggtattttttccgtacctcctcctttttttcttccgtcaccggatgagtaaatgagacgtcgcatccttgataaacgacttctattttatcatcagggatgttgaagtatcggataatatcccgtttggtacattcactgatagcaattatcttatcagcattttcgcacgctttacggaatttgtatgtatatattttcctgtcaatagattggtaatattgcggatacctcaaaaatatcaggtcgtggatagttacaatacttttaatgcgacttttatggatgttgagaggaagctcgttactgagtccatggaataattcaataccttctttctccaattgagaggtgattccccatacgcgccataatgaacttagttttttccaaaaagaagtagcaggataggcgagagtgagctgccggtattgtccggttaatagattcatccttttgttttcccgttttttaggtgcatacaggacatagtcattctccggatagaagtggcaaagaatatccgctacatagcggctataattacctaacccggtgaaattctgcactgcacgttttccgtcaaaacctattctcatctctgttgttacctactgcttatatggtttataattagacttcaaaatcccgataaggtttattcaagtccaaataatgaaaattatgttgtctttgtccactctgtttgggaatcgtcatataatccccatatttctgagacagatatgtgtcatattcctgtacgccccatacttcttcgttctcgaacaagacaggggtaggaactcccaaaatcttttttggcatgattcctttcatgccgtcgtcatagtcacaaataagatcactcttgtcaaagtcgtatttggtcataacctctctgatgcttttctgtacttcggtgagtgtgaaaagcttcctgcatagtaatggtatccatgaacttggcccctttccatgcttatacgggtcgcggtgaatcaggtaaagaacccgtttgtaaaattcatatttggcaaaatgcattctttgtgccatacggcctgtcggcacaccgtccaatgggaatacatcaatatatacgcctcccagatatttaagatgcatacgttcaattaatgttgtgtcggcatcctgtatcttggcaaacggaagcgggtattctttgtcattctcagcgcatacggcttcgtatggctccggcaaccattccttggcattagtcattaatagatcatagtctgcccgtggcataccaatatccagatcatcatcccaggggataaatcctttgtggcgtacagctcccaacatcgtacctgccatgatataatatcgcaggttatgttctttacagactttatctattgctagtaaattctttaagatgcgaagctgtaaggggcgaatatcgtaagtggccatttctattcaaattttatattagtaaagactagccggaatcaacttctgtgcttgttggaaatcttctaccgtgtccagctctgccgaaaagaattcggtggtgtccattacgtagaaactatatccttgtggaatcagtctttcaaacgcccgttcatagaaaatattgtccaatccttctgataagatcatcatctccagttcacggaataacgcttgtgtgtatgctgccgacatcttttcaatacctattgattcaccgattgcatcaggtatagagcaaaccttactgatttccactaccttttgttcattgtccacaataaccttaatttcttcggcaccaagttcgtggcggttgagtgccaatacatcggctttgtccgaccggagcaacttctctacgatctggggatcaaatacgatgtcactatccagaagtaatacctcttccccttccgtataagggcgggtcagccacaaagaatagatattgttggttgattcatatttatcattgtagatgaaagtaatactttgagccggataatgagcttgcagaaagtcgactatttgttgctggcgatatccggtgacaatgataaattcgttaaaaccattttgtattaaagcgtcgaaagccctttccaacaaacaacgttctcctatcttgagcaagcatttgggagttgtgtcggtcagtgggcgtagacgtgaggctattcctgcggctagtattacagctttcatttggatgcgatttctttgattgtatctatgacgatccggttctgctcagggcgtcccagcgtgatacgcagatgagtgttgatatccggttcattcataaatttcactttataactctgttcggcaaacgctttttgcagtgcctcttttaatgcaatcggatatttgattaaaataaagttggctaccgattcgtataccttaaatccgggcagcacaccgatttctttttcatagcgggcacgatcttcattcatcagtttggcgatgttacggtagtgtgcatccgatttgagtgctgcgatagctatgtcttcagatatccggttgtatcccagatatttgttgctgtatttgctaaatttttccagttctttactcatgaaaccgaatcccatacgtaaccccggcaagccgtaaaacttggataaagtgcgggagatgatcaaattcggatatttgttcaccaactctttgatatatcttgtgtctgttgagacgaaagaggcgtatgcttcgtcaatcaagaccttcgttttggcaggaacttcagccagcaactcatccagttcttccggagtcagaccatttccggtaggattattgggcgatgcaagcagtaaaatcttcggattttctttttgtatcatatctttcatggcggcgaagtcgtacttgaacgtgtttccgtcttcataaagaggatattgtaaagtgcgaccgttcacttcatctgcgatagacttataataccaccatgagaatttaggaatcaacatcgttttatttccgtcttcttctgtgaggaaataatgtacggcctgtttcagaatatcctctccgccgtaccctaataaaacttgcgtctcgtctatatcgtataattcagataagaaaacggataaaatgctttttttgccttcatcgtaaatacgggtataaaagcaaagtttatttatatcgaagtttttgagtgcttctactacttcttttgatgggctgtagttaaattcgtttctgtctaaaaagtttaaatctttttgtctcatatttatttttctattttttctctgtaagatactggttaactcctttggagcaccaaattcgcttttcatcaatagttctctgtagtatctcgttattaatattaaattgtgcccgtgaattatcttggtgatataaatggaacacaatgccggcattcttgatgatacgtttacgtacacctgcattaattagtctgcaggctatttcgctgtcttctcgtccccagccaatcatgttttcatcatatccattgaccattaataaatcacttctccaaaaacccatgttacagccgcgtacatatagtagatctgtccggtggtagttttgtaagagatatgttaatagttgccaacgtattccattgagccggttatgtactcctttattacggattgaaacacgtatgcttcgttctattattaatttcttagaaagttcagattgtatattgagacggctaccacttacaaaactgtttttgcgtgcaaagcgtttgtggtctttgataaaatgatgattcaaaatgatatctccatcaatttgaattatatagtccatactggcttttgcaatagccttatttctgataacagttaggcggaagccattatcttcatgccatacgtgtataacaggtacagtagattgtttcttgaattcttccactattttcctggtttcttcattggaaccatcatctgcgatcagtacttcgtcagggagtactgattgttgaagtacactcataaggcaaaggtctagtgccttgggagagttgtatgttgagataatcaatgaaactgtcataggtttagtttgttagatttcttcaattccgttatttgttcgggttattttttgttctttaatagtcttcataaactctctatgatgcggttcttccttgcgagagagctgcttatggtacaggtgataggctattgctgaaaatttaataattttcttttctatgcctgagtttactagtctccaactaagttcttcatcttcatgtccccatccttgtaaattgttgtcatatccgttaataccaataaggtcttttttccagaaagacatattacatccttttactctttttcctgacaattctttacgagtggcaaacttcgcaatcatggggtaaagtcgtaaagcatttgtaggttgcttcattattaactggagtttatttattattgatagtttccctttatctagtaaagatgtggtcgctcttacattaaggtttgctcgggttcctctaataaaacacccttcctcagccatatatacatggtcttctataaaatttggactagctatgatatctccatctatttgaatgatataagaggaagatgctttgcttatagctttattcaacactattgttttacgaaatcctctgtcttcatgccattcgtggaatataggaaaggaagcattttgtgtaaactcatgtatgagttttgttgttctttcatcagacccatcatccgcaatgatgatttcagaaggcaatatcgtttgtcttaaaatactatccaaacagagccgcaaagcctctggccagttgtatgtagcgatgattaacgatattgtgatcccttttttcatattccagatattttatgaagaataaacatgcaaatatacattactatcctcagaatagcaattatttagagctttaatttttaatacgtttgtgcttatatgagaatagattatttatttcatataaaaatagaatgagagttttcattcgttttttaaatttgtgtgtatttgctaaaatatgaatgatgtctctaaaccctgaacggtctagtgcagcgcagtctataaatactttactttgtgttgcaggaaaagtgttttgaaaccataatgtacgttcttgattaagttctttcccattggaacttatacctcttccatcgcattcagatataatatatggtaagtggcgataagtgcggttttcaattataaggcactggaaacaatgtgcccaatcagatatgattttgtaattaatgtcatatcttttatctttaaataaggtatgatgtataaaacatgattgatggtgtagtgaattatctgatagatatatgagatccaatgtgtctgggtatactctttttttagtttttcttttataaaataagatagtgtctccgtataggtattctgtaccatcaaatggtattttcgcgagaatgtcttggcttagacaatcaccagagttgaggaaatatagatattgtccttttgcatgatcaattcctttattcatgccatcatatattcctttgtcaggttctgaagaccaaaaacttagatgagggttttctttttcatattgtatgatagtttctctactaccatcagtggagcctgcatcaatgataatgtgttcatatgatgaaaatgattgtgaacttacactctctaatgttttgagtaaaccaagattattgttaaagtttacagtaattatactaagtattggtccattcatatatgtaagattttacattgttttcatgattgtatggctttttggtaagcctctactgttttctgggctgctttttcccatgaatatcgttttaaacgttcgttacctaaacggattaattgagaacgtttttcttcattatatattacttttgtgatagcttcagacatggaactaatagagtatggatcaaaatatacagcagcatcacctgctatttcgggaaaacaactagtgttgctgagtgctacggggcagtgacatgcataggcttctaaaataggaattccaaagccttcataaagagaaggatatacgaatagtaaagctctggagtataattcactaagagcttgatcagaagcttttatatgaatcgtatattcgaatatacccatgccaataagcatatcttgttcgtctttttttagtttacttcctgtgtaaattgcaaatagtgttctatcttgttcatgtatttgagcgaatgtttccataaaacgtttgaagtttttatagggggtacgatcgccaacaaataatagaaatctttcgggtatttgtaatttatgttttcccgaaaagtgtttcatgcttgtgctgtggtaaataacatctatcttttgaggattaatattgaaaatttcaatgatatcttttttggtgttttcgctaatagctataattcgattggcacgtgttataaccttttttttatgacctattgtgatatttgcatctgttacatattgtggaaatttttcgtggatcatatcgtgtacagtaataatgtatgggttttctccaatataatctaaaaaatatggatcatagtatgtagggtgtaataagtatggtccacctgtttttagtagtttttttgttatttcgtgattctttttttcaaaaaaggaatgatatcgtttgtagataaatctaggcaataatattaggcttttttccaacatccaacttgtgaggtaataattgatagaatatcgcacggtgattttatgttgtgctgaaattcttttaattatctcacagaaataacgtgaaataccaccaaagcgttgcatttcgaatatttgatagtcatatatgataaaaagcgatttcatagtcattattgttttggtttatgaaatgaaaaaaatgaatttatgtagtataaaaataagatgattttccttatacgttttttgaacttgtgagttttatttaataacggaactaagttaccaagccctgtttccctgaaagcctctagttctaaaaatgatttgaaaaaggttttattgatgttttgttctatccatttgttgcgttcttcccacgttttctcataattagaacttgcacctccaccatcgtattcaacgatagttgttggaatgtgtttatagctacatccttttaagattatagagtggattgcatgtatccagtctgatataattttatagttagtatcatatttttgttctatgaataatgaatggtggataaaacaagcttgttgtgaaatccaaccttttgaatttgcaagaaagaatgtgtcgaatctatctgggtatttccatatccatggatcttcgtttgttggtataatttttatattgccatatatgtattgggtgccatcaaaaggaatatgtcttaaaacatcttttataagacaatctccagagttgagaaaatatagatattctccagaagcatgttctattcctttattcattccatcgtatattccactgtctttttctgatacccagtaggccaaatgagaagtttctttactgtattttataattgtttctttgcttccatctgttgaacacgcatcaataatgatatgttcataagatgtgaatgactgattctttatgctattcagagttgctattaatcctttgttattgttgaaatttacagttatgatacttaatgtgggttgggtcataatcatttatttaaatgtgtttgcaaatataataataatgaattgaatttgtaggtttgttatatgataaaattgttggaagtgctttagctatttttaataggaaagagggctttttgttacttttgttgtgtggggtagtgaggaattatgtatatttgctgaatataacgatttatataataaatgaatggattgtttagtaagtgtaattgtccctgtccataacacagttgagtatttgcctaggtgtattgattcgatacgtaatcaatctttgaaagatatagaaataattctagtagaaaatcaatcaaatgatggctctgccgcattgtgtgatgaatatatgtcttttgattctcgtgtgaaagtacttcatcttccggttgccaatgcatcaatagctcgtaatgcaggactagatattgcttcagctccctatgttggttttgttgatagtgatgattatatcgattataatatgtatgaggagttatttgatgtgataaaatgtcatgatgttgatattgtctattctaattttcagactgaatatttggatggtcgaattgaaggatgtggtaaaaactctggacagatatatatacgctcatcgttggatgtattaagagatatgatgtgggataaattgaattgttcgtcttgtacaaagctttttaaaagaacagtcttttcagagtataaatttccagaaaataatatttatgaagatagaattgcgatgcatatgtggatattgcaatgtaagcaggtagcttgggttgataaggtgttttatcattatgttgaacgcagtagtagtctttgtcatttaattactcctttgaatagatatcattattttatggctgaattttctcggatagagtttatagagaagcacttattgtttgaaggagaagaattattggaagtaaggaataggcttattcgtatatgtttttttacttttgaggagtttgtccttttgacgaaaccgaggtgttttcagaagccaataaagcatatgagagctaaatttaaaacattattaaaatttccttctcgagagttagaagttttttatcgcaaacgaataagaaaaattgtctatttttggccaatatattattggcgacatttttcctgattagaaacaactggcagggtctagtatgtaggtattgatatatgtaaattgaggttggacgatgtagtcggaggaaaactgacgaattgtatgtcctaaatgttgataatataaatgtaatatggataaattactaccacttgtgtctgttattgttcctgtttacaatggggaaatttttctagaaaaatgccttaaaagtgtaatatgtcagagctatacaaatattgagattattgttgtaaatgatggaagcatagataatacatcattgataatagatcgatatgtaaaattggataagcgtataatcgggttggaacagaaaaatggaggacctgccctagctaggaataaaggtttgaaaatagctaaggggaaatatgtgcaatatttggatagtgatgattgtctgcatgaaaaagcaattgaatatttgctagataaagcggaagctagcaatgcggatattgtagttgcccctttccagttttgttatttagatggtacctcttataaatcgtcgttttttaatttctcaagtatgtctggtattgattaccttaaagaaatattaaataataaggcttattggagtgtttggtctaaatttcataaacgtgaattgttgttgaatgacccaatggagatatatccaaatatatgttttggggaggatgtgatttggagtgtgcagttgcttttacgttcaaagaaagttgtttctatagaatatgttattttagattataatattcggaatctttcactttctcattcttgcaattttgatgaaggcaaatttgcgaattttgaattttatagaagttggttggaactttaccttgcacaaaagggagtgatagactttatgaaaaaagacttggcattttttcatattagaaatactttccaaaaaattgtttggaggaagatacgtaatttgaaaaaagacatggatagaataatacaggatttgagatgctttcctgaattgaagcaatcaatgtctaagcgtgaattgagggtggtttctgctttccgattttccatgttgtgggggaacttaaggttgaagtactatattcaaaaaggtaaaatttaggtgtactaaaatattattatggtgcttgaactatgaattgtggcacttgtaaatgctagtgtatttgacgcttttattggttagatttaaggagggagattagctgcttaattgaagggggtccatatctcattttttttctgttcaattctttttttgtgagaaataatattgttgatttttaaaagaaatgatattaattttctaatccttttcttaaatttttttgtttgtgatattggctgtatgaaaggagcaagttcggaaatacgatactcgtatagctcagataatgcatctaatatggctttcggaaacttgcttttgatccattttattcgttcttccattaatttttcttgattggtactgatcccattcccgtctacttctgctattacaatgtctatatatttatagctgcaatcgttaaaaataatactttccattgtatgtatccagtctgatatgattttgtattcagtgttatataattgtttctgaaatagggaatggtgaatgaaacaagcttgatgtggtaatgctgttttaagaaggtaaacgatatctaatgtttcagagggggtaatatatctgtagtctttttctgataatatgtattttatatttccatatatatatttattaccatctaaagctatttcctgtagtatggtattgcttattaaggtatctccagaatttagaaaaaatagatactctccatgcgcttgttttatacctttgttcattccgtcataaatgccattatcaggctctgatacccaataaagtggaaatgtaatttctttttcatatagtaggattgcgtctttacttccatctgtggagttagcatcaatgatgatatgttcaaaaaaaacgctttcttgatttttgatactatttaaagttcggataagtccacttttgttgttgtagtttacggtaattatgcttagtaatggagcaatcatgttctaatcttataaaattatatgctatgttggctgtatattctgcaaatatacatatatttgtcattaatacgaattaaagttaatgcttttaaaatatgttgggtgatttgaagagaaatatctataaatatttgctgaatagaggactgttacgaactaaaattgttgtattgatggacggtggtatttgttcgcagatgcatcaatatttattgggaaatttatatcgtaaaagaggtttttcagtgtgttatgatttgacattttataaggaatggggattagatataaacaatgaatttgttagaaactttgatattttgaaggctttcccgtatttggagtttgaagaagcgtcaaaactggaagtggatgtatatagaagagaatacttttatgggggcaatgatggtgatattcgtactaatgatatgtcatttcttagtttggttccacctatatatttaggaggatattatcatttcccatcaaagcagtggcttgaaacttttcaatctttatatagaatggttgatggtgttctcgataaagttaatcagataaaatgtttagaaatagataagtgtgtagattctgttggagttcatgtcagaagaggagatttaaaggaagaagtatcttcttatggagcaccagcttcatttgattattttataaatgctacggctttctttaaaaagaaattgtatagaccttatttttattttttttcagatgagccagaatgggttaaaatggacttgttgccaaggctttctgtgaaagattgtgcagaagtggttgatataaatggctctgataaaggttatatggatttatatctgttagctcattgtaaacatcaaataacgacgaaaggaactttggggaaatttggagctttgttggcagacaaccctgataagtatgtagtattgtataatgatgaaacacagcaatattggaaaatgttactccagaatccggtttttatatagtttaatgaggttgtgctagacgggttgtaatgttttattaaagaaaaagatttgaaaatatattggagatatcctaaattcttgtagcattataaaagttttattgttaaaaaaaagcaattgtttatagatgatgctataattattctatttttgtgcatcctaaacctaaactatatagaatttttatatatgaaaaatctaaagagacagttttattcaaagaactgtaattttgtgcagcaagtgatttttgctttttcttttatatgttatcttttagttatagtttcttgtaatgaaagtgataatagaatggaaacggaacctcctttttttagcgaggaagatgttcgacatgaagaaaaattaaacttttatttatataatgattatacttgccatattcattctgtgtctataacagaatcttctgttagggtgacaggtgaatatacgggcgaaggcaatttttttctaggtgagattacccctagtatggatgtagcggagttgaagaatagtccttataaagtaaaacttgtaaattcattatttcaaatagaacttgaacggtttgttgagagggaaggctttttatatgacaggcttttatcaaagtgggctatttttaaagaagaagcaggccaaaatttgctagtttcgcatgctcgctatgtagatgagattttcgctactcaacatttggctcctattaagattgtgtctaagaagggaatgggcggcattattcctaatcaatatatatctgactttgcatcattaaatatcagtagcgctactatcaatgtttgtataactcattttatgcatcttactccaagaactggtgatgttgaatatgtatatggggggaaaagctattacatggatttgggttatcttgagaattcgattgataggactcttttggcagcaacgaaagagcgaaatatgtctgttgcagcaattatactattagagccagcatctaggtgtattgatccacaactgggagaaatattgcagcatccagataatgatggtggggtgtatactatgcctaatatgacaaccttagagggacttaattgttatgctgcggcacttgactttttggcgaaaaggtattgtactactgataatcgctatggaagaattagccattggattatgcataatgaagttgatggagctagggattggactaacatgggaataaagccaataacagtgtttactgatacctatgtgaagtctatgagaatgtgttataacattgtacgacaatatgatgagaatgcagaggtgtttgcttctttttctcattcatggacagaaaaatccaaccctacatggtatacctgtaaggaaatgattgatttgttaaacgtttatagcaaagtggagggggattttcagtgggggctggcttatcatagttatgcacaggatttgactaatccttgtacttggaatgatccgaatgctacttgttctatgaatactcaatttgttacttttaagaatcttgaagttctgaataagtgggctttggataaagaaaataaatataaagggattattaaacgttctgtatggctttcggaagcaggggtgaattcgcggggatattcggatgaggaacttcaaaagcaggcggcaggggttgcttatgcttggaaaaaggttaatgctttagaaggcattgatgcttggcaatggcataattggtttgatcatccgggtgatggtgcttgtttggggttacgtaaatatttggatgaatcttataatggagaacctaaacctgcatggtatgtctaccaaaaagcaaacacacacgaagaagatgaattttttgagcaatttttacctataattggaatttctgattggaatattattgaaaatttctgattgtttataattaactaaaactgaaattatgagaaagctgagagttttttgcacgagaaaactaggtcgctttgtagggcgatgcgtgggattgttgggagtactatttttgattgtgaatttaatttcctgtcaggacgattttctagaaaatgtagagcctcccgttactcctcctgaggagactgttactccacctgtttatatgttattgaatggaaagtataagtcgggggttaatttgactttacatgaggatagtacttgtactatagaaacaactgatggtgatccatgggcgacaaccggagtatttgcggaagatgtgcctgaggaatgtaatgtacttgaatttgaatatcagacaacgttggggatgagtaatctcgaacttttctttatggatgtaaaaacaggaattgatccggcgcatagtatgagtgcggggcaggtgccggcttctgaagaatgggtttcttttagtgttcgtctgaaagaatatcgaaagaattttaattggggcaaaaaaggagataacttgcgtatggactttggaactgatcctaataataccatacagatgcgtaacattcgcctgcgtgttatgaacgacgaagagaaaaaggaagaagaggaagaaaagaatgaagccttgaataaagagaagtatgaacaagggattaaagattatctgagtaaagaatatgcctgccatatcacagatgttacggttggagaaacatcggtaactatccagggagattatacgggcgaaggtactttcttcttgggcgaaatacctccttttgtggacatgtttaaaacggagaagatagagtttaaaattcctttatcagaaaactctttctccatacagttagatcgctatgttactgtgggagattttaaatatgatcgtctattgtccaaatgggccgtgtttaaagaaggagcggatgtggatgagcttgtttctcatgcccgttatgctaatgtagatgcaattcatgcaaaacaaagtgtcgaagcggttcctctgaaatcgaagaaaggattgggcggacttattaatcatggattattgacacatgatttggatgagttgggaatcagcagtgctactatcaatattcctattagtaattttatgcatctttctgagcagccgggtgacatactgtatacatatggaggaaaaacatattattttaacgaacaatatctgataagctcatttgatgtagtattgcaacagaccagtcaacgtggaatttctgtagccggcattttgttgattgctccttccggagatgcaggcgaactcctgaagcatccggattataacggggtggctccttatacaatgcccaatatgactacggtagagtctactcaatgttatgctgctgcacttgactttttagcgcaaagatatagcgatcctgatatgcgtatagcacattggattatccataatgaggtagatggaggaattcattggacaaatatgggagataagccgattgccacatttatggatacttatcttcgttcaatgcgtatgtgttataatattgtacatcagtatgaccagcattcagaagtgttcatttctttctcgcatgggtggaatattgccgccggcggtggctggtataaagtgagggatatgcttgatctaatgaatcagtttagtaaggctgaaggtgatttcttctggtcgttggcatgccacagttatccggcacagctgggaaatccttgtacctgggatgacgctcaggcgactttctctatggatacggaatatgtgacactgaagaatcttgaagtactggataaatgggttggtatttcgcagaaccagtataagggaaatatcaggcgttctgtatggctttctgaagcaggaacatgctctccgagctatgaagataaagatttgcaggatcaagcagccggatttgcttatggatggaagaaaattaatgctttggacggtattaatggaatccaatggcatagctggtttgatcatttaggcgatggtgttcctttgggattacgtaaatacagcgatgaagaatataagggagaagctaaacctgtatggactacctatcagaaagcgggtactgatgaagaagatgattactttgaacaatatctggaacggattggtattaaaagttgggaaggtctgattcaggatattccataataccagtgtcgctccgaatgatatcttatcaaaatagtatgatatgagtagttgatactttcctttttactgcaagatgtctctgatattttcttataaactagaggatttatgtgagcatttcagagatatcttgcagaatattgtaattttcagggaagtctggtcttttagttgtctgacaacaaatcattgaatatcatagttcggctccgcatagagctgatattcattaaaccttttattcttgattaatacgatccttgattttggagtaatccatatacatagaggataggtgttttcttctttatacacgaataactcttcgcgttttttgaggagaatatcatccgtttcgtcgtaaacaggagttgtattatatagcgaatttatatagtcagtgagtatttttttacttcgtataagaaaggcgggtctgtcgttcttttccttgtcgcgaagatatacggatacagaagggattccttgatgcatatcctcatacgtgataaattcataatcgtttaaaacatcttcgtatcctgtcgcatgtccgatagagccttttatgtcttttcaattgtagcaaagaaaatctttagtgttcgtaatctctatttctacggtgtcactgctgattacttctttgtttttgtatcctgacacatacgctttgtattttcccgggctataaaaagaatgagaccattgacgtatgaaattggcgctaccttctgtatgtttgaatattttcaggctaccgtctaaattagaaactttccacgtgattgaatcgtaaatgtcgaatagagaaaacataatgaaataatcattgggaaataagccaaaaacggcataatcgaaaatgtttttccgtgtgtcttctatctctaattttaacggaatgattttctccgtattattttcctcctcgtcgtttatctcaggaaatgtgctgttgtccgtatctgagcatgacgagataaataataaaatgaacaaaacattaagtagatttttcataatggcgtttagtttagtgtgttaataatctagtttttggtgcgtttctacaaatatagagaaaatatttgttttatacactgaattaagcggaaaaatattttttactgaaatgatatagaaatactggaaagtgtaattatgatctgcactggatggctcgtgaagaaactaatgctcaagtgttgaacaacatagattctgaatttatcaatcctattccggtactttatcagagtggataccttactattaagagatatgatgaaaaattgggtatttaccgtttgggttttcctaatcgtgaagtggaagaaggttttgtctgttttctgcttccttattatgcaagcgtggataaagtggaatctccctttgaaattcagaaattcgttcgtgaggtacgtgccggtgattaaaattgaaataattttcgtttgctgttttcaaacagcaaaaagtagcggaaaatgctgttttcaaacagcaaatggttatctttgtatttgaaagtactaagatatagaaatttatggaaactctttttgcgaaacaagatcgtttgttgtcgttgacatcaaccgagataataaggacattgatgtatcagatcaattgggatgcccagttggttgctattaaagggcctcgtggagtgggaaagactactttaatgttgcagtatatgaagctgcattatgaggtttatagcagggaagtgctctattgtacgctggactctgtttatttctccaatcatactttgttggagttggtggatgtgtttgtgaaaaatggagggaagcatctcttcttggacgaggtacataaatatccgacttggagcaaggagataaaggaagtatatgatatgtatcccgatttgaaagttgtgttcagtgcatcctctttacttaatatattgaatgctgacgctgacttatcccggcgttgtatcccttatgaaatgcagggactttcctttcgggaatttttattgttttataaacagttggatttacctatatgtactttggaagaggttctgacttctcctggaaatatctgctcggaggtgaacaaagtgtgtcgtcctttgcctctttttagagaatatttgcagtatggatattatccgttttatttgaaaaatcagatagactattacacaagcatagaacaggttgttaattttattgtagaaacggaattacctcagttgtgtggaattgatgtgggtaatgtgcgtaagataaaagccttgttgggtattcttgcgtcctctgttccttttgaagtggatatatccaaattggcgacaactatcggtattcatcgtaacacggttatagaatacctaaatagtctggaaaaagcaaaactactgcatctcttatatgcggatttattatctgtcaagaagatgcaaaagccggataagatttatttggataatcctaatctgttgtatgctttggcttctcatcctgtgaaaataggaacagcacgtgaaacttttgtagtgaatcaactttcttgtgatcatgaaatagaatatggaaagaagacaggagattttaaagttaatgggaaatatactttggaagttggcggtgaaggtaaaacgtataatcagatagcggatgtgcctgattcctatattttagctgatgggatagaaacaccttacaggtgtaagttgcctatttgggttgttggttttctatattagctcgatcctctgacgcgtatttttgattttcatttctcatattctcataagctcgctataaatcgcagataattagtaaagtagactatgagaaatacttttaggaacttgtatttctcatagtttttttgcaaaacgaccctgattttgctcatttctcatagtatcccgtccctgcaacatagataggttgcgtaggcttcccgatattttgtagcttaccttctgcctttagcctgcgtatttgccggctggccatactttgagtgaagctgcaaagagactgcatattagtacgagtcaagacaggatgcgttgcaaaatattccgtgagtttccggtcaatttcttcttctgaaagagaggcggaatgcggtttatatttcgaacgccgcaggtgtgtggtcatacacaaacttttcaagtctctgtcggcctggaagttgatggattttagtttcactttgtcggcgcgggtagtaagtgagtgtatgggttcggtggcttgcaatgtgatttgaaaatacccgatcccgtccagatgcactctttctccctcgcgcagatgattgcccatgcatctgctcagttccattaacattgcctctacttctgcttttccgaaagtagttgccatgtggatttcttttgctagtcgctgagtagtgacatgttgaaaattaactacgcgagggtggtagcttgcttcttccccttctttttccggttggggattcttataaaactcgaattgtattgccattgctgtttcaatttaatggtgatttatatattatgttacttaggctgttgctatatcttgccttcattcctttcttttcctaccgatgcttctatcgttccactccggtagacggttctttgcacttcagtagacagaactttttactggagtagacaggcctgtgcactggagtggaacggttggaatgttccttcaaagatacaacaatattgggcggaaaacaagtaaatgcttagttgtttatacgtaaataatagtttaatttcatattggataaggttatccggcattaggcaagcagagttgtgctgactatgagaaatactctgaaaaacaatgagaaatacccaaattttgagccgaaatgtgtaataaactatgagaaatgcctgtttgaaaaagtatttctcatagtacatctatttgattgactacactttaactgaaaagtatgagaatatgagaaatgaaattgaaaaatcttttctagtagaaagaagaaccagcgcttttaaaatttgtttgtatggaatatttacagtacttttgtctccggtaataatcgccctacacaaacatgcaggacaaactaaataagttaagtaatgagaataacacaaattagagacgacggcagagtgaacactttgcggacgttgaaaatcgaacagctcgtggagcaaatgaaagtggaaactaaagcacaactcgtctcaggaatgagagaagtcctgccttatatatttccgggagataaaaatgattatgtacagaaagtgccgaagttgcttcctgcggctgcctttgtccgtaagaatggggtaatgacaatggacgagtacaacggagtggtgatgcttcaagtgaacaatctctccggacctatggaagcggatgaggtgaaagaacgtgtgaaggagtttccgcagacctatcttgcttttactggttcttccggaaagtcggtaaagatatgggtgcgctttacttatcctgacgatcttttgccgagcaaccgtgagcaagcggaacttttccatgcgcacgcttaccggctcgccgtgaaattttatcaaccgcagcttcctttcgatatcgacttgaaagaaccttcactggagcaatattgtcgtctgaccttcgaccccgaactgtattttaatcccgaagcgatgcctgtctatatgaaacagcctatggctatgccgggagaaacgacctatcgcgaacaggtgaaggcggaaacctcgcctttgcaacggcttgtaccgggatatgagagttataaagctctttccgtactttttgaggcggcttttgcgcgggctttggatgagcagcatggctatcagccgggagatgatatacattccttgctggtttgtctggccggacattgttttcgtgccggtattcccgcagaggatacagtgcggtggactcgtgcccattaccgcttgccggatgatgaatttctgatccgtgagacagtgcagaatgtatatcgcacttgtaaagggtttgcggataaaagcagtctgctgccggaacaactgtttgtgatgcaaatggatgagtttatgaaacgtcgttatgagtttcgtttcaatcagttgacctcgcaagtggaatgccggcaacggaacagttttgatttttattttcgtccggtaaataagaggctgatggcaagtattaccatgaatgcgcaatacgaagggcttaaattgtgggacaaagacgtggtgcgttatctgaactcagatcatgtgccggtttatcagcctattgaagagttcctttatgatctcccccgttgggacggcaaagatcacatcggagatctggcaaagcgggttccttgcaataatccccattgggcacagttgttccgtcgttggtttctcagcatgatagctcattggcgtggactgggtaaaaatcatgcaaacagcacttcgcctatattagtcggtccgcaggcttacaggaaatctacgttttgccgcctgattctaccgccgtgtttgcaggcgtactatacggatagcattgactttagccggaaacgggatgcggagttgtatctgaatcgttttttgctgattaatatggatgagtttgaccagataggtatcaatcagcaacctttccttaaacatatcatgcaaaagccggtcgttaatacacggcgcccgaatgcttcggcggtagaagaacttcgccgctacgcttctttcatcggaacaagcaatcataaggatttgctgacagatacttccggcagtcgtcgttatataggtgtggaggttacgggagtgattgatgtggttcgtcctgttgattatgaacagctttatgcgcaggcaatggcggcgctctatcacaatgaacggtattggtttgacgaaaaggaagaagccattatgacggaagccaatcaggagtttgaacagtcaccgcttatcgaacagctgtttcttgtgtattaccgcgttgcggacgatgaggaagaaggagagtggatacttgctgccgatatattgcaacggatacaaaaggcgagtaaaatgaaattctcttccggtcaggtgaactatttcggacgtattctgcaacggttgggagtgaaatcgtacaggaaaacgcgcggagtttattatcatgtggtggctgtcgctcaaaaagagatacagggtaattgcgaaagacttaccggaagaaagactttatgactcgggaaatgagagtttgtcggatatatgatcgctttcttacaagctcttttcgataaatcgcgttaataattcggtgaaactgctgtctgttaatcggttttattgtatctttgcggtctgaagttacgaaaagagtgtaatttattggaaatgagcattgggtaatcgctcataatagtaataggttacgaattagttagttatctactgcattattcttctgtgcgttgcgtaaccttcaaagaactcttcgtatgcaaaagtaacaataaaacgggagatttagaaatgaatctcctgattttttcttctcacacaagtttttccgtaaaagcgattttatccgtcagcacaccatcgcccaaaaagattttgaacgaacgtgtgccgactgccgcataagcggagaaaagggctttgcctcacgcctaaacaatagtttagactgatgagacaaggcccctttcttttgtgcttatgccaaagaggtgcttttacggggttttgacgatttttcttttttcgttgtccttttgagccggaagcggaaagccgtgtatgaccgcaaattccataaatggaacaagccgtcac

SEQ ID NO: 3026 - DNA, 10637 bp, Unknown
  gut microbiota DNA sequence
cctttttgttgtatctttgcagccaaaaataaatatcagctaaacaacaaaaaaaggattagagaatttagcatgaaaaaagctccttccccactcgtatcactgataccgattattgtacttgttctattattattcgctactatccatactttcggcagcgacgcactgagtggcggcagccaagtgtcactgcttactaccaccgcagtctgtatccttatcggcatggcattctacaaaatcccatggaaagactacgagctggctattacaaacaacgtagccggagtgacaactgctatcattatcctgctgattattggtgcgctcagcggtatctggatgattagcggtgtagtgcctacgctgatttattatggaatgcagattatccacccaagtttcttccttgcatccacctgcattatctgcgtactgatttcagtcatgaccggaagttcgtggactacaattgccactatcggtatcgcattaatggggatcggtaaggcacagggatttgaagaaggttggattgctggagcgatcatctccggtgcctattttggcgacaaggtatctccattgtcggaaactaccatattggcagcctccgtcacagacactcccctcttccgccatatccgctacatgatgataaccacgattccttctcttgtcattaccctgattattttcaccgtagcgggattctcacatgatgccaacaatacgcaacatatcacggaggtggccgccgcactgaatgagaagttccatatcacaccatggcttctgattgttccggtcgccacgggaatattgattgcacgtaaggtaccttctatcattacgctgttcctgtcaacattgctggcaggcatctttgccctgatatttcaaccggatttattacaggagatttcgggaatggccgcctccggcttcgattcgctgttcaaaggactgatgatgaccttctacggaagtacaagtctgcacacagataatgccgttttgacagatttaatcgctacacgtggcatgtccggcatgatgaatacgatttggctgatcttatgtgccatgtgctttggcggggcgatgacagccagcggtatgttgggaagtatcacttctatctttgtccgttttatgaagaaaacagtcagcgtggtgggagctacggtttgttccgggttgttcctcaatctggcaactgccgaccaatacatcagtatcattctgaccggaaatatgttccgcgacatttatgctaaaaaaggttacgaaagttgtttgctgagccggacgaccgaggattcagtaaccgttacatccgtgctgatcccctggaatacctgcgggatgacgcaggctacaatactaagcgtccccacattggtatatcttccctattgttttttcaacattatcagccctttaatgagtattgccgtcgcagcgatcggatataaaattgcgcgacgctcgtgaacaatctggcacagactttgtttttgcaataaacggacaacgtattaaacctaaacaaaaaaaagttatgaaaaagtttattgcattattagcattagtattagtaagtgcaagcacgatgatgtatgcacaggaaagtaacgcagcagcacgccgcgcagaaagaaaagctcaaagagatgcggaaagagctaaactccgtgccgaagaacaggtgcaggacatggcagcttatcaacaagccgtacaggctttgaagaataaacagttcgttctggaagccaatcaggtaatattccgcaatggcatgagcgcttttgttacttcaaacactaacttcgttctgatgaacggcaacagagccacagtacagactgctttcaacactccttatcccggccctaacggaatcggtggtgtcacagtagacggtaattcttcggacatgaagatgaatgtcgacaagaaaggtaatgtgaactgctcattcagcgttcaaggtatcggtatctccgctcaagtatttatcaccatgagcaacggagacaacaacgcttcagttacaatcagccctaacttcagcaacaataacctgacactgaacggaaatatcattccgctcgaccagtccaacatcttcaaaggacgttcctggtaatcgggatacaagaatcttggaacaactccgctacaaatcgcgcaaaatgcgtacatttgtagcggagtttttttaattcattaatttcctatgagagaatatatcatcgcagacaatcaggacatcagtaaagcggggatgatgtttctgctaagcaagcagaaagatgttgccaccctcttagaagctgacaacaaggcagaactgattcagcagctccggttgtatccgcaagcggtggtagtgctggattatacgctattcgattttgccggggcggatgagctgattgtcttgcaggaaagattcaaagaggtcgactggattctgttctcggatgagttaagtattaattttctccgccaggtattgttcagcagtatggctttcggggtagtgatgaaagataattcaaaagaggaaatcatgactgctatccaatgtgccggccgtaaacaacggtatatctgcaatcatgtcagcaacctgctgctttcaggcgctgcttctcctgtggccggcacaataacagaagaccatttgctgacgcaaacggaaaagaatatcctgaaagaaattgcactggggaaaacaacgaaagagattgcagcggaaaaaaatctaagcttccatacaattaacagccaccgcaaaaatatcttccggaaactgggagtgaataatgtgcacgaagcgactaaatatgcgatgcgggcagggattgtggatttggcggaatattatatctaaaaacaatctacttcacggcgtcaatccctgcaagaagctcttcatccgatttccccactccccacgcaaacctgcgcagcctcatcataaacaactccgaactgtccgggggcaatgccctgtaagttttcagaagacaagatacggaactgcctctctccttcctgcacaagtttccctttcgtaaattcgggagtatggcgaatcttgaaagtgatgcctatctcctttcctgctgactgccacggattatccgtaataaaatggaaatcgttgatgcgaagttcattgccgtattgtgttttcacaccgtaaccacgggacacatagataatattctcctgaatatctttctttatcacaaaccaaggaccaccacttaatccgagccccttgcgctgaccgatcgtatgaaaccaataaccccgatgcgtacccagtttcttaccagtctccagttcgataatcatcccttccttttctcccaaaaagcggcggacaaaatcattgtagtttatctttccgagaaagcaaatgccctgactgtcttttctccgggcactcggtaagcctgcattcaacgctatctcacgcacttcatgcttcatcagtccgccaatgggaaacatcagcttggaaacttgcagataatctatttgtgcaaggaagtccgtctggtcctttacaggatctttcgctgtcccgagccacgtcttaccgttacgttgcaaggtagtggcgtaatgtccggtagccgtataatcaaagtcttttccgatacgctgttcaaagcagccaaacttaataagtttgttgcacatcacatccggattgggtgtcagccccttcttaatcttatcaatggcataggccgccacattgtcccaatactcgcgatgtaaatccaccacctccaaagacagaccgtatttacgggcagtagcggtagacaattcaatatcttcctctgccgaacaatccatatattccgccccgtccatgccgatcttaatataaaaaagagtcggcttgtatccttgctcacaaaggagatgtacgaccaccgaactgtcgacacctcccgataataatgcagctatatccatccaaaaatcctattaatacctattgataactttgatatggcaaagataagggcatatccgctaacaaccaatcacacattgaaggcatttttataccataaatgtggtagataagcaaagtatttcctacatttgcacagtgaaaagctttttataatgacaaaattaagaaagataatccttatacctgccctggttatcgtatctatcagcggctttttctcctgcggtgtcgaccgctggccggagtatgcccacatgactgcattggacacatggatgtacgatatcatgcaacagaactatctgtggtatcaagacctaccttcctacgatgatgcgaatctgtttctggaacctgcccagttcttgtcaaaagtaaagtcgaagaacgacagttattcgttcgtcgattctgtcatggagactccgctgccaagctatggattcgactattcattggttcgcaacccggacattgatactgcttacaacgcactgattacttatgtcattcccggttctccggccgcggccgtactgaaacggggcgactggattgtgaaagtagacacctcctatatcagcaagaaatatgaaagccaactactgcaaggtacggaacccctggaagttactttaggaaaatatcaattagttccgcccacagagccaccggtagaaggtgaagaagaagaaatttaccgggttgttccggtaggtgatccggtaaagattggtgcagccgtaccattggtagacaatccggttcactgtaagaaaacactgacactgaccgatggaagtgaagtcggctatctgatgtacaacagttttacggcaggcaccaaagagagtccggaaaaatacaacgccgaattacgcgaatggtcggatgagcttgctcagaagaatattcacgaggtaatactcgacctgcgatacaacaaaggaggaagcattgattgcgtacagttgttgagtacgatgcttgtgtcttcttattatcttgaccagacaatgggatttctggaatataatgacaagaacacggataaagatgtgaccctgacatttgactccaaacttttaaatacctccggcggcaagaacctggacttaacaacccttatcgtcctgattggcggagaaacagcaggagcaccggaaatgctgatgcactgcctgaacggaaagattcaaaaattaatagctatcggcagttcaacaaaaggacaaaatgtagccacggaacaattcatcaacgaagaattccaatggtccgtcaatccggttgtagctactatctatgactccgagcatgatacttaccccggattcaaaccgacatactcagtcaatgcttcaacagattacttaactttcctgcctttcggtgatgaaaaggaaactttgttgagtgttgccctcggagtattgaacggaacttatccgcctaaagaagaggaagaagaaactccaagcacacgaatcaagatagagaaaagtgtgaatagtccttcgagccggttgttcataggaggaagcggattaagaatcaaataatagccagactacaatttcggcattcttttgtcaagagcagatttatgcatcattaacaaaaaaagcggcattactccgctttttcaaaacgcacgctctaaatctacttaacagagcgtctgtttccggtaaacagagcgtctgttccgacctgacagagcgtgtaatttgtcgtagtccgtcagctaaagtgctttcatccccgagcttacgcccgttatgagccggggtcaagttctcccacatccggcatacaataaaaaaaggagaaagccaatgctttctccttctatcgtagtttaacctcaatctattttatgattatgtatccaaagatacgacatccaaaagctaaagtcaagcattagcccttttatttcttgaaaaacttatcaaagaacagaatctgatagtcaatggagttattccaatacttcccgttatgtccgccgggacgagtgataaagtcatggttaatcttccgggccaacagacggttatgcaaatccttgttcacattcagaaagaaatccgcttcaccacagtcgataatgatagccaaatccccgttttctatcttgtcaatctgattgataaccgtatgttcatcccatacctttttattgtatgcaaattcgcccaactgtttcgacatatcccagttcaacgggaacggacggatatctaccccgccactggtacttccaccggcaccaaacgtatctttatgacggatagcgttccacatagccccatgtcctcccatgctcaatcctgttatggcacgtcctttcctgtcagcaatcgtcttataatgtccgtcaatatacttcaccagttccgatgaaacaaaagtttcgtaacggtaagacggatctttcggactgtcccagtaccagctattctttccgtccggacaaacaaagatgattcctttttcatccgcaatctgcggaagatccggtttcaccccgatccatgttttagcatttccaccataaccgtgcaacagataaatgacgggacaagccaccgctttcttgcccaacgcagcgtccggcgtaacgaccaccacctgtacatccttattcatggaagggctattaactaataaagtatctactttggcagcaaaagagggggccaccaatatcaataataaagcagctaacagaagatttctctttttcattatacgtatatagttagattaaattattcttcctccttttcctctgaagaagggaacttggcaacaggcacctcaaaagtccgttggcactgtccgcaggtatattcccaatgattatctcccggaggggctgccgccaacatggaaagtattgccgcaccgacagcacgcagcctctgtcctttttttaacctgaacttaatatccgacgacccgcaataagggcaaagcgtcaattcttccggccaactctggttatctctcaacacctgaacggctttctcataatcatcatccgccaccagaatgtccactcccgctatgctgctcacacaactcttatataaggtagagaagttttcattgtgcagaatagattcaatcccttcgttctccaacgctccctgaaggatatgtgccttcatcgcgtcattgcaagtaatcagttttacagtcttcataaggaatctgtttttatatttcccacaaatatagaacatattctttttttattcactgaatatatcattctttaatacttttttcgtactttcgcagcactaaactgcaaccgcatgaaaagattgttgacacttctactgtttttcaatactatgctccttctgttgcaagcacaacctatgcatcagataaagggaacggtgattgacaagaatagtcgtcagccattggaatttatcaatgtgatgattatcgggctgaataagggcagtgtcaccaatgctgaagggcgtttcaccattgaacaagtgccgccgggcatttaccgcctgcaagcatcggcaatcggatacaagagcgttacgacctccgaatacatcttatctaccaaaaacctgaacatcccgatagaaatggaggagaacctgaccgaactcgaaggagtgacaatcaccgcctcccctttccggtgcgatgtggaaagtcccgtcagcctgcgcattatcggaatacaggaaatagaaaagagtccgggagccaaccgggatatttcacgcatcgtgcaatcttaccccggagtcgccttttcaccgataggataccgcaacgacctgattgtgcgaggcggggcgccttccgaaaaccgcttctatcttgacggagtggaaatccccaacatcaaccacttcagtacgcaaggcgcatccggcggtccggtaggaatcctcaacgccgacctgatacgggaagtaaatttctataccggcgctttccctgcggataagggaaatgcacttagttccgtactcgacttcaagttgcgcgacggagatatggaacgcaattcattgaaggctacactgggagcttccgaagtttctttggcttccaacggacatataggcaagaagacttcctacttggtttccgtgcgccagtcttatctgcaattcctgtttgatatgctcgatttgcctttcctgccaacctttaccgatgcacaattcaaactgaaaacccggtttaacgagcagaatgaactgacggtattaggactgggcggaattgataatatgcggctgaatacgaaagctgacagtgaagacaatgaatatatcctgagttatctgcctaagataaaacaggagacatttactgtgggggcagtctatcgtcattatgcaggtgcacacgtgcaatcggcagtagtcagccatagctatctgaacaaccgtaatacgaaatatcgccggaacgatgaaagccatccggataacttaatgctccgcctccgttccaccgaacaggaaacgaaactccgtctcgagaacagcactactttccgtaattggaaaatcaatctcggcatcaatctggattacagccaatataccaacactacctttcaacgggtgtacactaaccagccgcaaacttttgattatcacacgtatttaggaatcttgcgctggggacttttcggaacgatcaattacacttcaatggacgaccgcttcactgcctctctaggtctgcgggccgacgccaatgattattcatcaacaatgaagaacctttccgaccagctttctccccgcctgtcactctcctatcaactagccgatcattggtttgcaagcggaaatgcgggactgtattatcaactccctgcctacacggctctcggctttaaaaataataacgggactttcgctaataaatacaatctccgttacatgaaagtgagtgaaggaagtctgggaatcagttggcgaaagggagataccttcgaagcatccgtagaaggattctacaaagattatgataagatccctctttccgtagcggacgggattcctcttaactgcaaaggaaatgattatggagtagtcggtaatgagttacttacttccactgcacaagggcgctcctacggtgcggagattttggtgaagtggcttattgccaagaaactgaatctggcttcttcctttaccttgttcaagagtgaatatcgcaacgataaagaaagcgaatacatcgcctccgcgtgggacaaccgctatatattcaatctgcggggaacgtataatcttccgcatcaatggagtttcggcatgaaggtaagctgcatcggcggtgctccgtacactccttatgacgaaaccaagtcgtctttggtatcagcatgggatgcacagggaaaagcatattacgattactctaaatataacaaagagcgtctccccgcttttgcgcaggtggatgtacgcgtggacaaaacgttttatctgaaacattgtatgctgggattttatctcgatttgcagaacatcacagtcagcaagctgaaacagcaggatgtgcttatgagtaccggcatcatcgagaacccggaagctcccgccgctgcgcaacgatacaggatgaagcgcattaaacaatcaagcggaacattacttccgacactgggaatcacatttgaatattaaccatagtttgaaacattaattgaaacgagaatgaaaagacaaattgctatgattgccctgttgtttttgggtatgggaatgacagcttcggcacaattcggaaagaagtttaatgtagggaaagccctgcaagctggaaaagacgtagtatcggcagttactttatcagacgcggacatcgccaacatgagtaaggaatacatggtctggatggatgcacacaatccactgacaaaacctgacactgaatatggcaaacgtctggagaagttgaccggccacatcaaagaaatggacgggctgaaactgaacttcggtgtttatgaagttgtagacgtgaatgcttttgcctgtggagacggcagtgtacgtatctgcgccggactaatggatgtgatgactgacgaagaagtaatggcagtagtaggacatgaaatcggtcacgttgtacacactgactctaaagacgcgatgaaaaatgcctaccttcgctcggcagtgaagaatgcagcaggtgcagccagcaacaaagttgccaaactgactgactctgaactgggagcaatggcagaagctcttgctggcgcacagtattcacaaaagcaggaaaacgaagcagacgaatacggtgttgagttctgtgtaaaaaacaacatcgacccttatgccatggccaacgcattgaccaaactggctgaactggcaaaagacgctccgaaatcttcttatgtacagagaatgttctcctctcacccggataccgccaaacgcatcgaacgcgctaaagccaaagcagacagctataaaaaataaggagtatctctcgctttatcttatataagaaggaggtgtgtcaaaatgcgcaccttcttttttttaagcacaaagccccgactttcacaagctggggc

SEQ ID NO: 3027 - DNA, 12273 bp, Unknown
  gut microbiota DNA sequence
tgaagaaagaagaaggtggtcgtcacactccgttccacaacaaataccgtcctcaattctatctgcgtactatggactgtacaggtgaaatcactttgccggaaggaacagaaatggtaatgccgggtgataacgtaactattacagttgagttgatctacccagtagcattgaacccgggtcttcgtttcgctatccgcgaaggtggacgtacggtaggtgctggtcagattactgaaatcatcgactaatacacaataattaatcagttctcggtgtaaatcgggaactgattatgtacaaacgggagtagctcagttggtagagcaccggtctccaaaaccgggtgtcgggagttcgagcctctcctcccgtgctaatattattgaaatgaaaaaggtaatagcttatattaaagaatcttacgacgaacttgttcataaagtatcgtggcctacgtattccgaacttgctaacagtgcagtagttgttttatatgcttccctgcttattgcattggtagtatggggtatggatgtctgtttccaaaacttcatggaaaaaattgtttatccacattaaaaacaggaattgaaaatggctgagattgaaaaaaaatggtacgttctgcgtgctattagcggaaaagaagctaaggtaaaggaatatcttgaagctgatcttaaaaacagcgaccttggtgaatatgtatctcaggtattgattcctactgaaaaggtttaccaggttcgcaatggtaaaaagattgtgaaggaaagaagttatcttcctggttacgttttagtggaggctgctctggttggtgaggtcgctcatcacctgcgtaatactccgaatgtgataggctttttgggtggttccgagaaaccggtacctctcagacaatcagaagtgaatcgtatacttggtacagtggacgaactgcaggaaacgggtgaagaactcaatattccgtacgtagtgggtgaaactgtaaaagttacttttggtccttttagcggattcagtggtatcattgaagaagtgaatagtgaaaagaagaaactgaaggtcatggtgaagatattcgggcgaaaaacaccgcttgaattgggctttatgcaagtggaaaaagaataacgcggaattgttacgctgttgttgttcttcgtttaatgtttatatataaatcaataaaaaaatggctaaagaagttgctggactaatcaaattacagattaaaggaggcgctgcaaatccatcacccccagttggacctgctctaggttctaagggtatcaatatcatggaattttgcaagcaattcaatgccagaacccaagacaaagcaggtaagattttgcctgttatcattacttactacgcagataagtctttcgattttgtaatcaagactcctcccgttgctattcaattacttgaagtagctaaggtaaagagtggttctgctgagcctaaccgtaagaaagttgccgagcttacttgggaacaaattcgtacgattgctcaggacaaaatggtggacttaaactgttttactgtggaagctgccatgagaatggttgcaggtacagctagaagtatgggtatcgctgtaaaaggggagttcccggttaataactaataaacttcaattgtaatgggtaaactgacaaaaaatcaaaagttagctgcagaaaagattgaagcagggaaagcatactcactgaaagaagctgcatctttggtaaaagaaatcactttttccaagtttgatgcttcactggatatagatgtacgtttaggtgttgacccacgtaaagctaaccagatggtgagaggtgttgtttcacttcctcatggtactggtaaacaagtacgtgtgttggtactctgtacaccggatgctgaagctgctgcgaaagaagctggcgctgactatgttggtcttgacgaatatattgaaaagatcaaaggtggatggactgatatcgatgtgatcatcactatgccatctatcatgggtaaaattggtgcactcggtcgtgtactcggtcctcgtggattgatgccgaatcctaaaagtggtaccgtaactatggatgttgctaaagctgtaaaagaagtaaaacaaggtaagattgactttaaagttgataagagcggtatcgttcatacttctatcggtaaagtatcattcagtgctgatcagattcgcgacaacgcgaaagagttcatctctacattgatcaaactgaaaccgaccgcagcaaagggtacatatattaagagtatttatctttctagtacaatgagtgcgggtatcaagatcgacccgaaatcagtggaagaaatctaataaaacagagaaataatgagaaaggaagataaaaattcgattatagagcaaattgctgctacggtaaaggaatatggtcacttctatttggtagatgttacagctatgaacgctgctgctactagcgcattgagaagagattgttttaaatcaggcatcaaattgatggtggttaagaacacattgcttcacaaagcacttgaaagcttggaagaagacttttctcctctttacgattctttgaaaggtactactgctattatgttttgcaacattgcaaacgttccggctaaactgatcaaggataaagcgaaagacggtattcccggactgaaagctgcatatgcagaagaaagcttctacgttggtgcagaccaattggatgctctcgttgcaatcaagagtaagaatgaagttatcgctgacatcgttgcattgttgcaatctccggcgaagaatgttatttctgctcttcaatcaggtggtaacacccttcacggagttctcaaaactcttggtgagagacccgaataattttcaaaaatcaacaaagtatttaaacaattaaaatcatacaaaaaatggcagatttgaaagcttttgcagaacaactagttaacttgacagtaaaagaagttaatgaacttgcaactatccttaaagaagaatacggtattgaacctgctgctgcagctgttgctgttgctgctggtcctgcagctggtgctgctgccgcagaagaaaaaacttctttcgacgtagtattgaagagcgctggtgcagctaaacttcaggtagttaaggctgttaaggaagcttgtggtcttggtttgaaagaagctaaagacttggtagacggtgctcctagcacagtaaaagaaggtttggctaaagacgaagcagaatcattgaagaaaacattggaagaagctggagctgaagttgaacttaaataacattggcctggtaatcaggtaattcggttaggaatccttcgcaagaggattcttaacctttttgtgtatatatttcaaattaagttctccaaattcattgacagatgtcttcaaatactgtaaatcaaagagttaattttgcttcgactaagaatccgcttgaatacccggatttcctggaagtacaattgaagtcattccaagactttctacaattagataccccacctgaaaagcgcaagaatgagggtttgtataaagtatttgctgaaaacttccctattgccgatacaagaaacaattttgttcttgagtttttggactattatattgatccgccgcgctataccattgatgattgtatagagcgtgggcttacttatagtgttcctttaaaagcgaaacttaagctatactgtacggatcccgatcacgaggattttgatacagtgattcaggacgtattcctcggcccgattccttatatgactgataaggctactttcgtcattaatggtgccgaacgtgtagttgtgtcacagcttcaccgttctccgggtgtattcttcggtcagagtgtgcatgccaatggtacgaaactttattcggctcgtattattccgtttaaaggttcgtggattgagtttgctactgacatcaataacgtgatgtacgcatacattgaccgtaagaagaaattgccggtaactactctgttgcgtgcgatcggcttcgagaacgacaaagatattcttgagattttcaaccttgcagaagatgtgaaggttaacaagacaaatctgaagaaagtgctgggccgtaaactggctgcacgtgtcttgaaaacatggattgaagatttcgttgatgaagataccggtgaggtggtttctatcgaacgtaacgaagttattatcgatcgtgaaaccgtactggaagaggagcatatagatgaaattctggaatcgggagttcagaacatccttttgcataaggatgaaccgaaccagtccgatttctctatcatatataatacgttgcagaaggatccgagtaactcggaaaaggaggctgtgttgtatatttaccgtcagttgcgtaatgctgatccggctgatgacgcaagtgcacgtgaagttattaacaacctcttcttctcggaaaaacgatatgaccttggtgatgtggggcgttatagaatcaacaaaaaattgaatctgacgactgatatggacgtacgtgtcctcacgaaggaagatattattgaaatcattaaatatctgattgagttaattaactcaaaggcagatgtggatgatattgaccacttgagcaatcgtcgtgtacgtacagtaggtgaacagctttctaatcagtttgccgttggtctggctcgtatgtcccgtacgattcgtgaacgtatgaatgttcgtgacaatgaagtgtttactccgattgatttgattaatgctaagaccatttcttctgttatcaattcatttttcggaacgaatgcgttgtctcagttcatggaccagacaaacccgttggctgaaattacacataagcgccgtatgtctgcattgggacctggtggtctttctcgtgaacgcgccggatttgaggttcgtgacgttcactacacgcattatggtcgtctttgtccgattgagactcctgaaggtccgaatatcggtttgatttcttcattgtgtgtgtttgctaagattaacgagttaggattcattgaaactccgtaccgcaaggtagaaaatggaaaagtggacctatctgataatggcctgatttatctgactgctgaggaagaagaagaaaaaattattgcacagggtaatgctccattgaatgatgatggtacatttgtgcgtaataaagtaaaatctcgtcaggatgctgatttcccggttgtcgaaccagcggaggtagatcttatggacgtttctccccaacagattgcatcaattgcagcttcattgattccgttcctggaacatgacgatgctaaccgtgcgttgatgggatcaaacatgatgcgtcaggcagttcctcttttgagaagtgaggcgccgattgttggtacaggtatcgaacgccagttggtcagagactctcgtacacaaatcactgctgaaggtgatggtgtcgttgatttcgtggatgctactactattcgtattttgtacgaccgtacggaagatgaagagtttgttagcttcgagccggctttgaaagaatatagaattcctaaattccgtaaaaccaaccagaatatgactattgacttgcgtccgatttgtgacaaaggtcaacgtgtgaagaaaggcgatatcctgacagaaggttattctactgaaaaaggtgagttggcattgggtaaaaacctattagtcgcttatatgccttggaagggttacaactatgaggatgctatcgttttgaatgaacgtgtggtacgtgaagacttgttgacttctgtacacgtagaagaatattctctggaagttcgtgaaacgaaacgtggtatggaagaattgacttctgacattccgaatgtaagtgaagaagctacaaaagatctggatgaaaacggtattgtaagaatcggtgcccgtatcgaaccgggtgatattatgattggtaagattacaccgaaaggtgaatctgatccttctccggaagaaaaattgcttcgtgcaatcttcggtgataaggctggtgatgtaaaagatgcttcattgaaagcttctccttctttgaaaggtgtcgtaattgataagaagctgttctcacgtgttatcaaaaatcgtagctccaagctggctgacaaagcattgttgcctaagattgatgatgaatttgaatcaaaggtagcagacttgaaacgtatcttggttaaaaaattgatgattttgaccgaaggtaaggtttctcaaggtgtgaaagactatttgggtgcggaggttatcgctaaaggctctaagtttagtgcatctgatttcgattcactcgattttacttctatccagttaagtaattggactagtgatgaacatgctaacggtatgattcgtgacttggtgatgaatttcatcaagaaatacaaagaactggatgctgaactgaaacgtaagaagtttgctattactatcggtgacgaacttccggctggtattatccagatggctaaagtatatattgctaagaaacgtaagatcggtgtcggtgataaaatggcaggccgccacggtaacaagggtatcgtgtcacgtgttgtacgtcaggaagatatgccgttcttggctgacggtactccggttgatatcgtattgaatccgttgggcgtgccttctcgtatgaacatcggacagatttttgaagctgtgcttggacgtgccggaaagacattgggcgtgaaattcgcaactcctattttcgatggtgctacaatggaagatttggacgaatggacagacaaagctggattgcctcgttactgtaaaacttatctttgtgatggcggtacaggtgagcagtttgaccaggcagctaccgtaggtgtgacttacatgttgaagttagggcacatggttgaagacaaaatgcatgctcgttctattggcccgtactcattgattactcagcaacctcttggtggtaaagcacaattcggtggtcagcgtttcggagaaatggaggtttgggcacttgaaggctttggcgctgctcatatcctacaggaaattctgactattaagtctgatgacgtagtaggacgttcgaaggcttatgaagcaattgtgaaaggtgaaccgatgccgcaacctggtattccggaatccttgaacgtattgttacacgagttgagagggttaggcttgagtatcaacctagaataaaatactgaaagaatgtgtgatgtcaatgcacctatgaaggttcattgacattcgcaccttttcaatttctaatgattcaattatcaaatctcaattatatagagtatggcttttagaaaagaaaataagacgaaaagtaatttctcgaagatctcaattggtctggcttctccggaagaaatccttgagaattcgagtggtgaagttttgaagcctgaaaccattaattaccgtacttacaaacccgaacgtgacggtttgttttgtgaacgcatttttggtcctataaaggactatgagtgtcattgcggtaaatacaaacgtatccgttataaaggtatcgtctgcgaccgttgtggtgtggaagttactgaaaagaaggtacgtcgtgagcgtatgggacatattcagttggtggtcccggtggctcacatttggtatttccgttcgctccctaataaaatcggttatttgctcggattaccgacgaagaagttggattcgattatatactacgaacgttatgttgttattcagccgggtgtgaaagctgaagatggcgtagctgaatatgatttgctttctgaagaagagtatctggatattcttgatacacttccgaaagataatcaatatcttgaggataatgatccaaacaaattcatcgctaagatgggtgctgaagctatctatgatttgctggctcgtttggacctggatgctttgtcttacgaacttcgtcatcgtgctggtaacgatgcatcacagcagcgtaagaatgaagcattgaaacgtcttcaggtagtagaatcattccgtgcatcacgtggacgtaacaagccggaatggatgattgtacgtattgtaccggttatcccgcctgagcttcgaccgttggttccgttggatggtggccgtttcgctacctcggacttgaatgatctatatcgtcgtgtgattattcgtaacaaccgtctgaaaagactgatcgaaattaaggctccggaagtgattttacgtaacgaaaaacgtatgcttcaggaatctgtggactcattgttcgataactcacgtaagtcaagtgcagtgaagacagatgctaaccgtccgttgaaatctttgtctgacagtttgaaaggtaaacagggacgtttccgtcagaacttgttaggtaaacgtgttgactactctgcgcgttcggtaatcgttgttggcccggaattgaagatgggggaatgcggtattcctaaattaatggctgcagaattgtacaagccgtttattattcgtaaactcattgaacgtggtatcgttaagactgttaagtctgcaaagaaaattgttgaccgtaaggaacctgtgatctgggatattctggagcatgtaatgaaaggacatcctgtactgttgaaccgtgcaccgacattgcaccgtttgggtattcaggctttccagcctaagatgatcgaaggtaaggctatccagttgcaccccttggcatgtacggcatttaatgccgactttgatggtgaccaaatggctgttcacttgcctttgagtaacgaagctattcttgaagcacaaatgttgatgcttcaatcacataatatcttgaatccggcaaacggtgcgcctattactgtgcctgcacaggatatggttcttggtttgtactacattactaagttgcgtgctggtgcaaaaggggaaggtttgacattctacggaccggaagaagcgttgattgcttataatgaaggtaaggtagatatccacgctccggtgaaggtaatcgtgaaagacgttgatgaaaatggtaacattgtagacgtgatgcgcgaaacttccgtaggtcgtgtgattgtgaacgaaatcgttccgcccgaagcgggttatatcaatactattatctctaagaaatctcttcgtgatattattagtgatgtaattaaggtttgtggtgtagctaaagctgctgactttctggatggaatcaagaatttaggttaccagatggcattcaaaggtggtctgtcattcaacttaggtgatattattattccgaaagaaaaagaaacactggtacagaaaggttatgacgaagttgagcaagtcgtaaacaactataatatgggtttcatcactaacaatgaacgttataaccaggtgattgatatatggacgcatgttaactcagagttgtctaatatcttgatgaagactatttcttcggatgatcaaggtttcaactctgtatatatgatgcttgactctggtgcccgtggttctaaagaacagattcgtcagttgtctggtatgcgtggtttgatggcaaaaccgcagaaagcgggagcagaaggtgggcagattattgaaaacccgattttgtcgaactttaaagaagggctttctgtgttggagtactttatctctactcacggtgctcgtaaaggtttggcggatacggctttgaagactgccgatgccggttatctgactcgtcgtctggttgacgtatcgcatgatgtgattattacagaagaagactgcggtacactccgtggattggtttgtacagaccttaaaaataacgatgaagttattgcaactctgtacgaacgtatcttaggtcgtgtttccgtgcatgatattattcatcctactaccggtgaactgttggttgctggtggggaagaaatcacagaagaaattgccaaaaagattcaggattctccgatcgagagtgttgaaattcgttcggtattgacttgtgaagctaagaagggtgtttgtgctaagtgttatggacgtaaccttgctacgagccgtatggttcagaaaggtgaagctgtcggcgtaattgctgctcagtctatcggtgagccgggtacacagttgacattgcgtacattccacgcaggtggtactgctgccaatattgcagctaatgcaagtattgttgctaaaaataatgcacgtcttgagtttgaagagttgcgtacagtagatattgtagatgaaatgggtgaagctgcgaaggtggtagtaggtcgtttggctgaagttcgtttcgtagacgtgaatactggaatcgttctttctactcataatgttccttatggttcaacactgtatgttggtgacggtgatttggtagaaaaaggcaagttgattgctaaatgggacccgttcaacgctgttattataactgaagcaaccggtaagatcgaatttgagggcgtaattgaaaacgttacttataaggttgagtcggatgaagcaacaggccttcgtgaaattattattattgaatctaaggataagacaaaagttccttcggctcatattttaacagaagacggtgacttgatccgtacgtataacttaccggtaggtggtcacgtgattattgaaaacggtcagaaagtgaaagctggtgaagtaatcgtgaagattccgcgtgccgttggtaaggcaggtgatatcacgggtggtcttcctcgtgtaaccgaattgtttgaagctcgtaacccgtcgaatccagctgtcgtttctgaaatcgatggtgaggtgacaatgggtaagatcaaacgtggtaaccgtgagatcatcgtaacttccaagactggtgaagttaagaagtatctggttgcattatctaaacaaatcttggtgcaggagaatgactatgtacgtgctggtactccattgtctgacggtgccactacaccggcggatattttggcgattaaaggtcctacggctgtacaggaatatatcgtaaatgaagttcaggatgtatatcgtttgcagggtgtgaagatcaatgacaagcacttcgagattattgtccgtcagatgatgcgtaaggtacagattgaagagccgggtgatactcgcttcttggagcaacaagttgttgacaagttggagttcatggaagaaaacgatcgtatttggggtaaaaaagttgtggttgatgctggagattctcaaaacctacaaccgggacagattgttactgctcgtaagttgcgtgatgagaacagtatgctgaaacgtcgtgacttgaaacctgttgaggttcgtgacgctgtggctgctacatctactcagattcttcaaggtataacacgtgctgctttgcagacttcaagctttatgtcagctgcttctttccaggaaacaacgaaagtattgaatgaggctgctatcaacggtaagattgataaattggaaggtatgaaggaaaatgtgatttgtggtcatttgattccggctggtacaggtcagcgtgaatttgagaaacttattgttggatcaaaagaagaatatgatcgtattttggctaataagaaaacagtacttgactacaacgaagtagaataatacaattcaattgactatatgagaaggagcagttgctatattgggcagttgctccttttttgttccttttttattggaatgtattatctctgtctcaggaaaaatgtgttattttgcaggataactttaatcatattaaacatggaagaacaaaataacaacgggcagttacagattgaattaaaagaagaagttgcacagggaacttatgcaaatcttgctattattactcattcgagttctgagtttattcttgattttgtacgtgtgatgccgggtgtaccgaaagctggtgtgcaatctcgtatcattgtagctcctgaacatgcaaaacgcctactacgggcattggaagacaatatagctaaatatgaacgtgtattcggttcgatccgtatttctgatgagtctcctatttctcctttggcgagtgtaaaaggcgaagcgtgaggggggatataaaaatattaaaaaataaaaaaaggttgtagtgcattgaatattcaaatattattcgtatttttgcagcccaaaatgtatagttacgaaattaatataacaataatataaatcaaaaaacaattaaaatgcctacaattcagcaattagtaagaaaaggacgcgaagtgctggtggagaaaagtaaatctcc

SEQ ID NO: 3028 - DNA, 55277 bp, Unknown
  gut microbiota DNA sequence
gatagtttctattttatcttagcttaatagctgataaggattggtatagagataatgataatctatacctgaaatgattttttgagaatgaaagtggtataaaataaaatgttgagatgtaattagcacttagagtgtttgtatgtgagatgaagagaatgtaggtccctagtttcatgttaacgcatgattctcctacattacatagattggaaagagtacgacggtacctttccggtctataaccccggcaccggggggtatccggtgttaatttcccacgatatcaacggtctgtgaagatagttgatatttttaacaaaacaaacagctacgggagacagtattacactgcctcccgtagctgtttatatattagaatactcctttgtgcagctaaagcatgggcactccttcatcggattcaaatcatggtgccccacgatcaacgctttcggaaactgcctgcgcagttcgcgtaatagagccagcagggaaccccgttgttcaagcgttcgagtatccttcgggcaacagtcagcatccagtcctccttcgtagcagatacctatcgagtgggagttgtggttacggcagtgtgccccgaccttttcgagaggacggccacggtggatctctccgtcgcgtgtaatgtagaaatgatagccgatgtcgcggaatccccggtggaggatgtggtccagtcggcaggcttccgccgaaagggatttcccctccggcgtggcactgcaatgaatgataatcagtgtgatagttctcatcagcttacatacagctttgcactccgagcacaccccctatggcggtggcgacagtaatgataattttgagaaccaggctccatacggagcggcgtgacgatgaattgctcataatttatttttttaaggttaagaaattagactgacggatcaggagtcactccaccgccgcccgggttgggattcggcgtattaccggaaccacctccttcggtagtcggcttctgatactccgcttgctgcttcagttggctgtcgagtttcaggttggtagtcgagaggttaccggtggcacgtgctttgaggcgcataccggtgatattcttctccaacgaaaaatcctccagcgtttcggctgccttactgcggattcccacgccgaaaatggcgagatcgtcaattttcacactcttgccgtcgagcagcaattccttgatacagtccaccatgtcggtgagtacacctttgatgacaccactcgaatacggtgaattgtgtttcgacatgtgttcggcgagcttggccagatcgaatgtctcgtcgcttaccgcacgggcgaaccacttgcccgcattcacacctttcttctgctggttctgatagattttgtaacgaatcataacactataaattaaagggttaaacatattgtcgtggggagctgtttcccttccgacgatacaaagataacaccccgtaatcccggaaaatcagttgtatacaattgtatgcggttgttgtcggttaaggacagtaacggtcggttattcaacggaaaagcgtaggaaatgtgaaggctttttgttacatttgtagctaataatttaaaacttatccattatgaaagaattcacgatacgtgcttatggacgcatggaactggcgcaactttattctcccgaactgaccgatattgccgcatatcgaaagatgaagaaatggatcgaacggtgtcccggacttcagcaacgcttgtatgatttgggctaccaacccgaacaccgttcttatacaccattggaggtgagagtgattgtggatgcattgggagaaccttagagggattcgctttaggataacaaaagcaccgctttaagacagctaaagcatagctttacgcactctaaagctatgctttacgtcttacaagatacaacgtcttacaacacacactactgtggtttcgggtacagcaggtacacttttccgggggctctcttacgcacgcacacgcgcgcgagcaatcatatagtttcctttgccgtctacgtgaaccagatctccgtagtctaccagacgtttcagccagatgagcgcggtgttctccttaatacccatgacagctgcctgctctcgtacctgtttgcgggtaaacgtggtccccagtttcatgaagaaaaaatcacgctcgacgtttgcccggcgactgatttctgtgggaggaaggaaagaaagtatatgcatggcatggcagtagaggggctcggcaagttggagcaccgctttgaaatcactcggagtgatcttgacatcccagcgggtgatgatgccgtctttgatattgtcatcgggaatctccttgtccggagtcaggagaggggtcgaagatgccttgagttgatagggctgtgcgctttcgagcgcacgcaatacagccacttccgccatgatacggcatgtgttgacacccagacgggccacgaaactatacatctcattcccgttggctatacccgaacgggtgaaaagggcagagaatagagtgtcaaattcttgtttctgctcgtcggtgagccggagtgtgtggagaccgtgtgccttcagtaagtccagtttctttttccaatccaatcctatggtggtgaatatctcttctatgtctatgtctcctgtcgtaaactggcttacccactgccagataccgggcatatagtagaacagttggcgggagaaaagcccgttttccgccgaagggatgagggcttttacctgcgccggagttccggaaagcaggacggagaggtagctttttttaatttctcggtattcctggtcggtacggcggttgtaagacaaacggtcgtggtcgaatgctttgcgcagggtgtcgctccagtgtccgtaatccgatcctatggcggtggacagggtatccgcttcggactcacagataaatcctgttccgttggcatccatgatgttttgcagaatgccggtgccggtattgttgcccgcgatgaggaacattttgttggccggtatttgcggggcgtctattttagaacgttccttgcccattgcttcgtaggcggctttggcttttttgtaggcttttatttcttcggcccattcggcgcggagctggtcatggataggatccacaagcagccgtatggatgacagggcactttttccggaagcagggagagctataatgaaactttgcatgcagggggactggagtttaccgccataaggacaccgtacataccgttccatgcaagaacccagagcggtcagtgctcccaatagcatgacatcgttctgtgcgtcggtacttccgtaactcataatacgttgcaggagttccggccagtcggctgccggaaaagtgggtagcggctgtttgggttcgctacccggcaacagttcctcagactccggactctcgctattgtataccttattacgcgcgcacgtgtgtgcggaaagtttttgcgctgtacctgctgtaccttttgtacctgtccggctgtttgcaacctcctctttgcggacggtaactcctgccgcttcggcgagatagaacaccgtgcccagatgcatatccccatgattggctgtgagtgcgttggagaatatccgttcggcgtgttcgcgttggtatttggcggaaacccggcacaagcggtggaaaaagtcgcgtccctcttcgccgcaatcggttgcaatggcgaacgccaggtgtacgtattcgatgtaagtgggggcaatgtcagccttggctgtttctactgcctccgtgaggcggcgtaatgattcaagttcattcatttttttatagattgagaattaataatgttacgaaataatgcatccggatcgtaattgaggaaacaggcccttacgaggtcttttcccgaacagtccacgcctttcgaggcatttctgccagaattgtcaggttccgggccgtatgccatttcgacatactgcatggctttgttcatactttccgtgatattttgtgcttcgtcttcgggatacagcgttccggaagggacgaaagccttcactccccggccgctcggactgacatacgtgagcacggggcagaggaagggatcatcgaatagcagacggcgcatactgacggcttcgtcgtaggagtcgaggttgtccacatctatcacgaccagcccggaaggggatacgaaacacttgctgttgcggcgtgtgaaggtgccgcagggtgtcacgtaaggcagcagtgtcgctttggcagtccgcatatccggagcgttgcgtacctgagcggtcaggagtttgagattctcgttgcaggtaatcatttggaagacctgctccacggagacttcgcagaaggggaggagcgtgggaggagtaaccattcgtccctgttcgttcctgacaggagcgataggtggcatgaaatatgacattctgtactggtttggcataatctttgttgtttacgggtcaaaaacttttcttctttcaaaacgtgcttgattttcaaaacacgacgtgaaactacgaaaaacaaaaaaatagacggttctgatatgtcagaaccaatgtgaaaataaataacatactaaggtgtatttttaacaactaatagatattgaacatgaaaaagaacttcaaacacgtccttctaggtacttttatcgatgaatcgcttaaatgcgcaaacttgacaatgactcacttatgcaaagaaaccggtatggggaaagccagctatgagaatataaaaaaggggaggatatgaaactgcactactacgaatccattctgaacttctactgtgacagtctgacggaagaggagctgctggagaagatacgcgaatggacactgcggtatctctggtatagaaagaagcgcgaggaggaggagggaaacgagaatacccgtgtgcgataacgaaaacacaaaaaataatgtttgattatacataaaaaatacggggaatgcttcgtagttcacaaataatgattaaatttgccgcgatttgtaatgttgagtttgcaaaatgacgaataatactataaagcatctgggtattgtggaaaacatacagggttctcatctgtcggtgaggatcgttcagacatcggcttgcgcggcttgcagcgtgaagggacactgttcctcggcagacagcaaggacaaaatcatagatataattgatactgcggcggcttcctaccaggtgggggaaaacgtaatggtggtcggcgaaacgtcgatgggaatgcaggcggtggccttggcattcattatccctttcgttcttttaatttttacattgttcctttttatggcactgatagagaatgaactgtatgcggcacttctttctctggctgtccttgtgccttattactacattttgtggctcaataaaacgcgactgaaacaaaaattttcatttactataaaaccaataaataactaagaacattatgaatttgattctgattgcagtgatttcattgggagcgatagcgctcgtgctggccgctattctttatgtggcttccaagaaatttgccgtgtatgaagatccgcggattgcccaggtaggggaagtgttgccccaggcaaattgtggtggatgtggctatccgggttgtagcggttttgccgacgcttgcgtcaaagccggctcgctggatggaaaattctgccccgtaggcggacaacctgtcatggctaaaattgctgatatcctcggactggcagccggagaggctgaaccgatggtagcagtggtgagatgtaacggaacgtgtgccaaccgtccgcgtattaatcaatacgacggtgctaagagttgtgctattgccgcttcgctgtatggcggagagacgggttgtagctacggctgtctgggttgtggcgactgtgtggctgcctgccagtttgacgctatccacatgaacccggaaacgggacttccggaagtcgacgaggcgaaatgtaccgcttgcggcgcctgtgtgaaggcttgcccgaaggcgatcattgaaatccgtccgcaaggcaagaagtcgcgccgcgtgtatgtctcttgtgtgaataaagacaagggcgctgtggcacgcaaggcttgcacggtgagctgtatcggttgcggaaagtgcgtgaagacgtgtccgttcgaagctatcacgctggagaacaacttggcttacatcgatcctgacaagtgtaaatcttgccggaagtgcgtggaagtatgtccgcagaataccattatcgagttgaacttcccgccgcgcaaaccgaaggaagaagctccggctgctccgaaagaaacggttactccaaaagaaacggctgaggctccgaaagtaacagaataataacagaataaaatacagaattgtatgttaaagacattttcaattggtggagttcatccacacgaaaataaattgtcggcacatcaacctatcattacggcggaagttcctgcgaaagcggttattctgctgggccagcatattggcgcacctgccaaaccggttgttgcgaaaggggatgtggtaaaggtaggcacacggattgccgaacctgccggctttgtttcggcagcaattcactcttcggtcagtggtaaagtggcgaagattgatacgatagtcgatgccagcggttatgcgaaacctgctattttcattgatgtggaaggtgacgaatgggaagaaacaatcgaccgcagcaagacactggtgaaagaatgcgatctttcggcggaagaaattgtgaagaagattgccgatgccggtatcgtaggtctgggcggtgcttgtttccctacacaggtgaaactgtgtcctcctccttctttcaaggcggaatgcgtgattatcaatgcggtggaatgtgaaccgtatctgactgccgatcatcagctgatgctggaacacgcagaagaaatcatggtaggcgtgtctatcctgatgaaagccgtgaaagtgaataaagcgtttatcggaatcgagaacaataagccggatgcaattcagttgatgacgaaggtagcttccagttatgcgggtatcgaagtggtgcctttgaaggtgaaatatccgcagggaggtgaaaagcagctgattgacgcgatcaccaaacgtcaggtggcaagcggtgcgctgcctatctctacgggggctgtcgtgcagaatgtaggtacggctttcgctgtttatgaagcggtgcagaagaacaagccgttgtttgagcgcgtgattacggtgaccggaaagtcggtggcccgtccgtccaacttcctcgcccgtatcggtacgccgatgaagcagttgatcgacgcttgcggtggtctgccggaagacacgggaaaggtgatcggcggtggcccgatgatgggtaaggcgttggtgaatatcgacgttcctactgcgaagggcagttccggcatcctgattatgaaccggaaggaagccaagcgcggggaagcacaaacctgtatccgttgcgcgaagtgcgtgagcgcctgtcctatgggactggaaccgtacttgctcggagcgttgtccgaaaacggggattttgaaacaatggaaaaagaaagaatcatggattgtatcgagtgcggttcctgtcagttcacttgtcctgccaaccgtccgttacttgactactgccgtctgggtaaaggcaaggtaggcgctatgattcgtgcacgtcaagctaaaaaataacgaatatggaaaataaattaatcgtatcactatcaccccacgttcatggcggagacagcgtacagaaaaatatgtacggcgtgctgattgcactgattccggcttttctggtgtctctctacttcttcggactgggtgccctgattgtcacggctacttccgtggccgcttgtttgttcttcgaatgggcaatcgggaaatatttactgaagaaacctaccacgacaatctgtgacggctctgctatcatcacaggtgtgttgctggcattcaacttaccttccaacctgcctgtatggatcatcattctcggcgcactgtttgctatcggtgtgggaaaaatgtctttcggcggattgggctgcaaccctttcaacccggcattggcaggacgtgtgttcctgttgctttctttcccggtgcagatgaccagttggccggtagtcggtcagttgaccgcctacgcggacgctacgacgggagctactccgctggcattgatgaaacaggcgatctacggcaatacggacgctttaagccagattccggatgcgttgagtctgttgatcggacaaaacggcggatgtctcggtgaagtgagcgcgctggctctgctgatcggtttggcgtatatgctgtggaagaaaattatcacatggcatattccggtatctatcctggttaccgtattcgtgttcgcaggcatcatgcatctggcggctcctgaaaaatacgtgtctccggtgctccaactgctttccggtggtctgatgctgggtgctgtctttatggcaaccgactatgtgacgtctccgatgagtaagaaaggtatgctgatttatggcgtttgcatcggtctgctgacagtggtgatccgtctgttcggcgcctatcccgaaggtatgtcgttcgccattctgataatgaatgcatttactccgctgattaatacctattgtaaacctaaacgctttggggaggtagcgaagaagaaatgaaaaagttacaatcatctttgaaaaatatgttgctggtgctgacgggagtgactgctgtctccgtcgcgttgctggcttatgtgaacgaactgacgaaggggcctatcgccgaggcgaacgccaagacgctgaacgaggccctgaaaaaagttcttcctgaatttacgaacaacccggtggcggaaagcgatacgatcttcagcgagaaagacggcaagaagaatgtcgatttcattgtttatccggccaagaacggtgataatatggtaggcacggctgttgaagccaagtccatgggattcggcggcgagctgaaagtgctggttggctttgacgccgaaggtaaaatctacaactactccctgctggctcatacggaaactccgggactgggttcgaaggccgacaaatggttcggtgcttacgatcctgccaagggtgaacaggcggtgtcacacgaggaaagcacgaagtctatcctgggcatgaatccgggtgaagccgcactgacggtcagcaaagacggcgggcaggtggacgccattaccgcttctacgattacctcacgcgctttcctgaatgccgtaaatgctgcttatcaggcttacaaagccggagggggagaagtgaacggagctacgggtgcttctcaaaaggccgccggtgaaaatgccgatgctgctacgggtgctacaactaaagtggaacttactgattctatcagtgctaattaagaaaggagacagatatgaataactttaaagtaatgatgaacgggattatcaaagagaatcctacgtttgtactcctgctcggtatgtgtcctacgttgggtactacttcatcggctatcaacggcatgggtatgggactggccaccatgttcgtgctgatctgctcgaacgtggtgatctcactgattaaaaacctgattccggatatggtgcgtatcccttcgtttattgtggtgattgcgtctttcgtgacgttgctccaaatggtgatgcaggcatacgtgccgggactgtacgccacactcggccttttcatcccgttgatcgtagtgaactgtatcgtgctggggcgtgccgaagcttttgccgcaaagaacaatgcgctggcatccatgttcgacggtatcggtatggggctgggctttaccattgccctgactttgctgggtgctgtccgcgaatttttgggaacaggcaagatcttcgacctgactattctgccggaagaatacggaatgttggtgttcgtactggctccgggtgctttcatcgccttgggatacctcatcgcattgattaatagtttcaagaaagcttaactctattaaataagaaaagaatatggaatatatattgatatttatttcggcaatctttgtaaacaacatcgtgttgtcgcagttcctgggcatctgcccgttcctgggcgtttccaagaaagtggagactgcaatggggatgagcgccgcggtggctttcgtgttgactatcgctaccattgtcacattcctcattcagaagtttgtgctggatgtgttcggactgggatacttgcagacgattactttcattctggtgattgccggactggtgcaaatggtggaaatcatcctgaagaaagtttcccccgccttgtatcaggcgttgggcgtgttcctgccgttgattacaaccaactgttgtatcctgggtgtggctatcctcgtgatccagaaagactatgacctgctgacaggagttgtgtatgcattctccaccgctatcggtttcggtctggcactggttctctttgccggattgcgcgaacagatgagcctggtgaaagttccgaaaggaatgcagggcacaccgattgcattgattaccgccggcctgctcgccatggcattcatgggattctccggcgtggtgtaaagacttacagttgataatttaatataggattggaaaccctgctgtataacatatacagaaatgggtttccaatcctttttttaatacctgactgccattaattagtactttaatagccttttattaaataaaatgccggcagattattgcatttccattttatttccttaaatttgtagctcaaacgacaaaagccgaaaaactaaccatttattaaagaatatgaaagaaagaattttagtaacgggcggaacgggatacattggttctcacaccgtagtagaactacagaacagtggatatgaagtaatcatcatcgataatttatctaactcaaatgccgacgttgttgacaatatagagaaagtatcaggtattcgccctgcttttgaaaaactggattgtttggatttcgcaggtctggatgctatctttaccaaatataaaggaattaaggcgatcattcactttgcagcgagcaaagcggttggagagtcagtagagaagccgttgctttattatcgcaacaacctggtttcgctgatcaacctcctcgaactgatgccgaaacatggagtggaaggaatcgtattctcttcatcttgtaccgtatacggtcagccggatgaattgccggtaacggaaaaggctccgatcaagaaagcggaatctccttacggaaatacaaaacagatcaatgaagagattatccgtgatacggtagcttccggtgctccgatcaatgcgatcatgctgcgttatttcaacccgatcggtgctcatcctactgcattgctgggcgaacttccgaatggcgttcctcaaaatctgattccttacctgactcagaccgcaatcggtatccgtgagaaactgagcgtgtttggcgatgattatgatactcctgacggttcttgtatccgtgactttatcaatgtcgttgacttggctaaggcacacgtgatcgctatccgccgtattctggagaagacacagaaagaaaaagtcgaagtgttcaatatcggcacgggacgcggagtgtctgttctggaattgattaacggttttgaaaaagctaccggcgttaaactgaattatcagattgtaggacgtcgtgcaggtgatattgaaaaggtttgggctaaccctgattttgcaaaccaggaactgggttggaaggccgtggaaaccttggaagatactttacgttctgcatggaactggcaattgaaacttcgtgaaagaggtattcaataagatatatttaattatttgttgtaaaaacatgaaaatataaacaaaatagaaacaaatcgtgcatgcgatttgtttaattgatgcaagtcgacctgaagctgtttgtgagtatgtgaatatacatggatagtacttatacctccccggtatagacagggagattgcatagtagttttgtcgtgttttattttgtgtttgtgttgtgacggtactacgacgtgagtcgtggtaccgttttttgtttattcgtttggagtaggttctattttataaaatatttatgccatattgatttataatccataactgtttagggttcttcttcagatttggtggtaatttaaccagtcggtggtatctccattcccctccttcggggaaggaggggtggctgaaagccggggtggtaggtggatacacaatgctgataataaccgacttacgcattcacctaccacctccccctacggggactcctccttcccgaaggaggagaatggagaatactatcgactatcaaattattgttgaatactatcgactataaactatcaaattattattttcctaagtaagtttaccaccaaatttgaagaagaaccctattgagtatttttgtatcaaacgtgttgaatatataacccgctgcaatgttgggcttctaagatttgcaaaagagtctatgttggtgaaggactattcgcttagcgtacctttaaaacaaaatgcattagtcccccaatctatctccggcagtgtggtgccggcggcgaacaagccgaatacggaagaacccgaaccgctcatggaggcatagattgctccctggtgatagagctcttcttttatttctccgataacggggtattgcgggaagacactcgcttcgaagtcattgattaatgtatctttccactctgcgaccggacgacggataacctctctgaccggatattcgggacggtgggggcggatattggcgaaggcttcccgggtggatacgaaaacatccggcttcacaatcataatccggtaacctttcagggatagctctatcggggagaagatatttccgataccttcggcgtaagtcggtgtgtttttgataaaaaaggcacagtcggcccccagggtagcagcgtagtcctccagttggttgtcggacaattggaggttgtaatgttcattgagcaacttcaacataaaggcggcatccgacgaaccgcctcccagtccggctcctgaagggatatgtttgtacagatgaatctcgacaggaggcaggtgaaattccttgtctaataacaaataagcttttaccaccagattattttccggattgccggctatttccattccgtgctggtggagcgtgaatttctgttgggcttcgggattggttctgatttccaaagcgtcttcgagagcgacgggatagaaaacagtttccagattatggtatccgtcaggacgtttttccgtaatggacagccccaggtttattttgatattcgggaaagtaatcatggtgttatctattttttatgctacgattatgtattcgggggcaaagttactaaaatcttcatttttccttattcattcttcattattatattttatctttgtcgtcccgattgaaagagggcctgtcggaaaagaccgccccaatcgaatcgtaaaatgataaatcgtaaaaacagaaacaatcctaatggccgaacagaaaagaaatacccgtaacacaaagtctgctaaagtacaaccggtgaatgattatggtcgtatccaaccgcaggcacctgagttggaagaagctgtattgggagctttgatgattgagaaagacgcttattcgttagtgagtgagatccttcgtcctgaatctttttatgaacatcgacatcagttaatctattccgctataaccgacctggctgtcaatcagaaaccggtggatatcctgacggtgaaagaacagctcagtaaacgcggggaactggaagaagtgggaggtcctttctatatcacccagctgagcagtaaggtggcttcttcggcacatattgagtatcatgcgcgtatcattgcgcagaagtcactggcacgcgaactgattacgtttacaagtaatattcaaagcaaggcttttgatgaaacgctggatgtggacgacttgatgcaggaagcggaaggcaagctgtttgagatctcgcagcagaacatgaagaaggattacacgcagattaatccggtcattgacgaagcctacaaactgattcagaaggctgcggcacgaaccgacggtttgagtggccttgagagtggttttacgaaactggacaagatgacttccggctggcagaattcggaccttattattattgccgcccgtcccgccatgggtaagacggctttcgtgctttccatggccaagaatatcgctgtggacttccggaatccggtagcactgttctctcttgaaatgagtaatgtccagctggtcaaccgtttgatatcgaatgtttgtgaaatcgagagcggaaagattaagagcgggcagttggccggacacgaatggcagcagttggactataaactgaaaaatctgctggatgcaccgctttatgtggatgacaccccttctctttcggttttcgagctccggacaaaggcgcgccgtctggtgcgtgaacacggggtgaaaatcattattatcgactaccttcagctgatgaacgcgagtggtatggcattcggcagccgtcaggaagaggtgagtacgatctcccgttcgttgaaaggattggcgaaagagttgaatattccgatcatcgcactgtcacagttgaatcgtggagtggagagccgtgaaggtatcgacggaaaacgtccccagttgagtgaccttcgtgaatcgggagccattgaacaggatgcggatatggtgtgctttattcaccgtccggaatattacaagatttaccaggacgatcgtggtaacgacctccgtggtatggcagaaatcgtgattgccaagcatcgtaacggtgcggtaggcgaggtgctgctccggttcaagggtgagtttacccgtttctcgaatccggaggacgatatggttattccgatgccgggcgagactgtcgggcctatgctggggtcgaagatgaatcgcgatagtgttggttctgtccctccgccgccggcacccgattttgagccgcagtcggggaatccgtttgcgacaccgataggaggagacgggccgttgcctttttagtcgttactttatagtttttactattgtagataagttttctgcatagtttctcctccttccggaaggaggagtacccgtagggggaggtggtaggaaaaataatgattttacctttttttaaataaggaatataccatgtttctacctaccaccccggctttcagccaccccttcttccggaaagaggggaaaccatgcggcaggcagtgttactctgtggtgaaataactctcaattttctttcaaaccttttcggtcaaccgaaaaaacttattaactttgcaaatctttttgagaaacaataaaaaattaattatatgaatatctcttataactggctgaaagagtatgtcaacttcgatttgacgcctgatgaaacggcggctgcgctgacatcaatcggcctggaaacaggtggtgtggaagaagtacaaaccattaaaggcggtttggaagggcttgtaatcggcgaagtgctgacttgcgttgaacaccctaactctgatcatttacacattacgactgtcaacctgggagacggcgaaccggtacaaatcgtttgcggagccccgaatgtggctgccggacaaaaagtagtagtggctaccttaggtacgaaactctatgacggtgacgaatgttttacgatcaaaaaatcaaaaatccgtggggtggaatctaccggcatgatctgtgccgaagatgaaatcggtatcggtacggaccatgcgggcattatcgttttgccggcagaagctgttccgggtacgctcgccaaggattattataatatcaagagcgactacgtgctcgaagtggacatcacgcccaaccgtgctgatgcgtgctcacactatggcgtagcccgcgacttgtatgcttatctcattcagaacggcaaacaggctactctgcaacgtccttcggtagacgccttcaaggtggaaaaccacgacctggatattgaagtcacagtagagaacagcgaggcttgcccgcattatgccggtgtgaccgtgaaaggagtgaccgtgaaggaaagccccgaatggttgcagaataaactgcgtctgatcggcgtgcgtcctattaataatgtagtggatatcaccaattatatcgttcatgctttcggtcagccgttgcactgctttgatgcaggcaagataaaaggcaacgaggtgattgtgaagacaatgcccgagggtactccgttcgtcacactggacgaagtggaacgcaagttgaacgaacgcgacctgatgatctgcaataaagaagaagcgatgtgcattgccggtgtgttcggcggactggattccggttctaccgaagctacgacggatgtgttcatcgagagcgcctatttccacccgacatgggtgcgcaagactgcccgccgtcacggactgaatacggacgcttctttccgcttcgaacgtggtatcgacccgaacggagtgatatactgcctgaaactggctgctatcatggtgaaagaattggcaggaggcacgatctcttctgaaattaaagatgtgtttactgctcctgcgaaggatttcgtagtggaactgaattacgggaaggtgcattcactggtaggtaaagtgattccggtggaaacaatcaagagtattgtaaccagcctcgaaatgaagatcaccaacgaaactgccgaagggctgacattgtcggttcctccttatcgtgtggacgtgcagcgtgattgtgacgtaatcgaagatattctccgcatctacggatataataatgtggaaattccgtctacgctgaagtcgagcctgactacaaaaggagaaaatgataaatcaaataaattgcagaacctggttgcagagcaactcgtgggttgcggattcaatgaaatattgaataactcgctgactcgcgccgcttattatgacggactggaagcttatccgtccaaccgtctggtgatgttgctgaatccgttgagtgcggacttgaactgtatgcgccagactttgttgttcggcggactggaaagcattgcgcataatgccaaccgtaagaatgcggatctgaaattctttgaattcggtaactgctactatttcgatgccgacaagaagaatccggaaaaggtgttggctccttatacggaagactatcatctgggcttatgggtgaccggcaagaaggtggttaactcgtgggcacatccggatgagagcagttcggtgtatgaactgaaagcttacgtggagaatatcctgaaacgcttgggactggatttgcacaatctggttgtaggtaatctgactgatgacatttttgctgcggcactttctgtacataccaagggaggcaagcgtctcgcatcgttcggcgtggtgactaagaaactgctgaaggcatttgatattgacaatgaagtatattatgctgacttgaactggaaggagctgatgaaagcgatccgttcggtgaagatcagctacaaggaaatatccaagttcccggccgtgaaacgtgacctggcattgttgcttgacaagaatgtgcagtttgccgaaatcgagaagatcgcttatgatacggagaaaaagttgctgagagaagtggaactctttgacgtatacgaaggcaagaacctggaaccgggcaagaaatcgtatgcagtcagcttcctgcttcaggatgaaagccagactctgaacgacaagatgattgataagattatgtcgaaactggtgaagaatctggaagataaactgggtgctaaacttagataaactttaaatttcaatctaaaaatataaaccaatgggaagagcatttgaatatagaaaagccgcaaagttgaaacggtggggccacatggctaaaacatttacaagactgggtaaacagattgccattgctgtgaaggctggtggtccggaacctgaaaataacccgacattgcgttcggtaatcgctacttgtaagcgtgagaatatgccgaaagacaatatcgaacgtgctatcaaaaatgcattgggtaaagaccagagcgactacaagagcatgacttacgaaggatacggtcctcacggaattgctgtttttgtggatacgctgactgataatacaacccgcacggtggctgatgtacgctccgtattcaataaattcggcggtaacctcggaactatgggttctctggctttccttttcgaccataagtgtatgttcactttcaaaatcaaggagggcatggatatggaagaattgatccttgacctgattgactacgacgtggaagatgagtacgaacaggatgatgaggaaggtacaatcacgatctacggagatccgaaaagctatgccgctatccagaaacatctggaagaatgcggattcgaagatgtcggtggagactttacttatatcccgaacgacttgaaagacgtgacgccggaacaacgtgaaactttggataagatgatcgaacgtctggaagagtttgacgatgtgcagactgtttatacgaacatgaaaccggaaggcggagaagaagaataaacaggccatggaatatgtttataaaactcaggggacttgcagcacgaacatcgaactgaacgtggaagacggtgtagtgaaagaggtggccttctggggaggatgtaacggtaatcttcaaggaatttcacgcctggtgaaaggcatgaaggtagaagaagtgataaagaaacttgaaggggttcgttgcggtggcagaccgacgtcttgtcccgaccaactatgccgtgcattgcatgaaatgggatattgattgacaatttttttgttcttaatagttgattgtaagccttcggcaaattgtttttgccgggggcttcttttattgttcggcaaaaagcttctgtatgtctttcggttcttctccgaatttgtcggtattttgaactaaaatggattgtcaatcgttactttataagtatatttgtactggataaactattatgcaaagatgaagaatatttttcaagacttaaaacgaaaagatcataagcgatatctgggcggactggatctctttaaatatatcggaccgggacttttggttactgtgggttttattgatccgggaaactgggcttccaattttgccgcaggttctgaattcgggtattcgttactttgggtggtcaccctgtctactatcatgctgatcgttcttcaacataatgttgcccacctggggattgtcaccgggctctgcctctcggaagcggccactaaatacactcccaaatgggtatcccgtcctatactcggaacggcggtgctggcttccatttccacttcattggcggaaatcctgggcggtgccattgcattggaaatgttgttggatattcctattatatggggggctgtgctgacaacgctttttgtctccattatgcttttcaccaactcttacaaaaagatcgagcgttccattatcgcattcgtctcggtgatcgggctgtcgtttatttatgagttgtttctggtggatattgactggccggccgcaacggtggggtgggtcactccggctttcccgaaaggaagtatgctgattattatgagcgtactgggggcggtggtaatgccgcataacctgttcctgcattcggaagtgatacagagccacgagtacaataaaaaagatgacgcctctatcaagaaggtgttgaaatacgagttgtttgatacgcttttttcaatgattgtgggctgggctatcaatagcgcgatgattctgctggcggctgccactttctttaaaagcggcattcaggtggaggaattgcaacaggctcagtcattactggaaccgctgttgggaagtaatgcggcaatcgtgtttgcactggctttgcttatggcgggcatttcgtccactatcacaagcggaatggcggcaggttctatctttgccggtattttcggcgagtcttatcatatcaaggacagtcactcgcaggtaggcgtgctcctgtctttgggaattgccctgttgttgattttctttatcggagatccttttaaaggactgattatttcgcagatgatactcagcatccaattgcctttcacggtattcctgcaagtggggctgacctcctcgcggaaggtaatgggagagtatgtcaatagccgttggagcacatttgtgctgtatgccattgcgattatagtatcggtactgaacatcatgctgctattctcctgaaatgaacatgaattaaaaatatagaatgatgaagattattacttataatgtaaacggacttcgtgctgccgtatctaaaggactgccggaatggctggagcaggagaatcccgatattctttgtctgcaagagacaaaactgcaaccggaccagtatccgggagaggtgttcgaagcattgggctataagtcctatctgtattcggcacaaaagaaaggatatagcggagtggctttacttacgaagcaggaaccggatcacgtggagtacggaatgggtatggaggcatacgacaatgaggggcgttttatacgtgcggactttggagatttgtccgtggtcagtgtttatcatccttcggggacaagcggggatgagcgtcaggcttttaaaatggtgtggctggaagactttcagaagtatgtgctggagttgcagaagtctcgtccgaacctgattctttgcggtgattataatatttgccacgagccgattgatattcatgaccctgtccggaacgcaaagaacagtggtttccttcccgaagaacgggaatggatgacccgtttccttgcagcgggattcattgattcgttccgtatgctttatccggaaaaacaggagtatacctggtggagttaccgttttaactcgcgtgccaagaataagggttggagaatcgactattgcatggccagtgaaccggtccgcccgttactgatgagcgcacgtatcttgaatgacgccatgcattcggaccactgtccgatgatgttggaaataaaaaacacgaaatagtttatggaagaagatagaatacaaaaagcggtggagctttttaagagcggatacaattgctcacagtctgttgtggctgcttttgccgatatgtacggatttacacaggaacaggcattgcgtatggccgcctctttcggcggaggaataggacgcatgcgcgagacgtgcggggctgcgtgcgggttgtttctggtggccggcctgaaaacgggggctacggaggcggcagaccgggaaggaaaagctgccaattatgcggtagtgcaggaactggcagccgaatttaaaaagcgtaacggttctctgatttgtgcggaattgttgggattaaagaaaaaagaaccgatttccactattccggaagaacgtacagctcagtattatagcaaacgcccgtgcgcaaaaatggtggaagaagcggcaagaatctgggtggaatatctcgaaaaacaccctaaatgaaggaaaaaatgctttttttattacaaaatcagtaaaaaaacactcaataaagtgttctataacataaaaatatctatctttgtccccgaaataaaatctgaaagtcgtcggacaagatgatttgaagcatgtctaactaaaatttcaaagcaaatgttgaaagaaaaagcaggtgtaatcgcaggtactatctggaatgcactgaacgaaacagaaggaatgactgccaagcaattgaaaaaagcaactaaattggttgacaaagatttgttcctcggacttggctggttattgagagaagacaaagtctctgtggaagaagtggaaggtgaactcttcatcaaattgatctaagcgagcaatcacttaagcaataaaaaaatgcgttggtacattgtcataatgttatcaacgcatttttttatattccgccatttacgtatctttgcacaccaaaaagataaaataataagaattcagcatgaagaatatacgcaacttttgcattattgctcatatcgaccacggtaagtcaaccctggccgaccgcttgttggagtttaccaacaccattcaggtgaccacggggcagatgcttgatgatatggacttggagaaggaaagagggatcacgatcaaaagccatgctatccaaatggagtataactataagggggagaagtatgtactcaacctgattgatactccggggcacgtggacttttcgtatgaggtgtcccgttccattgccgcttgcgaaggtgcattgctgattgtcgatgcatcgcagggagtacaggcacagacgatctccaacctgtatatggctattgaacacgaccttgagattattcccgttatcaacaaatgcgatatggccagtgccatgccggaggaagtggaggatgagattgtggaactgctgggttgcaagcgggaagaaattatccgcgcatccggtaagacgggtatgggagtggaagaaatcctggcagccgttatcgaacgtatcccgcatcccgaaggggatgaggaagcaccgttacaggctttgattttcgactctgtattcaactctttccgtggaattatcgcttatttcaagattgagaacggagtgatccgtaaaggtgacaaagtgaagtttttcaataccggcaaggagtatgacgccgatgaggtgggggtgctgaaaatggaactggttccccggaatgaacttcgcacgggagatgtaggctatatcatttccggtatcaagacttcgaaagaggtaaaggtgggagacaccattacccatgtggctcgtccgtgtgacaaggcgattgcgggttttgaggaagtaaagcctatggtattcgccggggtctacccgattgaggcggaagattttgaagacttgcgtgcttctctggagaaattgcagttgaacgacgcttccttgactttccagcccgaatcatcgttggcgttgggcttcggtttccgttgcggttttctcgggttgcttcacatggagattgtgcaggaacgtcttgaccgtgagtttgatatgaatgtgattactacggtgcctaacgtatcttacaatatatatgacaagcaaggcaatatgaaggaggtgcataaccccggtggtatgcctgatccgacgttgatagatcacattgaagaaccgtatatcaaagcgtctattattacaacgaccgattatataggtccgatcatgacgctctgtctgggcaagcgcggggaactgcttaaacaggaatatatttccggcaaccgggtggagatatattacaatatgcctttgggggaaattgtgattgacttctatgaccgcctgaaaagtatttcgaaaggatatgcgtcgttcgattatcatccgaacggtttccgtccctcgaaactggtcaagctggatatcatgctgaatggtgagcctgtggatgcgctttctacactgatccactttgacaatgcgtatgatatgggacgccggatgtgtgagaagttgaaggaactgattccccgccagcagtttgagattgctattcaagccgctatcggggcgaaaattattgcccgcgaaacgattaaggcggttcgcaaggatgtgactgccaaatgttatggcggtgacgtgagccgtaagcgcaagctgcttgaaaagcagaaaaaaggtaaaaaacgaatgaaacaaattggcaacgtggaagtgccgcagaaagccttcctcgcagtattaaaactggattaaaaaaaagaaccgcaagcagttttttcagagaggttttctgaacaaattgccttgcggttagttttttaatacaccaggtgattgctttctgtctgcagagctttccttggcaatcacttttggagaaaaaacaactagaaatatgagaaaagttctgtctttttcgggcttcctgatgttggggctcgtcgtatcgcaattcctgccggtgatagcaggtgaggggtatggaaccgtgaagtccatatcgaatatactactctatgtatgtcttagttttataatgattaatgtgggccgggaatttgtgctcgacaagtcccgctggaaaagttatgccgaggattattttatagcaatggctactgctgctttgccttggtttatgattgctatctactatgtgtttatcttgcttccgcctgactattggaatagttgggaggcatggaaagagaacctgctgttgagccgttttgccgctccgacatcagcgggaatcttgtttaccatgctcgccgctatcgggctgaagtccagttggatttataagaagattcaggtattggctattttcgatgatttggatacgatcatcctgatgattcctctccagatcatgatgatcggattgcgctggcagttgattattgtcgtggtgattgtgtttatgctgttggccgccggttggcaacagttgaataaatacgactggcgtcaggactggaaagcgatcctgttctattcggttatcatatttctggctacgcagatactctatcttggtagcaaggagctgtacggagaggcgggaagtatccatattgaggtgctgcttccggcatttgtattgggtatgattatgaagcataaggaacatgacacgcctgtggaacggagagtttctaccggaatctctttcttctttatgttcctggtaggaatgagtatgcctcattttatcggagtcaattttgcggaaacgcactcgggggcatattcggtgacaggttcccaggaaatgatgtcgtgggggatgattctgtttcatgtggtaattgtttctttgttgtcgaacgtgggaaagttatgtcctatgtttttctatcgtgaccggaagctgagtgaacgactggcactttctatcggtatgtttacccgtggtgaagtgggggccggaattatttttatcgcattgggatataatttgggaggtccggcattggtaatttctgtacttactttagtactgaacttgattttgaccggaatatttgttctttgggtgaaaaacctggctttaaggagctatactgattaaataaactctctataccctattatttccggtagttattatatggaaataatagggtatggaactgatctactaataagaatagttaaataactgttttctttagttgaataactgcgcattttagttgtttgttcgatattaaatactatatttgtggcgttatacttggtgagttaaaccgaaaatatagaaatgtatgaaacgattgacagcaaaagaagaagaaataatgcgtattttctgggaaaacggcccgatgtttgttcgcggactattagcttattatgaagatcccaaaccgcattataataccgtttccactcttgtgcgcgggttggaggagaaaggattcgtaggttatacgccttatggaaatacttatcaatattatgcacttgtttcggagaaggagtataaaagttctgctcttaaagaagtgatttctcaatactataataattcgtatgtcaatgttgtgtcttcttttattgaagaagaaggattgtctgttgatgagcttaaagcactcattgaccagattcaacgagggaaaaacgaaaaatagtttttgcaataatagttgggaaacgcactattgataaaaagatgtcattactatgggagacttattgttttatctgttgaaatccggatgttacctgataatattctatctactctttaaattattaatgagcggaactactttttttcgcttcaaccgggtgactatattggcggggatcataggatgtatgtttctccctttgatagaatttaccactcaagaggagacatttttaactgttcctttacaaacgattcaggggatttttgttgagcaggcggacggcatattttgggacacaatgttttgggttcggccgcaagtggacgaaaccggaaatatgcaggctataaattggtgtcctattgctttgggatatgtttatctggcaggcgggctgtttgttttgtgcaggattttgctttccttttatcggatgttccagcttatacggaacggaaagaggcgctcctatgggaagtataaactgattgtagtatcggaacctatttcatctttttgctggggaaaatatattgttgtttccgtatccgactactcacaacagtcgacagacgggatcttactccatgagacgatgcatttacgttatcggcatacactcgatttattatgtatgcagtgtttgttaattctttattggttcaacccggccatttggctgctgaaacgggaattgcaggaagtacatgagtttgaagcggataatggggtgcttaatacaggcattgatgcaacgagatatcaacttttattggtgaaaaaagctgttggtacaaggctctactctatggccaacggttttaatcactctaaacttaaaaaacgtattactatgatgttaaaagaaagaaccaatcggtgggcacggttgaaactattgtttgtggtgcctgtaatgggtggagcgctttatgcgtttgcacagccggaagtgaaagaagacttaggactaaatacggtccgggaagtattgcaatcaaaaaccggagaagatcaggatatcttcaagtttgttgatgatgaaatggaggcatattataatcgttctcctaagaatgcggagctgaaatataagattcgggagcgacaggcgcatatcgtaaaagtagatgctaatggacaattgactttgaacaataaaacgattgctaaggaagacctgaaagaggtacttaaaaaaacaatggtggaacataagcgcctggcaaaagaaaagtataacagtgcagaggatcaagtgggaggggtcttgttttctcctgatactcctaaagaacaggtaaaagatttgttgtctgttatgcgggatgcttttgttgaaattcgggctgatattgcccaaacatcgggaaataacagtaaggaataccttgataaagaatttcctattttgattggttatggcgatatttctatcaaggatagaaagaaaaatccatataataattctactacaatgaagattaccggcattcatcttaaattactctctgccgcaggcaaagtagagaaagaaataacgaattttactctggctgaattggagagagatttgaaagatttctgtacattacagggagataagaagaatgagattactgtcagtatgaaggtggataagggatgtgaaatggggatagtgaccgatgtgaagacagttctccggaataattatttgttaaagttgaactatcaataaaatacttatttctccactgataatagttggagactgcatagttggagactgcatagttagagatcgcaaagttagagactgcatagtttagagactgcatagttagagactactggagtaataacagaatgacaagtcggtagtatttaaaactctcctccttcaggaaggaggagtacccgtagggggaggtggtaggtgaatgcatgaattgtttattatcagcattgtgcatctacctaccaccccgacttattagacacgccctctagcattcaagaaagatattcctaacaaattcgttttagcgctattcttttcggattagtcaaatagttccccgtcttcttcgattggaagtattttccggctttcttcatgtggtaattgttctacttgacgtagcttccgttcgatagcacgggttcgtttgcccataacttcttcaagctggtcaccggcattttgcaggttcttttgtactttctcaagcagtccgccgaatttgctgaattcggtttttacagctcccaatacagtccagacttctccggtacgtttctgaatggctaaggtacggaaacccatttgaaggctgttcagaatggctcctaaagtagtcgggcctgttacgacgattttgtattccttctgaagtgtttcgacaaggcttgtccgccggataacttctgcatagatactttcgaacggtaaaaacatgattgcgaaatctgtggtaaaaggagggtcgacatatttgtcgtgaatatcctttgccattttcttaatggtgttttccagttgtttgccggacgattcgatcaaagcggtatctcccgcttcgaaagcatcgtaatactgttcgtatatgtctttggggaatttggcatcaatcgggagatagaccgtgctgttcacatcgtcttttcccggcagtttgatagcaaattctacaaactccgttccgcttttcttagttttgacattggcgtcgtattgttccggactcatcatttgctccagtaatgcacctaactgtacctcaccgaatgttccccgcatttttacgttgctcagtaccttcttcagtccgccgacatcctgggccagagatttcatttctcccagacctttctgcacattttccagttgcgaacggacaatctcaaatgactgcccaattcgttcgttcaacgttttttgcaacttttcttcaaccattagacgcatatcatccaagcgtttctcggtcgatttaatcagtgtttcctgttggcgggccattgtgtcgaatttctgccgttgtaattttcctgtggtcatcatattcttgtggaggacatcctggagttgctgcatattctgatttaatacttgcgtcatttccatgcgcaactcccggatacttcggttcagttcttcccggttttcttgcatttgttgccgtaaggctgcttgcagttgttccgcttgattttggttgttgcctttcgttagtgatagtacaagtaatactatcactaatacggcgataacaataagtaaaatcaattccatttaataagtcaggatttcatttccggtttcagtaatcagaatcatattctcccattgggcagagggcaatccgtcatcagtgcagacagtccagccgtcagcttcgtcgacaaacacttcataggttcccatgttaatcatcggctcaatggtgaaagtcattcccggtacgatcatcatgcctgttccccggcgtccgaaatgctctacatccggttcttcatggaatttcatgcctacaccgtgtccgcagaggtcgcgcacgacgctgaatccgtttttctcggcatgttcctgaatagcggcacccacatcgcccagttgtttccaaggttgtgcggcggcaataccaatttccatacactctttcgtcacttggaccagtttgcgcatttcgggacttacgtcgccgatcataaacatgcgggaggcgtcagagaagtatccattgtaaatggtagagacatccacattgataatatctccgtttttcaggatttcattcttgttgggtatcccatggcatactacgtcgttaatgcttgtacagacactcttggggaatccttcgtaattgaggggagcaggaacggctccgtgaccggttgtgaaatcatacactagtctgtcaatttcctcggtagacattccctcacggatattctccgcgatatgatccaataatgcagtgttgattttggcactttcacgtattccttccagttgttcgggggtacggagcactttacgaggcggaagtttgtatccttgttttctatatttctgtattttgtcttctactgctgccggataattggagggggtaaaccggaatcccttgataaagtttttcattattatatgatgttatttaatcgttctacaaaggtagagaataaaatggaagttgtgtctccttggcttctaaaacttttcttgtagattattcatcattatgaaatagctttgaatacgggttctatcttttggatttcagactcaaatccgaaccagtagccatgtccgtcttcatcaacggggagaaaacacagacgtagtttttcccgataggaaccatagatgacttcccaactctccgggggaacttgccgtttggttctgactttttcggcgggaactttttttaatgacatacctgcttcgatccatgcgatactgacttgagtcaagtaatcgggataatgatttttacagaaattatataggatcaatcctcttctttccagacttaacggggtgccgatgatatctgcctgaactaaatgatcgagcaactcatgtaagaaacgaggattttccagaataagcatccgggtgatgttttgccaggtaggagtattatagaagccgtctaacaggcgggatagataatgcgctgtctgtaactcgtctactgaaatctcacgtgtttggaggacttcataagggggaaggggcgagtattgaatgcctagttcttctgctcttctccgcatctcggtaccgggaagtaactttagggattccagttgaatctctcctgcaccatattctgccaaggtacggacgtcttcgaatatctcggataagtgatagagtgggagacctgctatgaggtcagcatgcgtttccatattctttagtgaacagagatattttaatccttccaatgcgtcggataactttccgatacggcggctttgttgcagaaccgactcttttaaactttgaatgccggcctccaaatgtaataaccccttgggtaagaccgataattcctgttttaattcttcggaaaggagagccggatgaatctccagatgaaaacagatgtccggatattgccggaataagtccagtaattctttagcccgtttgttgttgtaattaaaagtacggtcgagtacgcgcacgttcttaatgccatgctggtgaatgtcattcagacgttcacggatagcttccaaaggaatggtacgcaccggcttttcaccaccgctgacgcaaaaggcacacgtgttgaaacaacctcgggtagtttccaactgtacaaacggtttactccagttaaaaaaacaacttttctcgggggaaacaagttgagagaagttcatgacgcgggcaattccattgtcctgatagcgaccgttttcatccaagtaacaaagtcccgttattgatttccatgtttctttactgtgattccatactttcagccattgggggaatacttcttcaccctctccacggaacactccgctgacaaatttgttcttatataaaaaggcttcattatttcccaaaaactccggaccgccgagtacgatgcagcaatgcggaagtaatgctttagcacgggatatgatgtgtagcaactgttcgtgattgaataaccagttggtggcggcaatgatgtccggccggtgtttgtgaatccggctgacaaccattccggtgttctcatttatggttgccgatactatacaccattcaatagtagtgtcgtctgctatctgggcgtgtaatgcagggagcgccaacgatgagtgtgcataggagctatttaaatcaagccaaagaagtttcatgtagaatttttaatattatcgggaacaaaggtacaaaaaacttatggcttggagcatatagtaaaataaaaacgctaaatttgtatttataaacgcaataaactagaagattatgaaactgattaaaaaatacgcaggttttctgctgatgctgacgttgcttgtcggctttacttcatgtgaggatgatgaagatatttatgatgacctcatggggagaacatgggttggagatttgggatttggtactaacagagatccgatagaaagcggtattcgcttggataataacggcttgggaattgattatcaggtctatgattatgacggcgcttctgccggtgacttgccttttcgttggcgggtagattatggaactttataccttgattatggttatgattttgctctgcgtgaggtgagaggtgttcgtgtgagcggacgttatatgcgaggtgatctatatcttgatggcgagtttttcggatatattgagttgagaatgcaataagaaaataatataatagatatagaaaggagccatacttgtgtataaatggtatagctcctttcttttaacttgtatttattctattttttcagaaacaacttcttgaattctcccggataaggtgtttcaaactccattagatctcccgttacaggatgatagaaacacagttggaaagcatgaagggccaatcgaccgatcgggttagagtaattttctcctccatatcttccgtctccggcaatcggatgtcctaaatcctgcatgtgtacacgaatctggtttttacgtccggtctctaaatcaagttccactaaagaatatccgttggcacgtttgattgttctataatgagtgatagactttgaaccgccgtcgtcatatccactggaacttacgtataaagtcttgtccgtcaaccaggaaacaacagtatcataatctttttccatacttccttctactacggctacataccgacggtcggtcactatatcatgccagttgtcgcgcagagtacgttgtgttttttcgtccttggcaaacatcatcaatccggaagtgtctctgtccagacgatgtacaatgtacactcggtgttgacgtccggaacgttgcacatattcattaagtatggtataggctgtgcgctctttttgacgttccgtattgacggacagaagtccttgcatcttttcgaccacaatgatatatgcgtcttcgtacacaattttcagcaatcggttattaaattctttccttcctttatctttgctgatttgaactttcattcccggtttcaacggaaagttgaattgcgtggttattacattatctaccaataccactcgtttgctgagcaatgactttagttttgtacggcttgcgtccggcattttggcagtcaggaactccattagttccattggctctttgactgcataattggtatattgtgcacgtgctttttcagcaggagttcttctcggtcttttttccatttcttttttcttttaagaacgattcaattaaagattatcggagttccagcaataccacattttccacgtggtgagtatgagggaacatatctaccggctgcacggccttcaccttatatttttcgtccagtaattgcaggtcacgtgcctgagtggcgggattacagcttacgtaaacaattcgtttgggttcggcaaacaagattacatccaccacatcctgatgcatacctgcacgaggagggtcggtgatgataacatccggacgtccatgctcgttgataaattcctgagtcagaatatccttcatgtcacctgcataaaacagggtattcttaatatcgttgatttctgcgttcacctttgcgtcttcaatggcttccggcacatactcgataccaatcacctgacgagcccggcgtgatacgaagttggcgatagttccggttccggtgtaaaggtcatatacaagttcatttccggtcagtccggcaaactcgcgggctaccttatataaattatatgcctgttctgaatttgtttgatagaatgatttcggtcccactttgaaacgcaatccttccatttcttcaaagatatgatcgtttcctttgaacacatacacatccagatcattgatcgtatcgttgcacttattattaataatgtataggagagaagttatttccgggaaagaatctgccacgaattgaagcaactgcttgaacagttccatttcatgatcttccgtaatcttgcagatcacgattaccattagttcacctgtggaggaagtgcggacaatcatattccgtaacataccttcttgcgtgcgcaggttgataaatgagtagtcatgctcataagcataatcgcgtattgcattacgaatccggttggatatatcatcctgcaaccagcacttttcgattgccaataccttgtcgaatgctcccggaatatggaaacctactgcattcatctggtcatacttcacatcctgacggacttcttcgttcgtcaaccaacgtttgttggaaaatgtaaattccagtttgttccggtaaaactctgtttttgcggaacccagaatcggcgaaatctccggaagttcaatctttccgatacgtctcaggttgtcttccacctgcttttgcttgtatctgatctgctccggatagggtagcacttgccatttacagccgccgcaaacaccatagtgctggcagaaaggaactgcacgattgggcgatagttcgtggaactttaccgcttcggcttcggcatatttattttttttacgcttgatttgcaggtctacgacatcacccggcactacgtaaggaacaaaaattaccaggtcgtttacttttgcaatggcttttccttcggcagccacatccatgattgttaccttctctaataagggaagctcttttttctttcttgccacttttacaccagtctaataattactttgcaaaagtaggtattttttttggaaaattttcgtgtatgcagaaatattccagattgtaatgtcgaaattgcattttgatagaaagttttttctcaaaaagttttctggtttgcgaaatatacttagatttgcgaacagaaaaaagtcataatgtaactttaaacacaatattatggataaaaaaagagtttatacctttggaaatggtcaggcagaaggaaaagctgacatgaagaatttgttaggcggtaaaggtgctaatcttgccgaaatgaatttaatcggaattccagttccccccggatttacaataacaacagatgtttgtacagaatacaatacattaggacgtgataaagtggttgagttgctgaaagatgatgtcgtaaaagccattgctaatgtagaggcgttgatgaaatctaaatttggtgacattgacaacccgttgctggtatcggttcgttcgggtgcacgcgcgtctatgcctggtatgatggatactattctgaacttgggtttgaatgacgaagtggtagaaggtattatccgcaagaccggtaacgcacgttttgcatgggactcttatcgtcgtttcgtacaaatgtacggtgacgttgtactgggcatgaagcctacaaataaagaggatatcgacccgttcgagaaaattattgaagaagtgaaacacgcgaaaggcgtaaaactagacaatgaacttgaagtggaagacttgaaagaacttgtcaagaagttcaaggctgccgtgaaagaacagacaggaaaggatttcccgacttgtgcatacgagcaactttggggagctatctgcgccgtattcgattcatggatgaacgaacgtgctatcctttatcgtaaaatggaaggcattcctgacgaatggggaacagctgtaaatgtgcaggctatggtattcggtaatatgggcgatacttctgcgacaggtgtttgtttctcacgtgacgctgctacgggtgaagaccttttcaacggtgaatatctgattaacgcacaaggtgaagacgtggtagccggtatccgtactccgcaacagattaccaagatcggttctcaacgttgggcacagttggccggagtaagcgaagaagaacgtgctgcgaaatatccttctatggaagaagccatgccggaaatctatcaagaattggatgcgcttcagactaagctggaaaatcactacaaggatatgcaggacatggagttcaccgtacaggaaggtaaactttggttcctccagactcgtaacggtaaacgtacaggtgccgccatggtgaagattgctatggatttgctccaccaaggcatgattgatgagaaaacagctttgatgcgtgttgaaccgaataaacttgacgaacttcttcatccggtatttgataaggacgctttgaaagctgcaaaagtcctgacccgtggtcttccggcttctccgggtgctgcaaccggtcagattgtattttttgctgatgacgctgccgaatggcatgctgccggcaagcgtgtggtaatggttcgtatcgaaacttctcctgaagacttggccggtatggcagttgctgagggaatccttaccgctcgtggtggtatgacttctcatgctgctgtggtagctcgtggtatgggtaaatgctgtgtatcaggtgcaggtgctttgaatattgattataaggctcgtaccgtagaaattgacggtgttgttctgaaagaaggtgattacatctctttgaacggaagtacgggtgtagtatataatggtaaagtagaaacgaaagctgccgagctttccggtgactttgccgaattgatgacgcttgctgataaatatacccgtttgcaagtgcgtacgaatgcggatactcctcatgatgcggaagtagcacgtaatttcggcgctgtgggtatcggtctttgccgtacggaacacatgttctttgaaggggaaaagatcaaggcaatgcgcgaaatgatcctggcagaagatgcggaaggacgccgtaaggcattggctaagattctgccgtatcaacaggccgactttaagggtatctttaaggcaatggcaggttgtccggtgacagtgcgtctgctcgatcctcctttgcatgagtttgttcctcacgatctgaaaggacaacaggaaatggcggatacaatgggtgtaagcctgcaatatatccagcagcgtgtagagtctctgtgtgaacataacccgatgttgggtcaccgtggttgccgtctgggaaatacttatcctgaaatcactcagatgcagacacgtgctatcttgggtgctgcattggaattgaagaaagaaggtgtagaaacacatcctgaaatcatggttccgttgactggtatcttatatgaatttaaggaacaggaaaatgtgattcgcacggaagcagcgaagttgtttgaggaactgggagacagcattgactttaaagtaggtacaatgatcgaaatcccgcgtgctgcgttaactgcagaccgtattgcttcttctgccgaattcttctcattcggtacgaatgacttgacacagatgaccttcggttattctcgtgacgatattgcttctttccttcctgtttatctggaaaagaagattttgaaagtagacccgttccaagtgctcgaccagaatggtgtgggacagttggtacgtatggcaacagaaaaaggccgtgcaattcgtccggacttgaaatgtggtatttgtggtgagcacggtggcgaaccttcttcagtgaaattctgtcacagagtaggattgaactacgttagctgctctccgttccgagtgcctattgcaagattggcggcggcgcaggctgctattgagggatagctaaatacactggttaggtacttaactatctaaagaaataggctgtaaatacttgtgaaagtattcgcagcctattttattttgtctttgtttttgctttgatatccggtgcttctgaggaaatccttggtatttattataaaaaactaactaaatgtttgtttaatcctaaaaacagctttacatttgcacctcgaaaaacagacctgagtggggtctaattgtttaatttaaaaaaaatgagatgaaaaagggtttattattgatagttgttatggtggcagctatcgctgtaaaagcacaagacatttacgtaggcggatctttcaacgtttggcgtaacagcacaggcaatactacgtcttttaaagtagctccggaaatcggatataactttaacgaaacatgggcgttaggtgctgaattggattattcacatgactataacggaagcttatcaacaaatgcattctctgttgctccgtatatccgttggtcttattatcaaaacgatgccgttcgtttgttcttggacggagctgctgccattggttttgtgaaggtaaaagacggagataccagcaaggcaggacagattggttttagaccgggtattgctgtaaaattgaacgatcatttctcttttattgctaaatatggtttcttgggataccgcagaaatgtaaacactcccggagattctttcggtcttaaacttactagcgaagatctttcaatcggtttccactacgcattctgatagataagaaaaatcgaacaaaaaataggaaagggagttcccaaaaatagggaattccctttctttatgtataaactctataatttatgcacttgttaacgaaaaagttgtttaatacaaattacaatcatacatttgtattgttaaacaatgaggtcataaagactttaagtattaatttaaaactttaaaattatgaagaagagtattttgtttgttttgtttgccctgatttcagttgcgggcttttcacaaattacaggttggaatgcaaaagttggtatgaacttcagtaattacacaggtgatcttgatatgaatgctaaggttggtttcaagcttggcggaggttttgaatatgcctttgatgatacctggtcattgcaaccttctttgtttttgaccggtaaaggtgctaagaaagatgcgcttactgtcaatgcttattatctggaactgccgataatgggagcagctcgtttcaatgtcgctgataataccaatttagtagtgaatgcaggtccttatttcgcatgcggtattgcaggaaaaacgaagatagccggagaaagtgtgaaaacgtttagtgatgatggtgtggattttaagcgttttgatgcaggtctcggtgttggcgtagcattggaatttggtagaatcatagcaggtttggatggacaattcggtttggtagatgtacagaagttgggcaatccgaagaatatgaacttttctattgttgtaggatataagttctaaaacagaatattggaaaataaagaaagccgctatgaagataatttgtagcggcttttttcgtatctacgctttatccgaataatatcaactcctcttttaatcggctaacttctttaatttcttgaagtgctcaatcacagccaaatagtcttggtcggaacatgcatcaaacctgttccaaagatcgcctaatattactgctcctccaaatccgaaatctttgatttccagtaaattgtctgcatttataccacctaatgccataactttcgagtcaataatcttagtcctttgtgcatcgcgtagttcttcggcggtatatgtggagtagtaattcactttagaaatgctgtcgtagataggactcataaaaacataatcataaaaatgctttttgttttttacttcctcgacagagtgacaggaacaactgacatgtcccgcataatcatgcggttctttgggattacgtgcattcagatgaatccccattagattaaattcttctttaagataaaaatgttcgtgtgtcacgatgcggcggtgatacttttccggaataagtgtcagtagtctttctgaatacatagctggagtctccggctttctgagatgtagaatatccagaccctcttcgaaaagagcagtaataatcttatcttcttcaacgaagaaggtaggggtggtaactacaattagtttcatttctttctgctaaattgaattgtttagcaaagttaataattaactatgtcagaaaccaacgtttatagtgaaaatttgttagattgcaatgtccgcaggtcaatcgtccatagtttaccggctaaaatatcaccgaatccacaaattattttcagtacctccgttgcttcaatgcttcctacgacggcgggagtgactcctattactcctttagggggaggtggcattcgcttcatttcctcttcattgggatagaggtcacgatagctctttttcatctctccgtaattaaataccgaaacctgaccttcaaaaccacagatggcaccatatacgtacggtttcctttgttcaatgcagatatcgttaatcagatagcgtgtggcgaaattatcgcatccgtctactacgatatcatatttgcggatgatattgccggcattttcctctgtcagccgggtggaatagggcaggatactgattccgctgtttagtgcggaaagtctttctgcggcacatacagctttcggtttatccagttcgttctcggaatagagcacttgccgttgcaagttgctgatacttacccggtcgtcgtctaccagtccgatgcagcctacgcctgctcctgccagatagagggcaatgggagagcccagccctcccacacccacgatgagtacttttgcttttttcagcttaagctgaccttcttctccgatttcggggagtatcatttgtctgtcgtatcgcatccgtttttatcttttaaagtcaaaagcctggtcccagtctttccataccggttcacgtcccagttttttcaggtcacgttctacttctaccgctttccgttcatcgctcacatgaaactgctccagcgtttgcggataactataatatccgcccggttcggttttgctttccgcactcatggtcgtcacacccagagttgccatgtggttacggatttccgcactttcacgggtagagtaggagatatctacatcgtgatcgaagattcgcatggcaaacgtcagttgggcaagttcccggtcgttcatgataacatttggctggaaccctccgttttcggacggacgcatacgcgggaagttaacgctatattttgtcttccaataatgcttctgcaagtaacggagatgataggccaacatggttacatccgtgcgccattcttccagtccgattaaaactcccataccgattttgtgtactcctgcctgccccatacggtcgaaaccgttgacgcgccattcgaatttggatttcattcctctcgggtgataaattttgtagttcgccttgttgtaagtctcctggaagcagatcactccgttcaatccgtggttcgtcagttccttgtattcttctgttttaagaggcattacttcaatttgcaggttgctgaagtaaggctttgccagatccagtgcacgggcaatgtaagggacacctgcagctgcaggattttcacccgtaacaagcagaagattctcgaagggtgccagtcgtttgatagctttgtattcgttgatgatttcttcctccgtcagtatggtccttttcatcggattactgatatggaaaccgcagtacacacaagaattggtacatgaattggtgatgtaaagcggcacgaacatggagattgtcttgccgaaccgttccatggtatatttctggctgagccgtgccataacttccagataaggagtagcggcgggcgaaatgagtgccataaaatcattgacgtccagatgcccggatttgcctaaagcccggcgtacatcggcatctgtcttggaatagatggcttttgtcgtctcttcccaggatattttttctaattcgtctgagaacatattgttagagttatttcttgtttttctttaaatcacgtgatagtctcatagcacagaagttcggtccgcacatggtacagtattctccgtcgatatgatgtcctgcacggaaataggtctgtgcccgttccggatcaagtgacaggtcgaactggtccttccagcggaactcatagcgggctttgcttagcgcattgtcacgtacctgtgctcccggatgccctttagccaggtcggcggcatgtgcagctattttataagtaatgacccctacacgtacgtcctccttgtcgggcagggcgagatgttcctttggagtaacatagcacagcatagccgttccgagccagccgatttgcgctgcaccgatagcggaggtgatatggtcatatcccggagcgatgtccgtgaccaatgggccgagcgtatagaacggcgcatcatggcatttttcgatttggcgttccatattttccttgatcttatgcatgggcacgtgtccgggaccttcgataaaggcttgcacattcttgtcccaggcgcggagcaccaactcgcccatagtgtccagctcggcgaactgcgcttcatcgttggcatcgtggatagagcccggacgaagtccgtcacccaaagacaccgcaacgtcatattgagccagaatatcgcagatatcgtcgaagtgttcatataggaaactttcgcggtcatgcatcagacaccatttgctcataatacttcctccacggctgacaataccgcataaacgtttgtcggcgaggtgtacgttatggcggcggatacctgcatgaatcgtgaagtaatccactccttgctcgcattgttcgatgagggtgtcacggtagatttcccaattcaggtcttccactacaccgttcaccttttcaagagcctggtagataggtacggtgccgaccggcacagggcagttacggataatccattcacgtgtttcgtggatattttctcctgtcgagagatccattagtgtgtctccgccccatttgcagctccacaatgctttctctacttcttcatcaatacttgaagtagtggcggaattacctatgttcgtattgatttttaccaggaaattgcggccgataatcataggctcagcttcgggatgattgatattggcgggtaatatggcacgtccggctgcgatttcctgacggacaaattcgggagtaatatgtgtttctattcctaactcctcgcagttcatattctcacgaatagctacatactccatttcgggagtgattattccttttttcgcatacgccatttgggtaatagcttctccttttttggcacgataaggtagagcgatatgttcaaagcgcaggtggtccaggcttttatcatcccttctcattcggccgtattccgaagtgatttcaggtagacgttctacgtcaccccggcttacaatccattcctcacgcatacgaggcagtcctttctttaagtcgatgttcatttcagtgtcactgaacggaccgctggtgtcatatacgtatacttccggattaggcgtagctattttttcttctccttcgaaactgacactgggcacttgttctactttccgcatcgccacgcggatattcggataaagtttgccgggtagatatactttttgggagcggggaaattttattctttgttccataattgttttttaagcaactgagtagtcaggttgtcgactacgctttaattttatttatcaagaaatgcagttaatggtgagcttgcctctgcttcaaaattgaaggcttgcagtcccagccccgcttcgtaagcctgtcttccggcttcagtagcggctttgaaagctttggccatttctaccgggtttccggcaacagctattgccgtattcaccaatacggcggatgcacccagttccattgcttcggcagcatggctaggagcgccgataccggcgtctactactaccggaattcccgcctgttcgataataatctgcaggaattctttcgtttgcaatcctttgttcgtgccgatcggagcgccgagaggcatgaccgtagccgcacctgcttcttccagtcgtttacagagcacagggtctgcctgacaataaggcaataccacaaagcctaatttgacaagttcttccgtggctttcagtgtctcgatagagtcggggagcagataacgcgggtccggatgaatctccagcttcaaccagtttgtaccgaatgcctcacgggccatttgtgcggcaaatacagcttcttcagcgtcccgcacgccggaagtgttgggtaatagctggatatgtgggtggataatatgtttcagcatatcgtcctctttatcgtccatgtcgatgcgcttcatggctacggttaccatttccgtacccgatgccagaatagcttgttccattacttcgttggagttgaattttcctgttcccaggaaaaggcgggaattaaattcacgtcccgcaattactaacttttccatatcctataaattagttgttatttaaaatccttcttgtttcttctaccggatcgtttgcccggagaatcgttcccgatagggcaatgccgttcactcccgtgcgtagtatggcgggaatatcttcgtaagtgattcctccgatagctactaccggcagctcgatatgtgcctcctgcatttgcgcgaggatagagacatagccttccaagcccagaacagggctcagattctgcttggtcgttgtaaagcggaaaggaccgataccgaggtaatctgctccggcacgataatgcagtaggacatcctcgaacgtattggctgtgccgccaatgataaaggcttctccgagtatctgtcttgcctgatcgataggcatatccttctttcccagatgcacaccgtccacttccagtttcttagccagttcgacgtggtcgtccagaatcaggatagcttcatgctctttgcagagcggttttagtagcaaggctaccgcttccacttcatcgagtggtgcgtccttcatgcgtaactgaatccatttgcagcctccttcgagtgccatacgtgccgattcgaagtaagaataccgttcggtccggtgagtgataaattgtagactgatcatcttactatcctccgcaagccgctttgataattaccagattgtcattctcgtgcaacgaaaaacgttcccattcggtacggggaatcattttgttgtttacggcgatagcgatgccttgaaccggaagctccagttgcactgtcagttgggtaagggtagagccgggagttatttccacctctttgttgttcacttgtactttcattgtcctatcaaaataaataagttgaaagtaaatacaaagagcgtgcttttataagaaaggcgataagaagaaacacaatccctacgtcagtgctaactgcctcaggttcctagggtataatctcagcccctcgtggggcacccctttgtctttacgggggcaaagtaagcgaaaaagaaacagaaaaacactaaatcaaccgattttttttcatttttctgttgattccctttctttgataggatgagagaagataaatcgcgctccgcctttgtaatctttgtcaatccagatatcacctcccatatattgaatcgtcagtttacagatagccagtcccaaccctgttccctgtacaaattcattcaacttctcgaagcgttggaatacaagttcctgcttgtcttcggggattcctgtaccggtgtcggtcacagaaaatagtatacactgtttttctttgtccaccgtgtaatccaatgtaatgcttcctccggcgggagtgaattttaacgcattattcagcaggttgatgatgatttgttgcagacgcaacgggtcggtatagagcatatatggctctttgggcatttgcagcctgacgtctgcattcgttgttttgttccggttggtcagggtaatcatattttggcaatgagtcaccagttcgcaccattcatagttgaattgcagctttcccgattcgagacgcgatacatccagtacgtcgctgataagctgtagcaacaggttagaattggtctggatgatattggcatattcttgtaattcttccgaaggttctacggaattgattagcaaactggagaaacctacgattgcatttaatggcgtacgtatttcgtgactcatattcgacacaaaagcactctttagctggttggcttcctccgcacgctctttggcgtcacgcaattctatctccgatgcttccagtttctttttatcttcccgtagttgtttcgttgttctttccagacgattcttcagaattttagtccggtaatagtaatacaatgcaatcatcagtccgcctatcaatacaaggaaggtgagcaggataaactgtacttccgttttgtaagccacaaagaaagggatcggctggttgattacgattgaattaatgggtaacttcttgtcttcaaatccccattcttttaatttattggcatcaaatttatatttgttgggtaatatattaatgctacggatgtcatttttccctttatccagaaactgatatgcgtattctcccattcctttggctatcccttcatattgggggacatatcctccgatagcccaataacctattgcggtggacgtcagactgaacacaggcaacaaaggatttgctttggagaaagcataaacggaattattcatataggtgattcctctgttatcaattcgccagatgccaagcagcattaccgaatttttggggagaacacgtaattggttgaccgccatatcaagtgtatggattcggccgtcgatgtaagtgatagacagttccggatgatttttcagattctttttaaaccaggcctgttcggcaagaccgttgtatgtattatccgaaacgaatgccagatgttccatttccggatagaaatatttcatcatttctatatccttgttaatattgtattcgtatgaagaacagtattttacattatattctttcattcgttccgtcaagtcaatgctctggggttcatattgttgcatatcaataggctcatccggaattcggatgccgttgcgggatgccattgcaaagaatacggggagtcttttgtatttctcatcttcgagatgaaggaagctgctccatgcctcaccgccgaggaaaataactaattttgcacccggatgtttatccagaatctcggttagcgtttctttccatttatgggcctgtgacaaatccgttacattcatattttctatgatagtggagtactttccgcccagttgggtataagtctgtataaatgttgatatgttgtcgtaggtatatttagtatcagaattataggaggtaatgaaaagtatctcttctgcagattcttctgtgtcggcagcattgcataaacggggggagaagaataggagagcaatgaagacaatgaacaatatcttatttcttttataaagtgtcataattgtttgttatgttgattcaagtatcgcaaaaatacaacttatgtagctgatatccaataaatatattacctttttttatgctagaaaaaaggccgctgtgaaattcacaacgaccttttcaatagtatagtttagtttattatatgcgtccggttacattcttttttctaccacatcccagtcgatgatattccacagggcgttcacgtggtcggcgcggcggttctggtaatccaagtagtaagagtgttcccacacgtcaaatccgagaagaggtttcagtccggcgcgtaccgggttacttccgttactttctttggtgatatgcagtttaccgttcttgtctacggacaaccaggcccaaccagaaccaaacaatccgactgctgctgcattgaattctttcttgaagttctcgaagctgccgaagtcacgtttgattgcttctcccagtttgcctccgggttctttcttcgaaggtttcggggcgaattgcaggaagtacagattgtggttcaatacttgtcccgcattattgaatatagctccgtccggtgctgaggcaacgatttcttctaccgttttaccttcatattctgttccgggcacaaggctattcagattatttacatacgtttgtagatgctttccgtaatggaaatctattgtttgctgactgattacaggttccaacgcattgtttgcgtagggaagttttggcatttcgtaagtcatggtcataattattaaagacattaatatagtattcataatgttacaagttttaattggcttgttatactataataacagcaggttggcggaaaaggttcactacatctcattttatttgtaaatgtactgtacacgctctgtttccttcggattgtcgcggtctgcgcgatagatccattgtcctgtattatcatattcgtaataggagttaccgtcaatccggttaccataatcatcgtacaggcaagtcaggtaaccggaagttttctggttattgcccgttatgcgttggtaaactatccgggtcaggtaaccgtatttgtcatattcatacgattctttttgagaaagaatttgatccggtacgttagcgaacagcagattttggtgttgtgattccgtcagccgtcctttttcgtcatatttattggccttatatgcctgaagttccccgttcttgttgtattccttggtttctgtcagttgtccctgcttgttgtaggtgctgacagcgaatcttccgtccgtatatttcagcgagtcgctttctatgcttccgtcggcaccaatgcggcgtgtttgccggtaaatgtccgtttgggttttcggattcgtcttcacctcaaagatgcagtgcccttgcggatcgtacagtctgttcgtttgtatctcgttacttatttgcccgtttttttcggtgattgaaagcatagaggtgagctgtcctttctcattgtatgtataagtggttgagatatttcccgtactatcattttctacggactttatcaaccttccctgattgtaatattttacagaagtaggagtggcgagaatggcttgcaagacgaatgggttacgtagtgcatttgcctggtcacggaattctttgtaatgatgtgtacagagaaaatctttcagtaaactcaaagactcagaattgacaatagccggtttcaacagttcaaaatcagctttctcgctcaagtactccaaatcatccagatgagtacgggcggcggcagtcaggtacggcgtatgcttgtagtcgtcgataatttggcggatcgcagtggcattcccttctttttggagactgtcgatgtgctggaacaggaaattgtcgtaaagcgaacgtacctccgcaagataaggacgactgtctttatccttgaaaaatttctgcatatcggcattgtcgaagaatgctttgaaatttccggaagaaggatctttttccacaagttgatagagccgtttgttttcggcagcgttgacttgtgcgatgaactttccgtttggatattctgcgagatacgtctgataagtgccgggcgtgggtgtttttagcataccttccaataatgccagttcgcgaatatcccgtagcctttgcagcattacggagtcggccggataatcagttgagcgaatgctgtctatcactgcccggctgaaaggaatcttgtccttcgagccttccaggatgtagataatcgactgttcagctctgttccgtacatcggaaagctgtattttttcttcgtcacaaatcgtggaaaaatttccttggaaagctttcccgtaacatccgaaatagtttgtggcagcctgttcgctatgttcattccatagttggtggagcacatccagtagtgccagttcttcagagtaataagtttgcgtctcatcatccagcttttcgcggttcttctgccatttgtcggcgtcgttgtcgttcagatacctgagcaacttttccatgcggctttgtttttgcgccatgacctgcggaatgcaggtaatcaggcacaagcctaagataattgataaaaatatacctcttttcattgcttttgggggttaggttaaaatagttagtgatgaaaaatcataaaaataccttcattctcaaatgaatattatacttttgtattgagaacaaaattgaacgccaagggtttgttaaaaatcctcatagtttttataatgctgttatgaataccaattataaagatgaattgaatgaaagtcagtatgaagctgtgacttatattgatggaccgtcgttagtgatagctggcgcaggttcgggaaagacgcgcgtgttgacttataaaatttcctatttgctggagaacgattataatccgtggaacatccttgcattgacctttactaataaggcggcgcgtgagatgaaggaacgtattgcccaacaggtaggcatggagcgggcacgttatttatggatgggtacatttcattctattttctcccgcattcttcgtactgaagcacaatatattggatttacttcacaatttactatttatgatacaacagatagtaagagtatgattcattctatcatcaaagaaatgaaactggacgagaagatttatagaccgggaatagtgcaagcacgtatttctaatgcgaagaatcatttgctttctcctacaagatatgccgccgataaggaagtgtatgaaagtgatagggctgtcaagatgcccatgattcgagaaatatatgctcattattgggaacgatgtagattggcgaatgtcatggattttgatgatttactggtatatacttatattctttttcgtgattttccagaaatattagctcgttatcaagaccaatttcgttatgtcttggtggatgagtatcaggatacaaataaagtacaagatgaaattgtacgtcaattgatgcaaaacctgaacgaaaataaaaatacttataagatgcgggacgaaacagtgttgccaagacggatttgtgtggtgggagatgatgcgcagagtatttattcatttcgtggtgcggatatcgataatatactttcttttactaaaaaatactctaatgcaaaagtctttgattggacatcagggaaagaaagagagtttaaacttgagaaaaactatcgttctagaaaaacgattgttgatgcggccaatagtcttatagagaaaaatagacaacaaattcctaaaaaggttgtttctgcaaaagaggataaaggagaacctattgatgtatttgaggcttatagcgatgtggaagaaggtgaaattgtagtaaacaagattattgaattgcgtcgcaaaaatgattgtgagtataatgactttgctattttatatcgcactaatgcgcaaagtcgaatttttgaagaagctttacggaaacgtggtataccttataaaatttatggaggtttgtctttttatcagcgtaaagagattaaagatgtaatatcatattttcggttagtggtaaatcctgatgatgaggaagcattcaaacggactattaattatccaactcgtggcattggtaagactacaatcgataaaataatagatgtatccgcaaataatggagtcagtttgtggactgtgctatgtaatccttttatctatggattagatgttaataaaggtacatacgccaagatgcaaggtttccgtgaactgatagaaagtttcattgctgatgatattaataaaaatgcttatgaaataggtctagatattattcgtcggtcgggtattatgaatgaggtttgccaagataatttttctgaggggctgagtcgtaaggaaaatatagaagagtttgtgaatggaataaatgctttttgtatatccaaacaagaagaaggaaatgcagatgtatctttggttgattttctttcggaagtaacattgtatacagaccaagattctgataaagcagatgatgaagaaaaggtaacattaatgaccattcattctgctaaagggttggaatttaagaatgtatttgtcgttggtttggaagaaaatctttttcctagtatcatggtgattgattctcaacgtgcattagaagaagagcgacgactgctttatgtagccattactcgtgcggaagaacgttgttttttgtcttatgccaaaagtcgctatcgttacgggaaaatggagtttggcagtcctagtcgctttttgcatgatattgatgagaaatatctacgtttaccttatcaaatgaaaataccttgttcggttgatgaaggcgcagggcgtttccgcagggagattgagggaggcttcactcgttccgcttctccgtcgcgtgcttctttcggaagtagttcttccgaacagcgtgcacgtccgaaagcacagattatagcccccagtgtgccgagaaacctgaaaaaagtgagtgcggtgagtggaagcagtagtgcacagtcggcagcttcgaatgctgcgtcggtgacgggagtacgtgccggacagatgatagagcacgaacgtttcggactgggtgaagtgatgaaagtggaaggaacgggagataatgcgaaagcaaccattcatttcaaaaatgcgggtgacaaacaactattattgcgttttgcccgttttaaagtgataaaataaatagtaacacactaaatagagaaggtcatgaagaaacaaataacagtaattttgctttccgctttgattttgagcgggtgtgcatcggggcgtatgggaaatccgggagctatcatggcaggcgcttctatcggaggaagtctgggcggctcgataggagggcttatcggagataataatcatggctggagaggcggttatcgcggttctgctattggaaatattgtagggaccattgccggtgcagcgatagggaatgcattgacagcaccgagacaagaaccgatagaggaggatgcttatattcctgaagtacgggaagttcgtgtccggaaatataagaaacagccacaggtgcagcgacctcttacccagctgaaactgcgcaggattcgttttattgatgataaccgtagtcatgtgattgatgcgggagagaatagcaagatcatctttgagattatgaatgaaggacggaaccctgtctataatattgtccccttggtagaaacagtgggcaaggtgaagcatctcggcatttctccttctgtgatgatagaggaaatccttccaggggaaggtattcgttacaccgcttccattcatgcaggcgagaaactgaaagacggtgaggtaacatttcgtgtagcggtggcggatgagaacggaataatttgcgattcgcaggaatttaccctgcctacacagcgctgagactagaaatcaacacaattatattgggttttatatagcgacggtatagggtcggaatagcgtagctatccggtctctataccgttgctatttgtatgcgatagcgtcactctgttgatacagaaataaagtatgccattggcagggtcggagtaaatgaaatctcgcaggatgtttcacttgctatttgccaacaggatgagttgtctcaatatatggatcgtaatttgatgtcaccacaagaaattcataaaatggagacgctgaaagaagacgataatcctgtaatattgaaatattatttgaaatgatgaagtttcccagttggggaataatgccgattgctggataatgaaatattaagataagtagtttgcttggatgtacatggaaaaagaggtatgaatggctaaaaatagtttttaatatcgtccgttggtttttgcaaattattacctttgcgctattcaaacagataaataagtcacgtgatgagattaatgagaaaacaaaatggcatgattgtacctatgaaggtatctaggtggagtatatcagtgtggattacggacctaaaaaatagtattggtttcctatttttccttttaatttttctatcttgtggtacaaagcatacgaagtatggagacaatgtatttctctattctgaatttccacaagtggaagagttaaaaggagaaatcatagaactcgatacagtcttgtttcgttatccctttcggatacgagtggaaggagataaagtcattgtaatggatttgcatggttttgataattatggacatctttttcaatatcctgattttcactatctatcttctttcggaatacatagtgattcacctacgggaatgctatcaatggaaaatcttcggttttataacgaagatgtatggacattagacgctaataaaagcgaattaactaagttcgatttttcattatccggtgactcactacttcgtgaggaaacagtagcattggatgaagatgtccttcgggtacttgattttacggtgtttaatgatactacatttattattcctgactattcgggggatagtcgtctgtgcatggtaaatcgtaaaggaaaacttttcgagaggctagggaatataccaactgtgaatgaggatgctttacagcatgcccgcccggcgttggctcaagcgtggcgtagttttctagattataatcctcataatggtattcttgcgactgttactcaattaggggaagtagtcgaggtttataacttaaaggatagtacacatgtgatacatattggtgagcatggtgaaccggactttgaaatatctgccggatatggtgtaccagctggaattatgggttttagtgatgtacaggtaactgatagtgccatttatgcagtatttcatggaacgactttcaaggagatagcgaaacaaaacggtagacttcctgacggtggaaagtacatttatgtatttagtttgaaaggagaaccactatgcaaatatgtactggaccattatatatatggaatttgggtggacgaaactactaaaacaataatggcgacggatgtaaataatgatcagcccatagtaaaatttcgatatagttgaattgttactctttatcttgataaaaacgatgaaaataaaatataaaatattatttatatctgttacagttgcattgtttctgcttggtagttactattattataagtataggcagagtactattgaacagatggctaaagaggctttcgtggaagctgttaatagtgaagcatataggcggatacctgatgtgaaattgactgttggctttaatggcggagatatactgagaaaggatgatgttcctgaatatatttattggtatgatgagtcaggtgagaggaagtataagattgatcaggagaaacattggaagaatgtgacaatgaattctgacgtgcggataatacattcgtgtgcttttaaagactattcactcagtcttgattctttaaattgcaattggcagaactttctaaaaaagaaa

SEQ ID NO: 3029 - DNA, 1047 bp, Unknown
  gut microbiota DNA sequence
actttcacaagctggggctttgttattacctaaagattttgtatctttaggcataagattttcactatgacaaagacacattttcgtccttataattccaaccaaacagtgctttttcctcaaagaattgacgaggatattgcagagcatgatccagttcggatggttgacgctctggttgagagcctgaaccttgaaagtttcaggaagttgtataaggaatgcggccgcagcccttaccatcccaggatgatgctcaaggtcattctctatgcctatatgaacaacgtctactcctgccgtaaaattgaaaagctccttcatcgtgacatccattatatctggcttgccggatatgagaaacctgatttcattaccatcaaccgtttccgcaaccgggtgaaaaaggaaatcaacgaggtatttacccaaaccgtactccttctctcttccaaaggcttcatcaggctgaatgtggaatacattgacgggacaaagattgagtccaaagccaataagtatactttcgtctggcgaaaaacggttgagcggaactgtgaacgcctgatgaagaagatacatgtcctgttagggcagatagacgatgtcatcgcccaggagaactcatcggaaagcaatgaggagattgagttcactccggccatgctgactgaaatggctggagaattgcggaaagcacttgaacaggttcctgagccctccacgaaagaggaaaagactgcgttgaaaaagaaacgcaaacagctgaaggaactggaagaacacagggacaagctgcaggaatacgacaaccgtctgaacacgctacaggacaggaactcctattccaaaacggacaaggacgctactttcatgagaatgaaggaggatgccatgcgtaacggccagacaaagcccggttacaacctccagatcggcaccgagaaccagttcattaccgattttgcactcttcccgaaccctacggatacactgaccatgatacctttcctgcaatccttctcaagcagatatgacaggttggcc

SEQ ID NO: 3030 - DNA, 9292 bp, Unknown
  gut microbiota DNA sequence
aacgttgcaagcctttttcccgtgtataacaagatcgatgtgctatggatcactactaatgagaatgtgtggcaatatgatataaagaataacaaagctgaattgatttacccgctttacgctgtgaagagtgtgtgtaacagtgccgacggggtactgatgttgtatcctactaccgagtggtggtctgatggtctgataaacgagaaaggtaagaaactatttaacatctacggcgctaaaatctataagggtcgctgggtaatgaataataccttcagctaccccaaggagcataaacccaagtttgagtaatatataatgaaagtatggatattaggagcagtgggtctttggacgatatgtagttttgcacagcagcaagaggttcccatttatttggataataatcaacctatagagaagcgtgtggaagaatgctttggcacgcatgattttggaagaaaaagcggtaatgacccatgcccaatctaagttcagttctcccggtgttcttcgtttagggattcctgaaaactggatgtctgatggtccacacgatgtacgtgaagaactgctttgggatcaatggaatatagctaagtggacgaatgattcttgtattgcctttccggcattaacctgtttggcggctacgtggaatcccgaattatcttatatatatggaagcaatattggagaagaagcacgctaccgcaataagaatgtcctattggggccgggagttaatatctatcgtagcccgctgaacggccggaatttcgaatatatgggagaagacccatttggggcatcccgtatggtagtaccttacataaaaggtgtacagaaaaacggagtagctgtatgtgtgaaacattatgcactgaatattatgacgatgagaaacacgaatgggtggtggaaccgggagaatttcgagctttaataggagcctcctcagccgatattcgtagtagtgtaaagtttaaacttagataaatagattaaccaaaataagagaatatgaagaaatatataggcctcgtactagtggcgatgtcgggctgtatacttacagttaacgcacagcaatcattttcttataagaatccacttcttcctacagaactaagagtgaatgacttgctgggccggatgacactggaagaaaagatagctcagattcgtcatttgcattcgtgggatgtgttcgatggacagatcctgaatcaagagaagttggataagatgtgcggtggaataggatatgggttctttgaaggttttccattgacggctgcaagctgtcgtaagactttccgtgagatacaaacctatatggtagaaaaaacacgtctgggtattcccggatttccggttgccgaatctttgcatggagtggtgcatgagggaacaactatctaccctcagaatatcgcgatggggagtactttcaatccagaactggcttacgaaaagactaaacatattgcaggcgaactgaatacgatgggagtgaagcaagtgttggcaccttgtattgatgttgtacgtgatttacgttggggacgtgtagaagagtcttttggtgaagatcctttcctttgttcaaagatggcggttgctgaggtaaaaggatatatggaacatggaatttctccgatgttgaagcattacggtccgcatggtaatcctttgggtggattgaatctggcttcggtggagtgtggtgtacgtgatttatttgatatttatttgaaaccatttgaggctgtgcttgctgaaactgaaattatggctgtcatgtccagttataattcttggaatagaattcctaattctgcttctcgttttatgctgacggatattttgcgcaatagatttggtttccggggatatgtttattcggattggggagttgtcagtatgctgaagactttccataagacggcggtggatgatttcgaagcggcccggcaggttttgaccgccggaatggacgtggaggcttccagctcttgctatgcagtgctggctgataaaatacggaatggagagtttgatatcagctatatcgatcaggccgtgagacgagtgcttcgtgctaaatttgaattggggttatttgaagatccctatcaggaacaagcagtctatcggcttcctctccgttcgaaagaaagtgtgaaactttcacgtaggattgcagacgaatcgaccgtattgctgaagaacgatggacagttgttgccgctgaatgttcggaatttgaagtcagtagcggtgattggtcctaatgcggataatgtacaatttggagattatacctggagtaaaaagaaagaagatggagtgacaccgcttcaaggaatcaaaaacttgttgggtgatagggtgaaaatcaactatgctaaaggatgttctttggcttctttggatacttcggggatagcggaggctgtggatgctgcccgtcatagtgatgttgctttgatatttgtggggagttcgagtacagcgttcgtacgtcatactcaagagccgtctactagcggagaaggaatcgatttgagtgatatctctttgaccggtgcacaagaacaattaatacgtgaggtttttgctgtgggaaagccggtggttgttatattggtggcaggaaagccttttgccataccttgggtgaaagagaatattccggcgatattggcgcaatggtatgctggcgaacaggaaggaaactctattgcggatattttgtttggcaatgtgaacccttccggaaaactgactttttcatttccgcaaagtacggggcatctccctgtctattataactatttgcctacggataaaggatattataaagagccgggaacttatgaaaagccgggaagagattatgttttctcaaatagttccccgctatgggcatttggatatggattgagctatactcaatttgaatatctgaaagctgttacagataaagaactctatcaggctaatgataccgtttgtgtgactgttcaattgaaaaatacggggaaaagaaccgggaaagaggtgatacaggtatatatacgagatgtggtcagctcggtgatgacaccggtgaagcagttgaaaggtttcagaaaagtagatttacttcccggacagacacgggaaacgactataatgattcctgttcatgaattttatctgacagatgatttgggcaatcgttatctcgaatcgggcaaatttgaattacaggtaggtacttcttccgaccggatttatttcaaccttccggtgtatatcggttcttccggaaagggaggacagacggtgtccggtacttctttcaaatcacggacagatggaaaagtgattcaagtaaaaggaactgtccgtgatatacaggcaactccgcttgccagagtgaaagtccagtccgaagaatccggtgaaagtgcgttgactgactatcggggcacatatactatcaaggtgaaagataatggcagacttattttctcgaaaaaaggatttgccgataaaacaatagaagtagaggggcagactgatgtcagtattcaaatggctaaaggtgagtagatacatgaaatactgtatggctattggtttgctgggtagtatgactttacaagctatggctcaatatacaggaaaggttttcgttgatgagaacagaaatggtctcctcgatgaaggtgaaaaacgattgcatcgggtctctgtttccgatgggttaaatgtggtacagacagattcaaatggcgcatatcaattgcccggacattcccgtatgcattttctgtttattactactccttccggatataagactgataatgcctactattaccggatagagaacggtcgtacggaatacgattttccggtatatccttgttatggaggaattcaagctgacggtagtcaccggtttatacatatctctgatacagaaatacgtggaaaagaagggaatcaagcgtgggtggataatctccgtgactattcggccaatgagaaaatagcttttatcgtgcatacaggggatatttgttatgaatcgggactgaacagtcatataggcttgctgaataccgctttgatggaagacacgcaaatcttttatggaataggcaatcatgacttggtgaaaggtgcttatggggaagaacttttcgagaaactctacggaccggtattctattcatttgatgtggggaatacacattacataatgacacctatgcttcatggagattatttaccggagtatactaaggaagatgtatatcgctggatgaaaaatgatcttgcttatgtaggcaaggagaagtcgatcattgttttcaatcatagcctgccggaagatacggtagcttttaaatatggtatgagtgatacggagtatatagatttaccggctatgggattgaaagcttggttgtacggtcactggcacgtaaatcatgtgcataagcataaagtgacaggggtgtatactatctgtacctctacgcctgcttgtggtggtattgaccatgcaccttctgcttttcgtgtactgactgttgatacagagggaaacgtggcgtccgagttccgatacagttatctgtctccttcattacatattgtttcgttggagaatggacagctgccaacacttccttccggaaagattcctttgtccgtcaatgcctactctacggtttccccaatacgaaccatgcgttattggtgtgaatcggaaggtaaaaaagttctttcctccaatcttttgaaacgtcagagtgatttcaattggtatgcggaaattcctttgctttctcaatgggaacatcggcagcttactgtaatagtggaggcatttttcaataatggagaggtaaggcgatgcaggcgttcgtttttttatgaaaagcctgaaaggaaacaattgcctttgcggttgtcatggattaaaaatgtaggcgcttctatttttatgtctgctcctttggtatatcggaaacgtctatttacggcatcggtcgatgataatgaatcggggaaagcggctgtagtgtgtatggatgcgcaaaatggaacagtctgttggcggtattcacttcgtggctctgtacgcagtagtattgcgattgctgatggactggtctttgcccaagatgtacatggttacctatatgcgattcaagcagaaactgggacattggtttgggaaaaagatttaaatatcggtgtacttcctcctttgaatgacggtttggttgctgtttcggatatagtatatgccggtacaggaaaatcattatgtgccttgaaagcagctacgggggaacttatttggaagaatggagcttggagcaggggggaaggatgcgtggcaacactttctcttggacatagtattctgattgggcatgcaaactggaaggggttgtatgccaataatgctgttaatggtgagttgttgtgggagaataaagatgcagaattaaaatatcgttcggcctctgttgcttgggaaggagagaatctctatcttctttcttcccgttccttttttatcttgaattcaaagaacggtgagattatagtacgtaaaaaattgaattgttcggtcaatgtgaattcaactcctttagtcactggatccgagataatatttggaacagctactaatggagtcatagctttagacaagcagaccttagaagagaaatggaattttaaaacaaaccccgctttgatttatacatctccttattctaaaccatcatcttcaactgtagagactagtccagtgttggttggagatactattttctttggggcttctgacggaatactgtatgcattgaaccgtataaatggcaaactgctgtggaaataccaaaccggtgtacccatattttctacagtatctattgcgggaaatgctttgtatgtaacagattttgccggtaatgtgtatgggtttataatgaataataaaacacaagattaacgcgaattatcgtagattatcacagaaatgactttataagttgttgattattatatcaatatagggatattcaataaatgtcttaaaaaaatacgatggcatatgaagatgatgtcctaatatcgggatgggactatccatctgattgtgtaaatagaaagaggctgtctcaaaatagaatttcaagaacgaaaaacttatagattgaaatctctttagaaaaaatctccttattttgccctttcttataaggaaataaggctaaaataaggggattcttatacttcaacttacagattataagtaaggctacctcatttttctattttgagacagcctcatttctatcaagaaaaggtctgcatgtatatgcgccaccttttttcaaaggctgtctcttataaccgctttgtggaattggaaaagaggtggccatcccgttggctttgtttatcaaaaagatacttttaggcaaatgtacaggcatcagtttcgttgacagtactcctttacgggtatgcaagaacctctttcaaagattgtttgtcaatggcatacagcttataaccaagttaaaaagcaatatgaaaggaacgttgatgtcactttcagacaaactccttcttaggaaacgaaccattatagaaaccgttaatgacgaactcaggaatatatcacaagtggaacattcaagacatagaacctttgataatttcattgtcaacctcttgggtgcaatcgcagcatactgctgttttccaaagaagccgtgtatcaatgttacgagaacaattgatatacagcttgccttattttgaatttgtcgaactcacgttaatttattgtgtcaattgctccttaacatgaatcatggatttctttaggcttgcattcattactcgtgcgtaatgttgcgtcattcgtgtggaagcatgcccaagcataaccgatacatcttgtaggggtacattgttagcgagcgtaatggtagtcccgaatgtatgccggtatgtatgagtggtgatattttttttaatcccgcagaaatctgctatttctttgagatagctgttcattttctgattgcagggaactgggagacaatatccttttttgatacagacaggattattttcatacttttttagtatggcaagcggaacgggaagtagaggtatgttacagattgaagatgctttacgccgatgcatcagtttgattcttccttttctgatccaccagtctccattattatcttgcaccatatcttcttttttgagcgtggacacatcgacaaatgccagaccggtgaaacaggcgaaaatgaaaatatcccgtaccagtgccagtcggggtatagtgaattccttattcataacggtctgtaattcgtcatatgtgaggaatacaggagctgtttcatcctgttccattttgtatccataaaacgcatctttcttcatccaaccttttgccagtgccatatttgtgattttcttgaaacatttcatatatcgtacaatagtgttgcggcataaaccgacttctgtttttaaatgaaggtcaaaggcttttatgaattccggagtgagttcatggaaagtaatatcttctttgtcataaaatgtaggaatggaattttcgagttttttcagtacatttttgtaacggttgatggtcactggtgcatagtcaatattcacaactttctccatctccttgatttcttgtcgtattgctccaagcagggtacgcatttccgtatccttaccgaatacacgttttaatattaaggagggagtggatattgcctgctccagtataagttccttatatttttccaatgctcgcgtggctaattcagataaataactgttgagttcattggaagcccggtcttttcctttactacatcctttggctgcgttccacagtttgagaggaacgcttctttggattcgtgtttcttcgtattgaccgttaattgtgatcctcattagaataggtgcttcaccattttttaataatttcgttttgagaacgaaaaacagaatcttcattgttccttgtttcataaccttttttctttaagttggtaaatacaattagttattctgtcaacttgaaagatgagttggaagtcggtaaaaaagttaaaatcggtggctttttggtagacatggtctgaaaaaccaccgttttttttagttttaagattctctttgttttccttcatcttatatttgtcagtaaaggaagaatcttttttgcttttcttttttcgctgtttccattacattcaagcaggtatgcaaaagtatgtttttgctcctaaaaatgattggcgcaaattattgtaaatgagtgaaatatagtgcaatcggtggttttttaaagggactctgaaaaagccaccgaatgggacatttccagatactcgaatcggctagaatttgcgtattggagtataaaagaaaacccattgaaatgactgaatttcaatgggttccgagaaattaccgaatcgatagtggtgccaccagcaaccgaaagtcggcttgtatagcactatttctcaataagttatatctttattacgatgttagtcccttgaataaggttttcacaactttgcaccgttcaacacaagtttgtgtcttaggttcgatttctgcgtgcaaaggtagatatttatttggaattatcaatatttccaagaactttttttgtatttactgctaaaagtctgtttgaattttgttcagtattcttttaggagttgttttgaggatttttctctgtatcattaagaagaattgcaggctatgtgacggaaggttttcaatatccatgaagtatatagaaagaactttagtcgaaatgtcaggtatcaattttcccaatagattgaatcgtaaaggagtatttttatcgagtaatatgtataactacataaaccccactggtttcgaaacgtgcagccacattacaaatagggtaaatttcaataatggattgttttgatgaaaaaaactcttcaatattagacttactgacatagggctgtcatagaagacgctatctttgtatcaaaaagtattcaacttaatattatagaatatgaaaagattatttttatgctcatcatttgctgatgttgctaatctatttgtcgattgtgccaaagaagatttgcaagggaaaattatagcttttataccaactgcaagccttacagaaccaatacgattctatgta

SEQ ID NO: 3031 - DNA, 2679 bp, Unknown
  gut microbiota DNA sequence
gaaatctcatttttgggttataaaactaccactgttactttccaaggtagtaaagttagtgttattttgcatgaagattcagaaactcttagtgaggtagttgttgtgggatttggtgtgcaaaaaaaggcatctgtggtaggctctgtggaatctatcaaaccggcagaactgaaaataccgtccagtagtttgagtaatgcttttggtggtcgtattgccggtgttatcacgatgcagcagaatgctgaaccaggtgcagatggggctagcttctggattcggggtgcggctacctttagtggtactactaatccgctaatctatatcgacggtgtggaatcgtctaccgatgacatgaatgctctgccgcctgaggctatcgaaaacttttctgtattgaaggatgcttcagctacagcattgtatggtgcccgcggtgccaatggggttattctgattactacccgttcgggtaaggatatggaaaaggccagaattaatatccgtattgagaatacattctcacaacctacccgtacactgaaactagcggacgcagctactacgatggagacgagaaacgcagcggtttgggctaggaacccggaagctacggctttttatacgcaggagagaatagacaatactcgtaatcgaattaatccgtacttgtatccggatgtggactgggtggatgttctgttcaaggatatgtctatgaaccaaacagctaatatcaacgtaatgggtggtacaagtaaagtcgattatttcctgagtgctacgttgaataatgataatggccaattgaagcaggataagaataattcatttgacaataatctgcaaaatctacgatattctattcagggtaacattggcgcatggctgactaaaacaacaaaagctaccatacgtcttaatacacagattgaacaatataccggaccaactacgagcgtaccggatctttatcagtttgcattacgtgcaccgagtatgtatttcctcccttactatccaaatactattaatgccgatcatgttcttttcggtaatagctatgaaaatgcttctgagggttcgggataccacatgaatccgtatgctgagatggtgagaggtagacagcatagtgcagcttctactatcaacgctagtttggaattggagcagaaactggattttatcacaaaaggattaagttttaaagcattgattaactttaaaaactattcgtacacatactacagtcgtacgtttaatccgtactattacagattggatagtgcagacccattggaatctggaggatatgatttccaatatacatctatgaatcaaggtagtacagcattgactttagcctcaaatggcagttcgggagatcgctatatgaatattcaggcattactgaattaccagcgtacgtttgccaacaaacatgatgtgggagctctgttcgtttacttacaacgtgattacaacgttaataatcccggtgactattatgctacactgccacagcgcaaccaaggtattgccggtcgtgtgacgtatgcttacgacgggaaatatctggctgaagctaattttggctacaatggttccgagacttttcagaaaggcagtcgttttggtttctttccttcttttgcagtaggttatatgatttcaaatgaagaattttttaagccacttaatggcatttttactagtttgaaattgcgcgcttcttatggcttagtgggtaattccgatattggcagtggtcgtttcccctatctaactaaggtaaatctgaatggtggtggtagttatcagtttggcaagaactgggataactcggcatctggaacttcaatcagtacatacggtgctgataatgtgacgtgggaaattggtgagaaatatgatattggggtagatatgactttattcaaagatttgaatttcactattgactactttcgggagaatcgtaagaatatctttttgcagcgccagaccatttcagttgaaaccggtatcactggtacggctccttatggaaatttgggtcgtgtgaagaacgaaggtctggatatgtcgtttaattataatcattcattcaataaagacttttttatttcggcgcgcggtacatttacgcttgccaagaatgagtatgtggaaagagatgaacctccttatgaatacagttatatgtcacaagtgggacaaccgttgaacaattattatggctacatagccgaaggtttgtttcagagtgaagatgaaatagctgatagtccaacgcaagagttagggacttataagactcaggtaggtgatatcaaatacaaagatttaaatggtgacggtaagattgatggtaccgacaagacttacatcggtaatcccagtgtgccacagattatttacggttttggtgctagtatgcaatataagggttgggatgcttcgttcttctttcagggtgttgccaaacgggatattatgttacaaggtatccattcgttcactggaaatacacacaacctgatgcaatgggttgttgataattactggagagaagatggtgcgaatccaagtgctgagtatcctcgtctgaccaacggctcgaacccaaatacaaccgagccctctacttattggcttaaagatggatcatat

SEQ ID NO: 3032 - DNA, 5485 bp, Unknown
  gut microbiota DNA sequence
aaggaattcggtttaccttttaaaaacgctaaaaaagactaatagatatggcaaaggaatcaatgaaagcacgtgaagtaaagcgtgctaaattagtagccaaatacgccgagaaaagagctgctttgaagcaaatcgtaagaacaggtgatcctgctgatgcttttgaagctgcacaaaagttgcaagagttgccaaagaattctaatccgattcgtatgcataaccgttgcaaactgactggccgtcctaagggttatattcgccaatttggaatttcgagaattcaattccgtgaaatggcatctaatggactgataccgggcgtaaaaaaagcaagctggtaattattgtttaaatattgtcagggtagtcctgattaatttaatttattttttatatgactgatccaatagcagattatttaacgaggttgcggaacgcaattagtgcaaagcacagagttgttgaagttcccgcttcgaatttgaaaaaagaaatcactaagattctttttgagaaaggctacattcttaactataagtttgtagaagatggtcctcaaggaactattaaggttgccttgaaatatgattctgttaacaaagttaacgcaatcaaaaagttagaaagagtatcttctccgggtatgcgtaagtatactggatataaagatatgccgcgtgttattaatgggttgggtattgctataatatctacttccaaaggtgtaatgactaacaaagaggctgcagaactgaagatcggtggtgaagtcttgtgttatgtatattaatttaggaggaattagcaatgtcaagaataggaaaattacccattagtatcccagctggagtgacagtcactcttaaggataatgtggttaccgtaaagggacccaaaggcgaaatgagccaatatgtgaatcctgctatcaatgttgccattgaagacggacacgtaactttaacagaaaacgataaagaaatgcttgataacccgaagcagaaacatgctttccacggtttgtatcgttctttggttcataacatggttgtgggcgtatctgaaggatacaaaaaagagttggaacttgtcggtgtaggttatcgtgcttctaaccaaggtaacattatcgaactggctttaggttatacacacaatattttcattcagttgcctgctgaggtaaaggttgaaactaaatctgaaagaaataagaatcctcttattatattggaatcgtgtgacaaacagttgcttggtcaagtttgctctaaaatacgttctttccgtaaacctgaaccatacaagggtaaaggtattaagtttgttggcgaagtaattcgtagaaagtctggtaaatcagccggcgctaagtaattcatataaaattagattattatgacaacaaaaatagaaagacgagttaaaatcaaatatagagtacgcaataaagtttcaggtactactgaatgtccgcgtatgagtgtatttagaagtaacaagcaaatttatgtccagattatcgatgatctttctggtaaaacattagctgctgcttcatctttgggtatgactgaaaaagtcgctaaaaaagatcaagctgctaaagttggtgaaatgattgctaaaaaggctcaggaagcaggtattactactgttgttttcgaccgtaatggttacttgtatcatgggagagtaaaagaagtggctgatgctgctcgtaacggtggacttaaattttaatcattatggcaggagttaataatagagttaagataactaacgatatagaactgaaagatagattggttgctattaatcgtgttactaaagttaccaaaggtggtagaacttttagtttctctgcaattgttgttgtaggtaacgaagaaggtatcattggttggggccttggtaaagcaggtgaagtaacagctgctatcgctaaaggtgttgagtcagctaaaaagaatctggttaaggtacctgtattgaaaggtactgttcctcacgaacaatcagctagatttggtggtgctgaagtattcatcaaacctgcatctcacggaactggtgttgtagcgggtggtgctatgcgtgctgtattggaaagtgttggtattactgacgttttggcaaaatctaaaggttcttcaaatccgcacaatcttgttaaagctacaatcgaagctttgagtgaaatgcgtgatgcaagaatgattgctcagaatagaggtattagtgttgaaaaagtatttagaggataaggaggagatatgtcaactataaagattaaacaagttaaaagtagaattggtgctccagctgatcagaaaagaactcttgatgcactgggacttcgtaaactgaaccgcgtggttgaacacgaaagcactccttcaattcttggaatggtagataaagtaaaacacttggttgccattgttaagtaattatttgttgaataataaaacgaattacaatatgaacttaagtaatttaaaacctgcagagggatctactaagacaagaaaaagaataggacgtggtaccggttctggcttaggtggtacttctacaagaggtcataaaggagctaaatcaagatctggatactctaagaaaattggttttgaaggaggtcagatgcctcttcaacgtcgagtacctaaatttggttttaagaatattaatcgtgtagaatataaagctatcaatctggatacaatccagaaacttgctgaagctaagagcttggttaaggttggtattaatgactttattgaagcaggatttatttcttcaaatcagttggtaaaagtattgggtaacggaactctgactaacaagctggaagtagaggctcatgcattctctaagactgcaactgctgctatcgaggctgctggtggaactgtagtaaaactctgattcaatgagaaaagctattgaaacattaaagaatatatggaagattgaggatctgagacagcggatcctcatcaccatattgtttgtggcaatttaccgttttggttcatatgtcgtgttgccgggtattaatccggctatgctggcaaaattacacgaacaaacaagtgaaggccttttagccttgttaaatatgttctctggaggagcattttctaatgcctctatttttgcattaggaatcatgccttatatctctgcatctatcgtaatccagttgttgggaatcgctgtgccgtatttccagaaattgcaacgcgaaggtgagagcggcagaagaaaaatgaatcaatatacccgttatctgacgattgctatattgttagttcaggccccttcttatttgctcaatcttaaaatgcaggctggcccttccttaaatgcttcattagattggactctgtttatggttacctctaccattattttggcagcaggtagtatgtttattttgtggcttggtgaaagaatcactgataaaggtattggtaatggtatttcatttattatcttgattggtattatcgctcgtttccctgatgctttgatacaagaagttgtgtccagagtggcaaataagagtggtggtctgattatgtttataattgaagtcgtattcttattgttagtgattggcgctgcaattcttttggttcaaggagtgagaaagattcctgtacaatatgcaaagagaattgtaggtaataagcagtatggtggtgcacgacagtatattcctttgaaagtgaatgctgctggtgtaatgcccatcatttttgctcaggcaatcatgtttattccaattacatttatcggtttttctaacaatgtaaataatgcaggcggtttcttgcatgcgtttacagatcatacaagtttctggtataattttgtttttgcggtaatgattatattatttacatatttctatactgcaataacaatcaatccgactcagatggctgaggatatgaagagaaataatggttttatccctggtatcaagccaggaaagaaaacagcagagtatattgatgatattatgtctcgtattactttaccgggttctttcttcttggctttagttgccattatgcctgcattcgccggtatatttggggtacaggccggatttgctcaattcttcggcggtacatctttgttaattcttgtaggtgtggttcttgatacactgcaacaggttgaaagtcatttgttgatgagacattatgacggtctgttgaaatcaggtcgtattaaaggacgcgctggtgtagcggcatattaattctttagaatagaaatgatatttcttaaaacagaagatgaaatagaattgctccgtcagagtaaccagcttgtcggtaggactcttgcagaggttgccaaggtggtgaagcctggtgtaactacacgtgagttggataaagttgctgaagaatttattagagaccatggagcaactccaacttttaaaggatttccgaatcaatacggggagccgtttcctgcatccatttgtacttctgtcaatgagcaggtagtacatggaattccgggagatattgttctaaaagaaggtgatatcgtatctgtggattgtgggacatatatgaacggtttttgtggagattctgcttatactttttgtgtaggagaggtggacgaagaaattcgtaatttgttgaaggtaactaaagaagcgttatatattggcatacagaatgcagtacaaggaaagagaatcggagatatcggatatgctattcagcagtattgtgagtctcattcttatggtgtagtgcgtgagtttgttggtcatggcattggtaaaaatatgcatgaggatccccaagtgcctaattacggcaagagaggatatggtcctttgatgaaacgaggtctttgcattgcaatagaacctatgattaccttaggagaccggcaagtgattatggaacgtgacggatggactgtgaggactagggatcgtaaatgtgctgcacactttgagcatacggtagctgtaggagctggtgaagctgatattttgtcttcattcaaattcatagaagaagttttaggagataaagcaatataatatggcaaagcaatctgcaatagaacaagatggagttatagttgaagcattgtcgaatgcaatgtttcgtgttgaattagaaaacggacatgagattactgcgcatatttcgggtaagatgaggatgcattacatcaaaatcctgccgggagataaagtgagagtcgaaatgtctccttacgacttatcgaaaggaagaattgtgtttagatataaataaaattagatatgaaagtaagagcatcattaaagaaacgcacgccagaatgtaagatcgttagacgtaatggccgtttgtatgttattaacaagaaaaatcctaagtataaacaacgtcaaggataatttattatttttgcaaaaaaaataatttagtatatggctata

SEQ ID NO: 3033 - DNA, 63192 bp, Unknown
  gut microbiota DNA sequence
ctcgctccataatcataccagtccaacccacctttacgatccaactccttgccattatacttataaggctggacgctctgccgggaacttgttgacatcaatccgccgaaagcataataatcgttcacttcctcaaccgttccctcctcatctacaaccacacgattattaccctgatgatctttcaaataataatgatatttaccgtcagtaagggacacatagccgacttccgtcaatagaatctgaggtactccattttcatagaccacattgccgcagtaatccgttgtaacactgtctccttccagaacgtgcacggtacggagtttcctacccgcagcatcataaagataagatatactgttaccattcgcaaacattacacgactaggcaaatttaaacaattatactgaatagcagttttatttttgtttaaatctttagtcaggttgccgttttcatcatattcccactctattgcttcatggacaccgtctgtaaactcaaaaccattattaaaagctaaggctgtgtcagtcactctcttcagtcggttaccggtataaagcaaagagattgttgttcggattaggtacacctataccccatccatataataaaaaaataccctaacataagccttatactttatgctagggtaggaaggttattcaagtatcaatttatgttaggataatcattataaaataagtctttattctatttcaaaatcacccttttctgtgtgaataaaaccttttttccatctgtaatcatcaacaataattttacaaactacaaaacaagaacgaggataagatttaaaacctggctgtactatcaattcatctatcaccttctcaacatcttcacgaaataaaaaagttcctatatgcatcgattcttcatatccatgataaacatgtcgatgatctaacctataaaaaaatatatcactcatcatctctaaatattcttttttgatattcgaaagcttcttcaactgtacaaaaaccttctttccattcataattaccaatagatacaatattagaaagtttaaaacatttttgagaatgcaggcaaaaaccaggttgatgccttaatgctttaatagctttccaggcattttgtgtagaagaaaacaagcctataaatttcacaaccttatctcctaaggctttatcctcatacacatgataaagttcataatagttattcttcttattcaaaacttctatctccatatttattttttgagaaatacgaacagaatcatagactaattcaaactataaatctttagtcaatgtttcagtttgatattgatgagcaaaacaacgtttatagtcagcattgatttatctacgtgaagctatcatcttatcacaaattctcattattataacaaaaagagcccttatacagaagggaaataatatccatacaccgattaattaaaaaacaatctatgtctggacaataatacatatgaacaatcccagcctaaactgtttctacaatattaagcagcagaagagaccgaaatataacataactagaacaccaaacattatctaccttttctatagataccggagaataaaaattatctctaactttttcttggatcttagctttcactttttccgtgaaaaattgtatatccaaattatcagcccaaataacgagcgcttccattaaattagaagattcatattggctaatataagtaccttttttatactctgcaataaatgtaaactttttcattaccaattcccttttgcattcatactatgattttcacctgtaaaatcctgtttctttttccaatgtttaacttgattctcgagcttttttaatgatttcttgtcttctggagtcttattctgttttaaattcaatttatcatattgagatttaatatcctgatatttctgcctcgcagactcttttgcctttagactagaatgcttctcattctttccgcttgatttagaatatccattgctactattttcattaaccctcccttttctagagaataacttcatagccccgctcgtagccataagtgatccgtgagtaacatccaccactccttttgttgaaacagccaaggacactccgccagtttccggacttcccaataaaccggcggcaacttccccggaacctcttattacttctgcaccacctataaaaaggctaatcacatcaccaacatcctgacctacgttataagcacctgcactgctatatattcccgtttcacgtaaagaagtacttcctaacagtatattatccgttacagcacgtactgctccattagtaaaacttagagtggtatttaaagcattgtttaaaccattcctgattcctctccaagtaggccacataccgttagggtcaaccaagagaataggattatttgcacagtataaatatggactcacaccataatacttctcactcatcggatccaccgcatgccatcttcccaacaccgcatcatacatcctcgctccataatcataccagtccaacccacctttacgatccaactccttgccattatacttataaggctgagcatctccggtagaagaaaacacacctccaaacggataataatgattcacttcctcaaccgttccctcctcatctacaaccacacgattattaccctgatgatctttcaaataataatgatatttaccgtcagtaagggacacatagccgacttccgtcaatagaatctgaggtactccattttcatagaccacattgccgcagtaatccgttgtaacactgtctccttccagaacgtgcacggtacggagtttcctacccgcagcatcataaagataagatatactgttaccattcgcaaacattacacgactaggcaaatttaaacaattatactgaatagcagttatatttttgtttaaatctttagtcaggttgccgttttcatcatattcatactctgtggacaagtcaacaccgtccttgaactcgaagccgttattgaaggcagaagtgcctgaacggtctgccaccttctttaaccggttaccgacataactcaaagaaagatcatcaatcacatcataacccgtcgctgaagtctgcccgtagcgcttcaaacccaagatattacccattttatcatagcccgtcacctgctcattaaaacggttaatatttacagaaagcttcggcccttcaccatataaagcatctgaaagacgggaaagaccgtcgtacatgaatttatagccacgttccactgcttcattaccgcttttccaactcatactactgatattgccgttgtagcaagcccttcccggaccgtccgtataataaagcatttggctgaacaatggatgacgaataccggtaagccagccacggatattataagaataggtaacgggagcagaagaaacaccatggtaaacacaggccgaaagacgtcccaaagaatcgtatacattttcaaaaagagttatggcaggcgcattgtcctgttgatgcgtaacacgaaccaaccggtcaagggaatcataactataagtctccgcatatatacagttggctttgccaggaactgtatgtacatgacgatgagaagctactttgcccgtaaaggtatacgaataaaaatcacgttcaaatcccccaaggaggttcgtagaacatttctggattacatttccataacgatcataataaaaaaccgcatatagacgtctaaaagattctccgggaagatctacgtctaccgaggtaccggtaagcaacccacaggaagaagctgaaggggtttccgtgtttacatagcggatcccgaaaccggggagttcgcagtaatcgagcgaatctttaatgacagacaattcgggagtatacagaaaatcgtagttatcataatatttccgaagacaggagtttaccaagtctcgtccaccgttggaaccacgagtcatttcggtcgtactcgtaagacgtccgaatacgtcataagcataagccgtataatgcgaacgggaatgctggacgccatcttcactacagatgatacggtctgcattatcatatacataggagacctcatcacagcccggatatttcttctttatgcaacgtcccaacccatcataagaatattgatatgcccacaaatccaagtcttcattctcctgatacgatggagggagaacatagcacaaacgcccaaagctatcgtaaacaaaataagtatcagaaaaaacattgccgtcgcacgaacgaacaagtaaaacacgcccctcactatctttaaatgtatagctccggtatccgtcttcatctgtattacaaaccacagagagagagtttgctttgtaatatccgtcatataaaagtctaccaccaccgtctgttaccgaatatttcttacaggaaagaacagaatcaggagaagctatattaaagaaataatcattttttatccctttgccaacccaagccttgcccggaccggattcccaagtaacacgatccaaaggcaaagtatggtaatcatagcttgtataagccaaagaatcctgataagtttccagaagtttcttcttcagatcatacgagttattatattcctgttcaatacatacaggcaaccagatgcatttgttacgtccttgtgtgtcgtattcctgcaaggatgccagatgacggttaccaccgacggcacctttcaatacagccagataaggccgtcccaggccgtcataatattgaatttggtcaatagtggcaacacctaaggagtcacacatagtacgtgtaaggatataattatttgttggtatctgtgaatgagcccatagagtgagcgtcaaaaataaaataatacaatatagttttttcataatcatctatgtttttaattattagaaattgggtttaccacatgatagtcataggttttgacaatgttatgatctgtatcgagtacttttgtcaagcgtcccaaggagtcatagacattgaaattaccactgccattcggatgattcacttccgttgtccccacaagtggagtatgattgtagagcgtaatttttgcttgaggacaagtaccccgaagagatttcagagcagaatgtacagcctcaggtgaaatgttacccttcactacattttccggttcaagaccggttttctcacttatctgcatgatgtccagattttcaataatcgctagcacatactgtcctccgtatccccagataaaacagacaactgtaccatcttggcgtgtcacctgcaacggacgtccacaagaaagataaacgtcatacgtttccgtatcacggaattccgtattggcatcgttgctgctttccattatttttgccagactgaacccactctgtgtattttcatccgcacgataaacataacgtatcgtcttttttaactcatcgttcctatatctacgttcttctaccggaaaagatacagcattcttagctaccattatgtcataaggtgtctctgccttatcaaaaggataactatattcggttttataggtatctcctccaggagccgtccggattatcttataaagttggttgtatttctgtccggatgtcgtattattgccatatacataactagtttgctcctgttgttttccccctggcaaagagtcaatttgtagagagtaagacacccgtggagaagttaaattcaaaaagtaagttttgatttcatatgaactgcgatacctctcttccatgttagttcctcccccgtaattttgaatgattacttttctttccagatcatcaagggaaaccattttagaggagtgagaatccaaccgttcgctatttgcattttgatttccgaaatgatgagtgccgtaacctgttatattatccccttggttgacagcagaactgtaatatagagcattgttttcattttgaaggtattcccatgagaaatgattagcagcataagggtaaacatgtttcgtaagcacgtcaccacaatactcctccacatcgtcataatatacgtcattatcattagtgaaaatattttgtcccagataaagagtgtaatcatttctaaaactttgcccatcgaacagatagagtttctgcattttttttctaaaagcccaaccggtcatgggatagcgtaggctacctgcatcgattgaagaactattcgagaggtggtatttgaattttctcactatattctcacccgacccactattctctacaatttcatcaatacgggctcctccagcaggttcagacatccgtgcatcattaagtatcgtattctgactgtaataaaacactgtatttcctcccgtaggatatgtgattttctccaatgaataagccaatgtatttgccaacgaaggtaaccggttataggcacctccaatcgtaacagaatcaacaataactccggtattatacagcggtacgcgctgattgggaatcaaatcggtatttccctcttgcccattgtaatatccccaataatccactcctttagtgtatggagaatagtccaaagcagggagcctgtaattaaattcatacacttgactatccgaaccggaaattcctttaatccgaatacggtcaagaagcacgcggttatattcacgaagagtcgtttctatattaatttcacgaattaatgtgcctgaattattgtaaacacagatactctccaatgtcttcgtacgatttgaataattgaaacttacactcccattcaaaaaagttatattctccagataacggatagttacataagaatctccaaccggataaggctggggatccccccaagttttatcgctatcgccattctgacctggagtataatattgctcaataccattgacacctttccaataaccggaaggaggtacaagcggagagatattaggaactatggtatgttcaactgcataatagtcataatttcccggatgatattcctgaggaagagcagtgttgtacgaaaaactcatcctctcaccatcgaccgattcaatagaagaaaccttccatgatgtattgtaggatattccatctgaatgagttgttgattcacgggcataggaagattccccgaaaacatagcgagttccatagttatcaaccaagtttatactattctggaaatactctgtagcacatcctccgggaacagtcaactgtacaggatcttctgtcaacacattggggtgaaaagcgagtttatcggtcatgttcagaataaatttaccggaagaagaaagagttctatagtgaaatatatcacattgcaagtcctttataccttgccctacctgtgagtagaaaagagcattatttgttttcatataggtactatcgcgcaagaaagacagttcatccggtagtccgcgtatctcacgggttattataggttcggcttccaaccgccatcctagagctacggcaccgttcaattctcctaccttaattcctcctgtagtataggacaaggttataggaagagtaaacgatggagtcttaatctcatataatggaatacgaacagtgacttttcctcgacaatagtccacttcttccggaaccttcttaaataaggcagctgcctcaacggaaacaggataaaagtcattaattttactagccatgccatatattgaaggagtatgttgtgcgagcacctctggaaatacgcacaaacaaataaaaaataataagaataattttctcataacgtctagtttttatagtaaatagtaatattggttttaaattttataagtgatacaatcattataatataattgtatagtgcatctgtcattcggataaccgtagagaggaaaaatctactttagtttgtcacaaaaaaggagtccttcccgggagggactcctttgcaaatttagaaaatattacagattcatcgcattagcgcccaaaacgcctgccaaagccgaagccactgcgataaccaccttcaggatcatatcccataccgatttcttcattgccataatttacctcctttccgtgtctttaaatacttgtgttactctgtgttcttccgtgctcaccgcctcggttgcagattccccgaattctctggacgcatcgaagcacgggcactgtttaatccactcttccggctctatctcaccgttcccgttcaagtccggtgaaagatcgcgatgcccgcatacccggcagccagggaaacgcagctccaaatcggccacaagttgccggagcgtagcccgctgcgccggagtccgggtatctgccgggcgtccccggcagtccagaccaccttcatagcagatacctatcgaatgggcattgaagccttttgcgtgcgccccgatacgttcgagcgagcgggtgaggtacaacgttccgtccttgcggatgtagtagtggtagcctgttccgttgaatccgcgacgccgatgcatcacgtccaaagcttcaggggagagtgtacaatcctccctcgtggcgctgcaatgcaccacgaacaaattgatagttcgcataattagtgaataattaatagttcagttaagcacctgccgttcagcagaatacttcgtttagtttagtcgtttgaatctgtgttgtgccggagaatcacactgacggatccggtgtcaccccaccgccggaaccgccgccttcgggcttgccaccctctccttcaccagaagcagaggtatcgatacggtcgaaacggacacaccgggcgcctgtcactagcgaacgggtggccatagtgccatccaaatgacgggtggaacagggaagaaagcgaactgtcagtgaagcttgggcggcagacacgtcgtccacagttttcacacctttaccgttcgacttcatcaccagacggaaagttccgaaaccgtcaagcgtcacactctccgaggattgaagatgctggctgactaccgtcaccaggttgtccagtgtgttcttcacatcacccggggaaagggaggaataagccgctatctctttagagatctgtgaagtacttacattacctgtgcgcaacacacggggatagaatagttgttctccgtttttgtctttcagaacggactgaaatggaccatacaatactggcataatcaaatttgtttttgtgttaataaatttagtttagtcttgtctgtaagcttatcgacaacacaaagatacaatagttacatttcatatacaagtgattttcaatatgtatcttaactaaattcttaaccggcataagtgaccgaaaatcaagaaacagcagcttcttccttcctgcttacaacacttaaaagataacgtccgggaagttttatcttgcctccactgccacgcaacgtggcaatcccacgccagaccgcaccgccgatagccccgaaattacttttaaggataatcgcatactgttctgaaggcgggataccgtagctacggagattatcgagcagccccgcatagttacgcgatgtcccgtcagacggcggaagaagggcatcgacagtttcctgcgtccactttttccgtttccccgaaccggaaacatcccgcccgcaggaacttccggaagaaatctcctccgctcctatcttcttcctttccgccttctcccctgccgttttcaggggagaattgaagtggggttgtgctttgctttgttgtgctacgctatgctctgatgtgctattctgtgctatgctatgtgtacctgatgttacattttcgggaataaatgtaacattatcacccacgctaacgcttttaccgccctccgtttcctcactcccgaaggccggctgttctttcatatcaaccttattatcagccggttcatcatctgcaagcaggcaatacccggcttccagatgtgaaatgctgcggcgacgggtactgaaaagatactgccgttgtatttcgacggaagtcaggatgcagctacgctcaaaaagaaccgcgtcgaacagtctgtattccaccgccagacggacgatacgttccacgtcatcagcgctcttctcgtacagacccgccgagaggtcttcgtaaaacaaacggtccgcacggacataatacccctcgcccgcatagatatacgacaggatttccaccagaatgccaagcgcggagtcaccctcacgcttcatcaggcggcggacagcacggtcgtgaataaaatccgtattcagcgggaaataatccaatccctttttctttattcttgccataataattctgttttttgataaatactcaatataaaaaacccgcttttacagcaaggcttcttcctgcattcccgcctttttgcgttccatgctaagcctcactacctgaagggcgtgcagaataagccggagacgtgtttcccggtcctcagtctgtgttatgaccggataggaaactcgtccaccggacaaagagcaatggggaagtttcttaccactgccgtattgccttcggctcagagatttgcgacactccttgcaatatttatccggagactgcgtttttttgttcatatagaaggactccaacggaagctcacgtttacaactcttgcaaatactgctggatgtagattgttttgtcgataaagataatgttgttttcataatgataattttgatttaaattctgagaaaaaagttgtttatttgccggagatgtatgtccgacatggtggacatatatgcttaccatggtgaatctatatattcatcacagtgtatatatatggctaccggagcagtgatacaaaggggatgcaaggctgggggacgaacttttctgcaacctttcggaaacttttctacgtttttcatggctattctatttttaatttatatttttgaaacatatttgtaatttcaccgctacaaagataaacaagttttcattaagaaaacatatggttttagaaattaattcttaaaaaacagataacggattattaatgagcaactaatacgtttatgattttttacatcaaaattaaatgctaacaaaatggatacaaatctggatgtacccggcatcatcaaacgtgccaagcaggcattaaacctgaagagggacagcgaactggctgaattcctgggagtttcaagagcgacagtcaccaactgggctgcacggaacagtatagatttccgcctgctgctcgacaaattaggaaatacggtagactacaactggctattgttgggaaaaggcaacccgaaacaccagtcgagattttgcgaaagcgaactggcacaaggggaggtgcagataattcacaatcccaaaacagccgaaccagttgacgaccgcagcgtgacactatacgacatcacggcggcggcaaacctgaagacgctgttcaccaacaagcaccagtatgccttggggaaaatacggattccgaacatatccgcctgcgacggggcggtctacgtcaacggggacagtatgtaccccatactgaaatcgggagacatcatcggatataaggagataaacagcttcgagaacgttatttacggggaaatatacctggtttcgttcatgatcgacggagacgagtatctggcggtgaagtatgccaaccggtccgaaaaggaaggatgcatcaaactggtgagctacaacacccaccatgaaccaatggatataccgtttgcggcgatcaatgcaatggcaatagtgaagttctctatacgcaggcatatgatgatgtaagttttcgtcaggatgaaaaagtattttaagtgaaataatctgtgttaatccatgtaatccatggtgaaaagtcattatctttgcacattgcaaagcagaaaacaataaaatcacgctatataatggaaaagaaattcaaaagaaccaccgtcacatcggccctgccgtatgcgaacggacctgtccacatcggtcatttggccggtgtatacgtaccggcagatatctatgtgcgctatctgcggttaaagaaagaagatgtattatttatcggcggttcggacgaacacggagtgcctatcacgatccgcgccaaaaaagaaggaatcactccgcaggatgtggtagaccgttaccatacgctgataaagaaatcattcgaagaattcggcatctccttcgatgtgtatagccgtaccacttcaccgacgcaccaccaactggcttcggatttcttcaaaacattatacaacaagggcgagtttatcgaaaaaacatccgaacaatattacgacgaggaagcaaaaacattccttgccgaccgttatatcaccggcgaatgtcctcactgccactcggaaggtgcctatggcgaccaatgcgaaaagtgcggtacttcactctcaccgacagaccttatcaacccgaaaagcgccattagcggcagcaaaccggtgatgaaagaaaccaaacactggtatctccccctcgacaagcacgaaggctggctgcgcaaatggattctggaagaccataaagaatggcgcccgaacgtgtacggacaatgcaaaagctggctcgacatggggttgcaaccacgtgccgtaagccgtgacctcgattggggtatccctgttcccgtggaaggcgcagaaggaaaagtgctctacgtttggttcgacgcgcctatcggctacatctccaacacgaaagaacttcttccggacagctgggagacatggtggaaagatcccgaaacccgtttgatccattttatcggaaaagacaatatcgtgttccactgcatcgtattccctgccatgctgaaagcagaaggcagctatatcctgccggacaacgtgcccagcaacgaattcctgaacctcgaaggagacaaaatctccacttcccgcaactgggctgtatggttgcacgaatatctggccgatttccccggtaaacaggacgtactccgctatgtgttgactgccaatgcaccggaaacaaaagacaacgacttcacctggaaagactttcaggcccgtaataacaacgaactggtagccgtatacggcaactttgtgaaccgtgcaatggtgctgactcagaaatacttcgacggatgcgtacccgcacaaggtgagctgaccgactacgacaaagaaacgctgaaagaatttgcagacgtaaaagccgaagtagaaaagctgctcgacgtattcaaattccgcgacgcacagaaagaagccatgaacctggcacgtatcggaaacaaatacctggctgacaccgaaccgtggaaactggcgaaaactgacatggaacgtgtgggaacaatcctgaacatctccctgcaactggttgccaatctggcgatcgcttttgacccgttcctgccgttcagctcggaaaaactccgcaagatgttgaacatggacaccttcgaatggtccgaactggggaaagacaacctgctccccgtcggtcaccagttgaacaagccggaactgctgttcgaaaagatcgaagatgccacaatagaagcacaggtacagaagttgcttgacacgaagaaagcaaacgaagaagccagttataaggcgaatccgattcgggcaaacatcgaatttgacgacttcacgaagttggatatccgcgtaggaacgatcctcgaatgccagaaagtaccgaaggcagacaagttgctgcaattcaagattaacgacggtctggaaacgcgtacgatcgtgtcgggcattgccaagcattacaaacctgaagaattggtaggcaaacaagtttgtttcatcgccaaccttgccccccgcaaactgaaaggtatcgtcagcgaaggcatgattctgagtgccgagaacaacgacggcagcctggcagtcattatgccggaacgggaagtgaagccgggtagtgaagtgaaataatgaaatgagcgaggaacaatcactaaaggacaaaacagccaaaggattattctggggagggttcagcaacggtatacaacagttgctgaatctcgttttcggaatatttatcgcccggctgctcaccccgtcggattatggaatggtggggatgttagcgattttttccctcatagccggctcgatacaggagagcggcttcacggccgctcttgtcaacaagaaagaggtgacacacaaagattacaatgctgtattctggtttaatattataaccagcctgtgcctgtatctggtgttgttcttgtgcgcgccactcatagcctatttctacaaggttcccgaactgacgccgttggcacgttattcttttacaggctttttcatcgccagtctgggaatctcacacagtgcttatctaaaacggaatctaatggtcaagcagcaggccatgtcctcggtgatcggactgactgtatccggcattgcgggggtcacgctggcttatctcggcttttcctactggggatatgccacgcaaagcattgtctacgtagctgtcaacactgcctgttactggcatttcacccgttggcggcctacgcttcaattcagcctcgcgcccataaaagaaatgttcggattcagtggtaaactgttaattaccaacatattcaatcacatcaacaacaatctcttctccgtcatattgggtaagtactactccaagatagaagtcggctattacaaccagtccaacaaatggtgcggcatgggacaacaattcatactgggcatgataaacggagtggcacaaccggtacttgcgaaaatatcggaagataccgaccgacagcaacgggtattccgcaagatgttgcgtttcaccgccttcatctcatttcccgccatgctgggactgggaatcattgcagaagaattaatcgttatctccattaccgacaaatggtactccagcgtatctatcatgcagatattatgtatcagcggagcttttgtccccattgccaacctttaccagcaacttatcatcagcaaaggaaagtcacgcatctttatgtggaacatcataatcctcggcatgatcctgctcacaggcgttcttctggtacattcttacggaatatatgccatgcttgccatgtatgtctcgaccaatatactatggctactgaggtggcatcacttcgtgcagcttgaaatcgggttgaaactacgccacgcactggccgatattcttccctacgccatcatagcagcctccgtcatggcagttacctactacaccacccgccctatcgaaaacatctatgttcgcctggcaagcaagatactactggcaatggcactttatgcagcagccatgtgggcgagccgttcggtaactttcaaggaaaccatacactattttatcaaaaagaaaagcgcatgaaactactcgctctcgtcacactctattatccacccgcacacatcaccgacaaccttcttacttatgcagaagatgtggacggattgtttgtctgggacaacacccccggaggcagtaactatcaatttccggaatctatctcccacaaaatagtcaggttacgccaaggggaaaacaccggtatcggcaaagcactcaatgccgcagcgatgttcgccctcgacaacggatatacttacctgctgacaatggatcaggacagcgcttttaccgcttccacattcaaagactatatccgtattatcaacaatgacaaagacagttcccattttgcttatattcctctcatcaatgcttctggcacagacagcaatgcgccgctcaaagaagcacaggggatgattatctccggaagtatttttccgttgagaacgatacaaaaagtcggtctgtatcttgacaaatttgtcatggatgccattgatacggaatatttcctgcgcatccgccgccataccggaaaagtcatgctcgtacctgccgccaacctgaaacatgaactgggacatccgctccggaaacaaatactcatctggcacccgatgtcactcaactactccccagtgcgtacctactacatagcccgtaacttcttgtacctcaacaagcaatacgccgaattcaaacgtcccgaactgctttggaagctcatttgggagcgtcctttctatatcctttttatggaagaaaacaaatgggagaaactgaaagcactcgccagaggtatctggcaaggctggagaaaagatctcaaccacgactgttatttcaaaaagctcaacccaaaccccaagcaccatgagcgcgaataaccttacaaccacctatcgcctgctgaacagttctttcaggaagacgatgatttttcacttgggcatagacgcgggattcttcaccgaatatacctatatgcttcatgcaatgctctattgcctgcaacacaagatacagttcaagctctattccgacgatgccaacttcggttgggagaaaggttggacagactgtttcgtccccttctgtgaggaagtgcacgaagcgtttcaccacacctacaacacccaccgcctgccttcgtggaaagcattgatgaaggacaagaaattgcccaagaccaaactgatgaaatggaaactgaaagcaacctgcaagaatataaccggagagactctcgctttcctgacctataaaaaaccggtattactgaactgccacctgaagttcgatcccaaccaacacttccacatccccgaactggatatagacggagattatctccatgctttccggaaaatgacggaaatcacgtggaagttgaacgaagtaaccggacgagaatgccggcacctggcagacaacctgcaactcccgcaagaatacgtcggttgccagatacgcggaggcgacaagatcaccgaaaccaacctgcttccggcagagtattacatacgcctcatcaaacagaaaaccgatttgcgcgatgtcttcgtgctgacagatgattaccgcatcttccggcaagtacagtcgctcgccccggacatacgttggtataccctatgcgattccggcgagaaaggatatgtcaacagtgctttcacgcaaacgacgaaagagttgaaacagaagcaaatgactcgtttcctttcttccatacagctactgatgaacgcttctgtattcacaggaagcatcaccaccgggcccagcctgttcctgctcaagaagttctatccggacatcagtcctgccgactgtctgcttgaggatttcccgcaagcagccactctccctatcccgggacgcagccaaatggcggcggaatttctacaaggaaacttaaagttataggaacttgttaatttaatcactacatttgtatcataacgtgcatcaaccgtttccaatgaacaagaaatatacagcaaaagaacttgatttgttacatgccgagctttacgacatattgggagaaaccattcgtatctgtcggaaacacgacatcccgtattttgtgataggcggtactgcaatcggggcactctatgaccgggcgatactgccttgggacgacgatatagatatcggcatggcacggaaagactacaacagatttctcgaagtagccccccgggagctgggcgattcctactttctttcatggatagaaacagatccgcacagcccttattactatgccaaagtcaagaaaaacaataccctctttgtagaagaaatattcaagaatgtcccgatgcatccgggtatttttgtagatatattcccgttcgacaggatacccgacaacaagctgttgcggaaattacagtacgacgcagccggtttcctcaaatgttgcctcatgggaaaagagatatggatgtggaaacacttcggcaaatgcgagatagaacatcccacagaccggggagtcttctcctgcttcttgaataaagcagtcgatgttcttttctcgaagaaagcaatttaccgtatgctggtagccgttcaaagctgcttcaattcatggaacacgaagtatttcaacaacgtgatgactaccaccgaccacgtgaccggagaaagcctccgccacctgcaaccggtgccgttcggaccgctcacagtgaacgctcccgacaacctggaaggtttcctgcgatacaactacccgaccctgcaccgatatacagaggaagaacaggagaaagtgaacaatcactaccctgccgccctttcattcagtacgactccaaaacaagaactatgaatatgaaacccgctttagtagatgtaccggtactgatactgttcttcaaccgcccgcaacaattatcgcaagtgttcgagcaggtaaagaaagcacgcccgtcacggctgtttctctatcaggacggagcacgaaacgaacacgacctgcccgggataaaagcctgccgcgaaatcgtgtcgcagatagactgggagtgcgaagtagaacggttctatcaggaaaagaacttcggttgcgacccctcggaatatatatcgcagaaatgggctttctcaaaagtcgacaaatgcattgtactggaagatgatgatgtgccgtcagtctctttcttccgtttctgcaaggaaatgctggacaagtacgaacatgacacccgcatcagcatgattgccggattcaaccccgaagaaatcagcaaagacatcccttacgactatttcttcgccaccaccttctctatctgggggtgggcaagctggaaacgtgtcgtagaccaatgggacgagttctatacttttctggacgactccttcaatatgcagcaactcgaacaactcatcaaagaacgcaagttccggagcgacttcatctatatgtgccggcgtcatcgcgaacaccggaaggctttttacgaaaccattttccatgcctccatactgttcaactccggactgagcattgtgcccacgcgcaacatgattaacaacttgggagcaacggcggattccacccactttgccggttccgtccatacgctgcccaaaggttaccgccgcattttcaccatgaagcgttacgaagcggagtttcctctgaaacatccccgctacgtcattgaaaatgtagcgtacaaaaaaagcgtctaccgcatcatgtgctgggaccacccgtggataaagataggacgctcgttcgaggaactgttcctcaacctgaaatacggtaatttttctatcattacgaaagctgttaaaaaccgaataaacaaatggctgaagagaaacaaacatcactaaaaccacttacgatttatttctaccatacccgcctcacgcgggaaagttacgaggaatggaaagagtataaattccccggacatatcttgtacggacttccattgctggaaaaacacgggatacgttccgtcatgcacaagtgccggtacttctcaagccgcctgaggctcatgctctacgcaacgaaagaaattctgttctgcaaggagaaatatcaggtgctctacgccacttctttccgtggtatcgaaccggtgattttcctccgtgcactggggctataccgcaagccgatcgttatctggcaccacacggcagtagtcaacagttccggtttcgcacgcgaacaaatatcccgccttttctacaaaggcatagacaagatgttcctgttcagccggaagctcattcaggattcgttgaaaacccggaaagcgcctgcccataaactaaaactggtacactggggaccggacctccctttctatgaccacctgttggcggaaatgcctgaccgcaaaccggaaggctttatctctaccggcaaagaaaaccgggacgtaagcactctcttccaggcatttgccgccactaaagagaaactcgacttatatatcgccgtctcatgcggtaacatcaattataaaaacatcattgacggtttcaccctgcccgactctatccatgtacattacaccgacggagtaatcccctacgagcttgccaaactggtggcgcggaaaagctgtattgtcatctgttgtctggattttccctataccgtagggctcaccacactcgtagaagcatttgctctcggcattcccgtcatttgttcgcgtaaccccaatttcgaaattgacatcgacaaggaaggaatcggcattaccgtagaatacggtgatgtgcagggttggacagacgctatccgctacatcgccgaccaccccgaagaggcacgacgcatgggcaacaacgcccgcaaactggcggaagaacgtttcaatctcgaaatcttttcacgtgaaatagcagaaagcttgcaggaaatatcaaacttttcctctaaaaaccgtacatttgcataaacttttatgcacatgagagtcctgattataaatacgtctgaacgaatcggaggagccgccattgcagccggccggttaatggaatcactcaagaataatggtattaaagccaaaatgctggtgcgcgacaagcaaacggaccagatcagcgttgtgggtttgaagcgcagctggctgcaagtatggaagttcatgtgggaacgcatcgttatctggagcgccaaccgtttccaacggtatcatctgttcgatgtagacattgccaacacaggaacggacattacctctcttccggaatttcggcaggcagacgtcattcacctgcactggatcaatcagggaatgctttcattgaaaaacatccggaagatacttacttccggcaaaccggttgtctggacaatgcatgatatgtggccctgcaccggtatctgccattatgcacgcgaatgtacgaactatcaacaggagtgccacaactgcccgtacatctacaaaggcggtagcaagaaagatttatcttaccgcactttccgtaagaaacagaaattgtatagcaacgcccccgttcatttcgtcacttgcagccgttggttgaaggaacaggcccaggtcagcaggctgttcgaagggaaaagcgttatcaacatcccgaacgcgatcaataccaacctgttcaagccacagaacaaggaagaggcacgggccaaatgtatgttgccgcaaaacaagaagctgattctgttcggctcggtaaagatcaccgataagcggaaaggggccgaatatttaatcgaagcctgcaaactgctggctgagaaacatccggaatggaaagagtcgctgggagtcgtcgtattcggcaaccagtcccaacagttgcaggaacagattcctttccatgtctacccgttgccttacatcaagaatgagcacgaagtggtcaatatatataatgccgtagacttgtttgtcattccttcgctggaagaaaatcttcccaacatgattatggaagcaatggcgtgcggcgttccttgcgtaggattcaatgtcggcggcatccccgaaatgattgaccacctgcacaacggatatgtggcccgatacaaatcttcggaggactttgccaacggtatacactggatactgacggacccggaatatgacgagctttccgcacaagcctgccgcaaggtattaggcaactattccgaaagcattattgccaagaaatatacggatctctacaataaagtaacggggaaatatgcatagcgttcatcctactcccaagttttcggtcatcacggtgacctataatgcggaaaaggtactcgaagataccattcaaagtgtgattgcgcagacctatcatcacgtagaatatatcatcgtggacggagcctccaaagatggcactttatctatcatcgacagataccgcccacggatacatactgttgtcagcgaaccggacaagggactgtatgacgccatgaacaaaggaattgccctcgccagcggcgactatctctgctttctgaacgcaggcgactgctttcacgaagacgacacgctgcaacaaatggtgcacactatcaatggtaacgaacttcccgacgtactttacggagaaacggctatcgtagacgagaagaggcatttccaacgtatgcgccgtctatctgccccggaagtattaacctggaaaagcttcaaacagggaatgctggtctgccaccaggcattcttcgcccgccatacgctggtggagccatacgacttgaagttccgttattccgccgacttcgactggtgcgtccgcatcatgaagaaagcccgcacattgcacaatacgcacctgacaatcatcgactatcttgacgaaggtacgaccacccaaaaccggaaggcttctctcaaagaaagattccgcatcatggcaaaacattacgggctgataagtacagtggcacatcatgcatggtttgtcctccggctattcctcaaaccgggacaataagcgcgttgcctaaaccggtaacgcaagtaattggtacattaatgtacgtgccatacgctcctgccctttcgtgttagggtgcagacgatcgaaacccgaatcataaaaatagataagttgttcctcaatcatcggattcatccctgtcaccgagttaaagtctatcacaggaagcccccagagattaccggcttctttgactgcctgtacataagcgtccacatattcaccgcaactattctggtagttctcatccggctgcacgttcgtttctccgaaattggcaaacgcacgatgcaacggagtcagcagaatgatttgtttatcaggaaacagctgtttcatccgcgttatccctatattgatacgtcctttataggtattactgtccattacaggggttcgtttcttgcgggtctccattttcttcatttcgccacgggccgccaacacttgttcttccgtttccgtaaaccattcgccaataggtataccggcattaaaatcattcgtacccatcaggacaatgattgcatccacttcctctccatgttctttcatcaattgctccgcctgccggggcacatcgttccattgtcgcccgcttattccatatacataaggagtaatccccaaccattcttgtagaaagtcccagtactttttaatcttattaccatagcagttaggatctgtaatagaatctcctatatatcctaccttcttcccttgccacggatgttgaacccacccgctatgactgttctcaccggagtttacgactttagaagcttgactctgtccatgcagaaaacaagtacagaataatagagctatacacgttaataataacttgcttttcattggtattctatattaaatgagacatttttattcaatagacagcaaatgtaactcaaaaatatacaaatccaatcaataaatcgataaactgttcattcatccggcattttaaaagtgtaaggaaaatcttctttcattggatatgttttctctgattgaaagaaggcgcgatttaatttaaacccataggtctttcctttctccagcttacttctatctaatataatacaaaaagtatatttatctttccaaaacggctgatagtctgtataaggtggcgatattcttttatcatccaacggccttataccgtaagcaccaaacataggtttagagaaacgtatttgtatagtatcaatacctaaaggtaatatgctatttgaaataggaaatatatctgtaatatagggttctttattatcgtactctttcaatacattatcaaaatcagatgccgtatagttgacaaaacttactatctcaggcataaaatccttaatggtagaatacaaattacgatgattacgaaaatgttccataaacgtcatgcttctttccatccagataaaaccttcatgttgcctccatgcagttaaatgtgtagcagtgaatcccctattagggttatctttaaaatacatgatagtcaataggttgttaaaccattctatcatcgttgaattggtacttccataagccagtttggccatcttttctttcacgtgaggataaattatttgcgaagcagaatcaatctgagaccaatattgagcaaggcaaggattagtatagtggtgtaacaactcatgtacaatgacagttataaggaatctactatacgccgggtttccttctttatcggtactacatccaataacaattccacgtttttctccctttgttattccattaaaagcataattaccaggtccattacaaagagatgcaaccactattgtattttcaggtccttcgccaaacatagatttaaaccactctgcattcagatcgacaagaatagtattcaatctagtttcagctatatcatataagccacgatgcagtgtatagaaatccttaaattttgtttgtctataaaaatcattcaataaacggacaaatgttctgaaactttcctctgtccacctactgtcaatcatacttatctttgatgcgtcacattgtggatcaataatcactttccctctctttatctcaatacatccagttgccgcaggtacagcatcataagctattccttgctcctctcttatctttttgatgtaagagatgagcttatgttctctatattttgagaagtaattatcaatatcggctgtataaccggggatagtattatttatatactcttccgcaccagccaatcgaaatgcaatacttgtcaactcaaagctttcttttacttggcttttaacctgtgctgatatattattaatcgcacacaataacattattatccataaagttgttttcatatattgtctctttataactatttaataagcatatctaactctttcaactgcacatcccctatatgctcccacttagcaacgacttttccttctttatcaatcaagacataaaatggaatagcatcacaattgtataggtacgacaggttattctccttttcatctttctcattcgtctcagaacttaaaatttgtggccaaacattcaaattattttttcttatggcctcagaccaactatccttgactctatccaatgatataccaataatagtcaatcctttctcattgtatttcttatatacttctttcattttaggaatctctttcaaacaaggcatacaccaacttgcccaaaaatctatatataccgctttaccttcatacttttgcagaacatctttcagtgataatttactttcagtattatattctatctcaaataagtgttctccagaatattttcaagaatttgccgatccaataaagtataaaacattttcgctttctcgatatacctcaaacaaacctcattttgtgtatattgagaagctttctctattgcatttaacaactgttcactatatgatgtactattcttggaagcaaaaagcccaatcatagcactcatcagataagctctctcatctccttcaaaatcattgataatatgattataaaccaaatcaaagttattataaatatcctcagtataattatatatgtacaagtaccataatgcagtgatatataaccttgataagctattagtaacacgcaaatcttcatcaaaataaccctcaggtatatcttttctcaatatttgcttgtttaccatagggaaatagagatcatagatatatctgttatttatagacgctttggcacaatcatagaattcgtcagaaaccagatatcgacgactataattttctaagaaattcaactgatcatctctatattttttagcagattgtttatgaagtaatatatcttcgccttttcgataaagttttggccagtttcgtactgctctttctttttgaagtattctcatgtttttctattttaagattaagaaatgaacgggctgactgaaagaactatttatacttacattctttacaaatatctacaaaaagaaagccttcttctcattcttttagtcagtctgtaaggtaacacaatatccgaatccaaatgataagtcatccaaaggtcaaatatatctttcaattcgtcagaaaacatccaaggataattgacttcactttcatagccccacaccacccaaatctggtgttcaggcttttcaagatcgtcttctaattcacgatataaaaaaagaaggctcaacatcacaacatcggcaaccgacattttatcccgatcatatgtgatatgtatattgccaggtaaaatttgcgacagttcatccattctcagttgatcgtaaatagagaattttatacggcgtattttcgtccaaaataaaatcagcatgtcattttgtatttcataatatttcatctaacttgtgttccaaagttacgaagataccaactaacatccaaaaattacggtagacatttttcaacttttttatcactaataactaaacacttacactaattttccaataaaaaaatggacaagaaaaaagtaaccatcaaaaaagaccattaccaaatttgaaccagaaaagaaaaaacaaaatcatttctcatattctcataaaaaggagtacttgcctgataattagatatataaattatgagaattaaaatatttacatgcatttctcatagctttatcaagaaaaaacgcttaaaacaatgcatttctcatactatatattggcatttctcatactgcatattatgcttgtctttgtttcaagagactaatatatgggaggcaatataaccgtagtttgtatgttgagtcgatagactacatatctttcgcaaccggcattactgcatttttctgccttcatttctatcgttccactctagtgaacaggcctatgcactcgagtagacataaccattcactccagtgcacaagcctgttcactagagtgaaacgattaatatttcttattgaaaatcaattgattgcattaggattatctttgattgtcagttagttatagcggagatgaacaatagttctgctacagtttattaagtgttgacgattagatgatgagaataacattcctgatgtatgagaaatgatttgcttttttcaggtttttctgttaggagctggaacgagtggagatagtataagtctgaaaactcattcaattcgtatcataagtaccttccaaacatatttcatctttagcatccatgattgaacatagttttgaggtttcaatatcaacagataatcataaaatggaagtaaatattcatagtgtgttaccgctttacgataatggttaattacttcctcccgtgtatagaggattccataattgcgggcgacatttgcattcctatgttccgtcagacgataatatgatatacgggaaataaccttcaggagagataaaacgttcaaggatatatccataacgttgcatccttttcagtgccttttcatacaaagggaggtaagagggactaagaaactccgctaacgtctccagacattctacatacatagggtgtttggggagttaaaggaatccataatttctccatgtaatgacaccacttgtacaaacaccgtttttagcacaaagctttgtatttacttccaaaactcctccggcacatccccccccccgaagaacaagtatcatctacactacctccaatgattttagaaaactggtccatgctaagagcttgtttatcactaacctcagcaagattaattttctttatattcttcatttttgatcattttaataatttaagattataactattctcaataactaccattattaaacggcctaaatcatttaaatccacgcttttattattttttcgttacatataaatacgatattctcagcatcttccccaagccggcgagactctgaattcgatgaatggacattccattattaaaataccgcactttctcctccactattttcaatacgttgactagcacttttacgctgatgaccgaacttaaacttccatgcaactctaagtgtaagttgcttctctgtatcaggtagataatggcgcatatcacttacaacataaggattcatactcttctcccaaaaagcatacgaattacccaaacgccatttcataagacctgaaaaattccagtttttccatacgtacattattccggacgtaacttcccaactgttataatatatcttctcatcactaaatacatctgcccgcttaccaaacgctaaagccaccgcaaaaaagagaactcggatttcgaatgatacaatttcagattggcaagcccattcccattcggggacattgctgaatgcgaagcatcaactctgcccgaaccgccaaatccctgacgtttcacatacaagtcgatgacagcttccacctttccgtaacgcatagaaggcatgtcgtgatattccacccgcctcaccattttagggtctatctgcttcaaatcattcaaatcagccggtccaccattaacgcgcaatttgacagtaccaccaagcacaccactgatcgtaccctcaactttacctaccactattccatgtaattgcagtttgtctacaagatctatcccatctatcgccgtctccttctcttgtttaccgggataaataatctgacggtcaaactccatcacaacgcgttgtgcagtaactgtggtttcatcaagagctaccgtctgctcttccaatactattggcaggtcctttatatgctcctgaaaattatgaatacgtatatgtgtacccacatagcccacgcaggaagcgtacagcctgtaactaccatgaggaatcttagataattcgaaccgacctttcacgtcagttgtagcagcttttacgattttagtactgtcggccgcatcatacaagatgacattcgcatactcaacagggattgttttgacatccgtcactataccttttatagaagaagtctgggcttgggcgaacatcccaactaacagagaaattaaaattaaacatcgtgttctattcataagcatattttcttctagattcaaatgttccacgtctgtgttcattgctctcaaaatatgatctttatatcgcattaacaacgtctttaaaagacataccgcgtggaatctttagtttagctctcaaacgctgcttacgtttactcaggctttgtaatgaaataccaaagaaaatagattggtttttatgttttactcctatataacagaaataacaaagagcaatttcctcttcagatagacaatcatgtttagccaaccatatttttaaagcatttccataaaggatatccataagggtaaataactgcttccattcttcagttatcaatttgtggcaaagagtaacaggagatagaatagtatgcatcaatatattaattgatttctgatatttgaagaactcttcattatccaaacaactagttctcaattccatatacaaaattagtattcatacgcttcctccttgtttaatcataagatatagcggtgtttttcatagtatcttcattatcacaattgttttgtacgcatcgtcaaccggatatatccgtccttcgactgctccttcagtgaaataccgatacgtgtataggccggagagttcacctcaatcgtttcagaagtaaacgcgactttgccagacgcttcaatcgtaacggtcatctgttctgtgccggtagtaagcaagagatgtgtatcatcaataattttccagttggcttgtgttgttatggctgtttcgaaccggataggtgcattggccgtaaattcgtcacccacagtaaagctacctttcccttgacggtcatagacgaaagtgcgaaccaacttatccagactgggggtggaataagccgaagtatagtcaatacaaagcaaatcttttacgtccgtaaattctttcttgagtacaatggcgctcgctttggcaccggaggactgtgtttttccgtctactaccggaactggatgaccgaaagaacctttgatcttatacttctcgggagcttccgcactaaaataatcacccggataagagaaaggaccgccttgatcgccaaccatagtgcactttcctagagcgacggcataagagccaatgtcattatggttatgattttcggcattattaccccctttggccgagacagccaacgtacacgagctgcccttggcaggacgtgcaaccaagattcctgccttttcataatacgcccgcaaagaatcggaaccttcctgcaatgcctgacgaatgccgtctgtcatttccattttccatacctgatgagggaacagctctatgagataaagagagaaattattgccggaagggagaatatatttttcttccgcagaggtgataccaagcgcacggtcacagtaatcgaggataaacttatcaggcgataaaccgatacggcagtcggaataagcaggacatacgccttcattcatctgtatcttccgaccatattgagcaatatgcacaaatttaggttcacggaagaaatctatcttgccttgcgtggcacggcatacttcctcacgcagcaagatatatgcacggaaaccataattatagtagccgaccccttcactgcaataaccgtcatcggcatatcctttcataccgtatacattatatttctcggctgcggcaacaaaataagcgcgttcctccttatccgtcagcaaagtgagggcggcacccgtgacacctgccagacaaaccgagttccagttatttgtaaccgtaaaccaccagaaaggctttgtctcttccaggcaacggtatacaggacgaaatactttctcgcggaaagcacactgcacgcgggcctttacttccggtgacaaacggtcgtcgagcatagcaacacactgcgcaattccgtttccggcagtggcaactaccaaatcgacataataatctgttccatgataattattcagattgcggtcgtgagccggaatcgaccaggagttctggttgcagagagcaaccagagccttttcaatagcaggaatgtaacgtcttttattctccatacattcagccaatgtcaaccgaaacagataatggtaacgggcatttatcatattttcgcccggcaggcggacattggttttgttcagatgcagatacaaggagtcaacaaaaggaggcattccctttttcagcaatgcaggtgcttcttctgtcagcagtttttctgccttgctactctcttttactttgttccagaaggtgcggtctttataagaaacgcctattccttccggtttatcgggcaacattgcagcaatctcacggatacggctttgagaaatattcgcatgctgcctcggagtgtcctgtgccatacggtaaacttccgtccctgccatcaggaaagctcccggaccgtagacttctgtcatatcgggagtcacctttttcggatcagcgccgataggttgcacatatcccagtttaccgtcttctcccacagccgacactaatgcttgccagcctttctccaccacaggcatgaattcttcttttggcaaaagtccttcgtttatcccataagccagcgcatacacgaagaaaccgctgcaactcgtttcgggcgacggataagaagccgggtcaagcagactcgcatgccagaagccgtccttattctgcaaaggagcaatccggcggcatagcttttggaacaagtcctgatagaacggacggtatttgctcttggcaggaagttcacgtaaaagctcaacgagccctccgagtacccagccattgccacgcccccagaacactttcgcgccattcgcctccttcatcgtaaagtaacggtggtcacgatagaaaagattatcttctttatcaaacagataattgtaagtagctttatattccttatccatgaaacggatgaacttcttgtcacccgtgatattgtagagtttcatgtaaacaggaggtgccatgaacagtgcgtcacaccaagtccagtgttccaaggtggttgcatcgccatagtccaactcgaacgaaccggaaggaggattggcaatcacccattcggcacgtgcctgtgtcgggacaagcatactttttcttttgtacttttcatacatatacaaatacatctgcgagacacagatatcgtcagcatgatacatccgttgatttacctgccagtaattgcggttccccagccgcaacagccatttgtagtatgaatcatctttatccgcctgttcggctattgcagcccagtggacaagtcccagatagaaagtggcatttacccaattgagatcaccgtaaatagccttgttgtaatgagcaatctgccagtcggccacccgccgcatcgactgcttcacttctgttttaacaaatgtctgcgcaactgtagtacacaaatagcccatgcatagggcaagggttaaaagtaatttcttcataatactataattttgtttaagacaaagataccaggctttatggacttaatagagtcatattttccgtttaagctgctcttatcttccataaagaaagaaaaaagcagctttttgaacaactctactaactaacccaattactgaacacccgatctacgagtattcaatctcttatctactaacaagccgtcaatgatcttcaagccgaatttcacttgacgttttgccttaaacttcaaaagaaataagtcaacggttccttcaagcgtcttcttatttcctacattgacaaaggtaggatacaaggcttttgaaccattggaatggagacggtcgtaagtcagattctccattacattcatgtgttgcaactccacgccgacaaactcataatcctgttgattgtaaggtaaagcaaaactgaatgcgttgactgcacgcagatcaacaccttttacctgaatttcaataatctcatctttgtcatatacttgtttcggagtgcttatctcaatcgtaccgtccaccttttccgtaccacggttattaacaccgccttcaagctgcgtggcgaccaccgaaatatcataagcgtcaatcagaccgttcttattgatatcaccattgctgatgtatccttcaaaatcggaatcgccctttctcagtcctgtatagttggtataagatgtcaggtcattgccgtcaatcttaccgtcgacgttaatgtctccttgaagatagctttccgttccgggcaccttgaatacatagatttccttaccggagccgtagttgccgactgcttccgtaacggatagtttgatatagcgggcagtaggatgttgggtgaaattgaataccttcacctcatcgtcacgctgccattcaaatgttccggcttccgtccactgttctttgttcatactataagaaacggttcctttcagcaatgttccgttaccggcgtttgtacgtggcaggtagtggaatttatccagttggttgacagtcaccaggtccataaccagttcgaacggaacggctttttccccgtatttcgagtgccagatatctccggactctacaaagtcgaacagacgtttcacgcctactcttccttgcgaagcggccgtacattcgcccctgataccacggatagcaaattcaagcggatcggacttggtcgcagcaccgaactctgtccaggcggaagctccgtctttattgacagcacgtattttaaatgagtagggcgtttcgggagtcaggtctccaaacagtagttccgtatcctttatcgtagtatatagcatattcataaagtcaatctcatagaaatcggcattggccactttatcccatgtcggtttcaaggtataggcttccgtattgtcggcagtaacccgggcaacaggagctgccagagttccggaagtgatccgatagcggtcttcgggaacaaaacggaatccctcaatgcgcaatgtcgtagtattggccgtaatatcggtggcacccagtttcaccaaaagttgcgggttcttggtgataacggtcttttcaaactcgcttcccttagtcgcaaaccgattcagatcgggagcctcatcgtagaagaagacgttttcaccctttgcaaattcatctttcgaagcggcctttgtcagtttcacttttttctttccaacttgtgccgtcacttttttcggcagagaagtgacattgattctgaactctgtaaccttttctttcacaaagcccataaaatcaccctttgccggatgaatggtcacagtaacgtcattcttgctgccaacctcggactcgatattggttgttactcctttaccccgtttgtattcttcggatacaccgtcgtcatcatattcggtaaaagaactcttgccgtacgggtaaagctcatagatacggattcctttatcaatctcatttacattattattaggattcgtcagcggaataatcgctccgttcttcacgaatacgggaagcttccagagaggagctgcaaaattgttgagtatgcggttcccgtcgtatttttcgcccgtaaaataatcaatccatacaccttcgggcaagtaaatgccgttacggatatcatttccctgctcgtcagctttggttgcctgatagataggagcaaccagaaaataaggcccgtacagatattggtactgtgtagccgtaccttgagtataggcattcgggtattccagaaacatcgctcttatcatcggcataccgtctacggcttccttagcgatactgtaagcataaggcatcagttccgatttcagtttcagataccagcggttaatggaggttgccggttctcccaaggcgtgcgggtatttctcattcgctccccaaccgtccatgttcagttccattggagtaaacgttttccattggaaatcacgggtattcacctgcacattcctgccaccgaaaataccgtccatgtcagaagtgatattcggctgaccggacagtcccgagccgatataggtcgggatgtggaaacggatatattcccatacgcctcccgtctggtcacccgaccagatgcccgcatagcgctgtgtgcccgcccagccgtcaagggagatgataaacggtctggcgtcacttccgtagtaaggcattatatgtccgacgtcggctactccgttcaatccgaaagaatagccggcaccgacccaggctacatccgttttcaacacgcgtactccggcatcccttacttctttcacaatatctctctgcagcaaagcgctcactccttccttagggtgcaggtcagactgtgtccacaggccgatttccactccgttctgacgggcataatcacccagacttttcagattttgtatattaccgtccaatgtttccgtctgtccgtagccggctccatagccgtcgttcggaagcagccagcccaacggcatgtcatggttcttataacggtcgattaccgcacgtgcagagaactgataattgttcttctcgccgttcaacgattctttgattccgccattgtccttctggctctctttatatcgctttccgtcttcaaacagaatgcctttctcgttttctgtccaatagtcacggttataagcgttcagatgtccctgatagaaaccgaatttaggtaacaatacgggatttcctgtcagttggtaaaagtcattcaacagagccaccgcaccgtcattaaccatgtagaacacatccagatagtctgattcgtgagacaatttcacctttccctcttcggatgctccgaagtcgtacttcccttttttgaaggtataccacatcataccgtagccgttggtagaccagtagtaaggggtaggagaggcgactcccccgtctgtccaactgttctggttctcgatagaaatcaccttacccttatgggagaaccgaccgttctgaacaccgccaccgtagaagtattcctgcggattctctttcaatgtcagggttactttccctttctcaaaaagaggcgcttccagttcttccactacaacagtgttggttgccagattagttaccttaagcaaggatgtctttttatccagccggacttttatctttccggtagtgaggaaaacaaaatctgtattctcttccaaatccagctttgaaaccgcctttctgggattgtcgactaatatctgcgccgccggctttgcttgaggatcccggatcacgcttcctgagttgtcctgaaatacacggaagatattttccccgtagaagtccaatgtcatacgctggctattggggaatagtatttcaacggtggtggggtttatctttttggcaccgacaatggaagacaacacttctgtctctatcgcattattatataacctagcctgtattaatgaaggaggtaacatcacagatagccccaatacaaacaaaagtgatttcttccatctacttgttgtagttagatttctcatatattttacaaattaatgaataatgtgaatcagttgctaaaaatcagctgctatatgcaactaacaacagtcacaaacctaataattaaattttctttctattatactcttattttattaatcaaatatagctttctcagatagacgtaccacctgcctacaattattcttcaattcaaatacgactacccggttaatacctttagctagtatagcagctggtaccggaatagtccgctgagaaatattctcccaaaaagaacctatatactgcccgtttatccagacttctcccattccccagcccgaagtatctaaaaagatgtctgtcggagtttctatctcaaaagtaccgcgatagaagcaaggagactgttttgtttgacaaggggtaaactggagttcttccacgtcacagtcacgtatcaggagaggtgtcattttccagttctctatttcaacatcttctaaagtgatactcccgaaaagtcccttggaattgtccaatatctcaggtccataagtaatacgccctatattctctgcataaagttgcagatgatgtgtacccgtagaaacagtcagcttaatattcttctgattatcagtgatccagccttgtaatcttccatcaacatagactgaggcatagtcccgaatattctctaccgccaatattggatccacatcctccacagtaatctccgcctcatataaagcatagccgaactcaatgcccaattcattcatcggcagcaatccctctgattcctgaacatcaccatacacttgctctaaagccgcgacttcctgcatcggaatctcctgtgcagataaagtcagtaaggacaggcaaaataaacaacatataaataattctcttcgcataactattttattaaaaaggattgaataaactcttcttttacagttgctcggggagcaaattggccactcttcacatattgatcaatactcttcagcaattgttgagtagcaggacgtttatccagatctttccgagtatcaacagccaataccaacagtttaccattgtttaccctagcctcaaagccaatccctagtttctgattggtttcatagctatctattacctggataaacggacgaagttcttgcggagtatccgtcatatcaatcacttttgcattcgtcagaatatcccaccactgccaatcaagatgcttttcagtgatgaagtctgcaaacatgggctgatcggcatgaataagacaacccagtgtcgttggtgcccatttgaacataatcggattccaaaaatgattgtgaaatacagacttacgccctttcactttgttcggcttcggacaaagaacaacttttttcccttcttggagatattgtttcgctttcgcatcataggttgttgtatataatacatcaggcgttgtctgcatcaaatctttatgatggggatagacccatatatcccaactattatgaactttgtcaccaacggacagatgtatggttaatttctgcggagcagtcaccgaattcaacatatactgaaacgttccaagtggaaagacaccatagtttcctattctttgtgtcttcagtctaccggatttcagaactctgccggaagcatcggtaatccaccacttagcttttgcacttttcaagatagagggactataattatacacttctgccttcccttcaaaagtttcatcacaataataggctcgtttaggaaaacgtagtaaagcaacagtgggtgcacaaaactcacggaatttttcaggagtaatcaaacctttagactcccaaaacgggtcgagaataccaaccggagcatatccctgtcctgtaaaatcattcaaggccagaagttgaaaaccggatttaagagaagtacgaagttcagcttcaataacatctttatattccagtacagtctgagcccctgatacacggaagaaatcatctgcttgatccaacataccgtttgccgccaatgattcacggaaaacttcaaagtttcgagcttgaaccggaccggtaaaatttggaatctccttgaagttaggatatatgcaacgctgtcccgactcatgagagatcacaggcacatcaatgcccaattctttatttttatcccaatcagtatatggccgtccttcgtatatagccatatgtcctttaggcgtttgatgagtgatgtaaaattggtcagacttcacacgtgtacgggctgtcgaaccactaaatagcctgcgtttgtcactgaccctcccataatgggttagttcttctataaaatcaaaattaccggttatctcattaccattacagtaaagaacaaaagaggggtgattaccatattctttcaagatagctttttgttcacgacggaaaaagtcataacgtttctcatccggttcggcatcctttccccacatcggcatttccacttccagataaattcctagtttatccgctgtccgaaatgccgcagcaggtggacaccaggaatggaaacgcatatggttcatcccataatctttcagaatcgttaatatacgttcccacgaagcatcatccactggagcataacctgttttaggaaatactgcattttctactgttccacgcaaatgtacccgatgaccattaatcagaatattgtctctatctgcctttatttcacgcattccgaaggtagcggactgtgtatgttgatagtttgtactacccgtagtcgttgccagatcacattgcaacgtatagagattaggagtaaactcattccacaaccgaatatctttacctaacgctatgatatcttctacgtaaaatactgaatcattcccagaaaccattgtctctctagtctgcttatattgttcgccggaaattgtaaaaaatgccttccctgtaacgagtttatgagtgtgattcaatatcttcatcctgactttgactgaatgctccgatacattcggatacagttgtatatcctcaatatatacaggatcaagagctaccagtttcatttcccccaaaatcccattccagtttatttgagtatattccgaatgagcatgatcccatttatgggtattgtattgataacgattatcaacgcatacagtaataagatgcgtcttacccggtttcacgaaatctgtcagttcgtgattgtggggaacactgatatagtctattttactgacttcctttgtgtctacataaatagaactcaaccagtgtacgcgttcgaaagatataaaaatacgtttgcctttccactcttttggaatagttatttcacgttgataccaagccggccccatatactcatacacacgagtcaaacggtcaatgtgacgataaggagatttataaccaattttatagtcatccgtaatccctggtagaaggatgctctcctgcaagcgatgcatataacgaatatccaaagaaccgcgtcgaaaatccatcaggtcagtttgaaatccccattgaccagacagatctatttcttgcgtctgtgccttcaataaagataactgggttatcaatacaaatacaataagaatggatttaataaacttttttctcatacagtcttgtattaaaacatcatatatcaacaatttattttctacatagaataattaatgatattattactttactcttataaagaaataaaaagagagcacttcaaaaagtatgaagcctgttaagcaactactttagaaagtgccctctgtgtataaggacctatttcaaactgtcggattagagttcacgaccaagtccaaattcggcaacctgcaatgttccaccactagttgaaccggttactagatcactccacttcacaaactgtactttaacatatctataagtagattccggaatagcaattacaatctcatccgtattattttcataaggtatatcaatatcggattttatttcaataaaattcttaccgtcattgcttccgtacatcgagattccccatgctcgcaaataattgtacccattagtagatctatgcatccatgtaaaataattaaaagtttgttccgctcccatatcaacaacaaaataaagaggttcgtttatacccgcagccgtatagtcgcttccataactcttaccaggtttcaccaatgagagataagtcgtcgttttattatcaaaaagatgttcaggattacccgtagttccatctgtcacataattatttccatttttataagtaatggaagtagaaactgtccaagaatcacgatttaacctaatattaccaatgatattcaatgttataacatccgttactccactctcatcaactgcagcaacattaatttttgcttcacctgcagcaactcctttaaccacacctgactctgaaagttcaacgaatgcttcactaccttctgcaagagtaaaggccaggttttgataacttgcattagttggtaatacttttactaccgtattcagatccaacgtctcatttatattaatagattctggcatagcacttttatcaatactttcaaccagtaccgtcggagccttcccttgttctacaacaagttccacttgatgactttcatcataaatcaaagacatcttagctgtacgcccatttatattctccgacaaatctacatctatcattatcttactatccttgatatagcctaagcaccaactttcatgatttataatatataccacactcgcatcaagccctttggccaacgtatagtcgcatgtcaaacttcctccttcataaccaatagtcattggatctgttgacacagttatccagttatctggaacgacaactgtttcttcgtcatcacaggcagcaacaaaaaatcctgcaaacaacaataatatcactgataatatattatttatattcttcatattcttaaattttaattattatagatcatttattattcaatcatttataatcatccaaattgatttccgttatctgatgaacgtttggatgtggcatttcatacccccttccgttaatttcctccttcaacagcctaatctgttcttctgtgatttcgaatgctttatttccataatcattcagtgtagttttaaccggatataagaatccccacttctcaaagaaatcgagcatattcaatcctgaaatgtcacatacctgacgtacaaaatccagctggttcataccttgattctcacccttgtcactcggactctcatgagtacgaaaatattcatataatttatgataaaaatcagtttttcctaatacatctatcatgtacagtttgagctgccaaaatggtacaagttgagtttcacgagtaatatttgcaataccaggaagacaatgaggacgtttaccatccactatcaatgatgtagcgccttgataaatattattatacgttcccaatgtctgatcgttctcatctttcaacgtacatccgtcaaccaacaacttgcaaggacgaccgaatgatgtctgtataaaaagcgacataatgttattggtaacttcagtcaaaccggcccatttcaaccccggacgtgtctgattgcaatgacctacttcatgcgcaggtccccaacaacgagtaggaaaattttctggtttacagaacggttccgcatagtaatcactagcattataaactgtacgataatctgatgcgttcgggctctttgccttgtagtcaatagaaaaatgcatccggttattgaacatcttaccatatttaacaagtcccataaactcttcctccaaatataccagacgatccaaattttcaatagtcttcgttatctctgtattgtactttttgaagtcagatattctccacgtcaaatgtgagtattctcccaagatatctatttcctgatactttgcattgtcgcgaatctgagcccaatcactttccttgtttttctgaatatcaaaataaccgtttacttttccattcgcaaaatgcacttttaccgtctttgcctcaatattccttttctgatcattatcagcatcttcaagccggagaggaatgtcatcatttacatgattcaaaatataaattaaaccaccgacctctactgttatctcattatatccttccgacaactcgtaggttttcgaattgttgtaaccaccgttcagatcttgaataagcatcgaaattctaccaccctcataaatatcatcgacaaatatagccaaggtctcacccgcttttgcataaattccagtcggattatctctcaggctgtatttagatgtcttattagccgtagccattactgctggattctggtaaggacggtaatccgccaatcgataagcagactcatagtttccacttagcaaagcaagtcccaattctttcaaatattcattagggatttgcttaatctgcttttctgtcacgccagctttaagctgtaaacccatattatcagcaaaaattgtagctggatcaaatttattactactagcttcataaaattccatctcagcacagcttactctatcctcataggctttagttatggtaaaacgaacaaatttagcatcttccacaggtgatgacaactttatggtaaatggcgtatgcaccccattacctcttgcataatcacctattttcacaaaatcatccggtttatcggctgtcgaaacttccactgtaaattgatcgaatgagccccatttgtttccggagtcagtacgtggagtataaacgatactattcagtgtatgccccttctccagttcatatctgatagaaaatggatatgagacctgcccaaacgcggaattaaaatatgttttcttatttccatcataggacatctttaaggtcaacggattctggtctgtatctttaccttgcgtttcctcagaagtggcctcgccgccaattacttttattaatttgtcagcagaactaggagctgcttcttgagaaattgtgatattacatttatgattgtcatcatacatcaatgtcaatacagaacttctgactctctctgcaaaagaacgttcgcatacaatcgtcattttaccattttcaacaagggcggtcagccaatcttctcccttattacttaaagttgatgctatctggtttatgtccaatccttgccccaatacgaactcacgtttttctgtccctccctcataaggaaaactcacggactctgtagaaattgtaatccaatcatcaggaatagccgaacttgcactgtcactacatgaatagcctaaacaaggataaagcaaagataataagattaccttcaacttacaccaatggccttttatgataggtatttttgtatttttcatgacctcatttcgatattttacgttaacttattttatgcaagagtttatatttaaggtagtccagtatgaataacatgtaaagcaaaggcaaagtcggaacaaaagagcccggtctctgcctttgtttatcaaactgtcatacgattaattccataacggattttgaaccgtcaatttactcttctgcatttcattgtaaggtacaggataaagcaacatagcttttgaccatggatatctatctaccacaatacggttgtagtatgaatcttcaccaattttatcataaaattcaattgcagtgtttttagcactattgtatgtttttactgctgctttattgatgtccataccataacgtattaacaatttatcctcattatctttgatccattcaccggtagcctcatcttgtgaccatccagcacgcatccatctatgcatgtcaaaataatagtttccttctcccaacatttcaataatacgttcacgatagatagcttcacgctgtaaatcctgatttcctataatattcttcccataaggtgcagacttcgtagccagttccttatacccaggaataccagcacgttcacgtactaaatccagatacttaattatattttcatcgttcggatttatctcattacatacttctgcatagtacaagtagaaatctgctaaacggaaatagatccaaggacgtccccagtccgtaggattcgatccttctttcagtaatgtacggttattaaacttataaagtaaatagcctgcacgtgcatgcatagtgttatctctatagcctgcaccacctttactaaaataagctccccaatctgagtaactgcttctttgtatatgccagctctttccttcgtatgtaacatcagcataaaaacgaggctcgcgattaacatacatattgaagatgtgcttgtctacatgttgtttattattacaaacatttacccaatttgtgaatccgttttcattataatcagggtcttcactgatatccaatccactatccgtaaagaacaaatcgacaatattctgataaaaaccgacattacccatagcactaggaatatctccggggattgtgcgagcttccattttagcagtgacgccatcattataatcgttatttccgttagcccaaagaatctcatcgttataatattggaacaattcatatattgatgtatgaggatctctctctttggaataataaagatccataccatgtgcttcggcaaatctcaacaaagcttcaagatgcgtcttggcagtttgccatttgttatcatcacgatcggggaaaagacgctttccatcatgatttgtcaaactcaacgcttctttatagcctccattaaacagaggagaagctgcatatacccacaaacgtgcacgtaatgctaaagcagccgcttttgtaggacgcaggatttcacgaagattgtacatactattgtcatgactagtatcatcccctgttccagtttttatcgtttcaggcagatcatctttatattcaccatttataacagattctaataactgatcaatatgtcctaccatttcgtcaacagatgcacgtgcataatcaaggttctcatccgaaggatcagcagtctcgggaataataggtgtaggaccatagaattcaaataacaagaaatagttgtaagcaagcagataagtaacatccgccttataacgacgcatctcttctactgaaatataaccatcagcattgatcggatcacctatgctttcaggtgccatatccaaaaagatcattgcctggcgaatttgtttatagcaattccaccaacggttgtgagtggtactactaggagtaaaagtattctgtccaaatttcaacacattaggatgagcacaaacgatttctcctgaatagatagcttgcgcattaacggttccatttgaattttgtacatccaaacccgcttccgaatagttcggacaagtttgatagatttctccataccattgtttaatatatttagctttggaaaaaacttcttccttgtctagattttgagcaagttctttagaaacatccaaataatctgagcaagaggtcaacatacctgtcattaatacgacagttgctgtacatactgtttttataatattcataattaattattcttataattgattattggttaaaaagtcacatcaagaccgaaagtccaggtcgcgttaatcggatatcttgcaccgctgtttccaatttccggatcccacattttaacgtgatcccacacagcaagattacttccctgcacataaatacggaggttctgcattttccatctctgcaccaattttttatcaaactgataacccaattcgacatttttcagacggagaaaactcccatctctgtaccaccatgtactattcagcgtattattactatactcattggtgtgtaaacgaggatataaaacgttcatattattgggatcacttgcagtccaatggtcggcagcctgtacacgtgcagaagactggtcttttccattagcaaatgggacaaaataactagtgttagctttcaagttaacggatgttttacctactccctggaaaaatacaccagcataaatacctttatattgtacattcagtccgaagccataaacaagttgcggattatttggataaatgccgctataataagtctggtcattatcgtcaatagtaccatcaccattcaagtctttatatttaatatcaccaggcttcacatcagcagcataagtagcaattccatcttttaatttataattatagctaccatctgatttttcagtaataataaaatcctgattggtaaataatccttccgctacatatattttatttgtcccgatagaagtaccagtttgagcaagccatggataagcctgtggaatctcatccttttctataatcttgttaacagcgtatgttacattacctctggctgaaagcacccagtcttttccgatattatgtttaactgtaatactagcatcaaaaccttcattagtcgtgacaccaaaattctgccatggattttgacggaaaccagtagccgtaggaatagttacacgctgaatcaaaatatcttcccgtcgattatgaaaataatcagcagtaatatcaacacgaccacggaataatcccatgtcaataccgaaattgcttttcttctctatttcccaactaatatatggagcagcaaatgtgttttcataaattcttcccatatcattagtaggaccaccattagtaccgggattcaagccgacattttgactaccgctatcagtcaatagttctctatatacaaaacggtcacttcctgtattatcatttcctgtaagaccgtaagaagctctcaaacgtaatttgctaagaatatccaagatattctccttttgcataaatttctcagcatgtacattccaagcggcacctactgccgggaaaataccccaacgattaccaggagcgaagttttcactacccgttgcaccaaaactagcttctaatacataacgattatcataagcataagtaccacgcattacaatattctgtttacgataaggcaacagttttaacccgcctacttcttccgctccagaagattttctagaaccttggtattgagtttccttttgattgtatacaaaagttcctgtaacagcgtgtttcttggcaaaagtacgttcgtagttcaactgcgcttcaatatataattttttagtaccactgcttgtgctaacagaagcttccccaagcggactaccttctgaaaatagttttttgataagtaaaccgttttcatctctaccggtaacagtatatttatccggactcgccgaacgttttaaagtagaactgaaatctgcatcaaaacttatactaccttgaacagacagtcctttcgttatgaagtcgagtttttgtctcaaagttgccttagtttgcattgctacagaccattttttagaataaccggaataattaagtaaattataaggattataacgtccatccgcatctgtatcacaaactgcagcagtcccgtccgaccatgtaaaaggtaccaaatgagtcgggaaaagtatgatatgtttaaaaatctggtcagaagaatttccggggttattttgagttctgtattgtccactcatatcaacggaaagtttggtcgtcggagtaatatccatatctacattggagcgcaaattataacgttccaatccgatattggcattgtagtcatccaatggattcgatttaaacataccattttccttataataagctcctgatacaaagaacttagttttttccgaacctcctcgcagattcactgtataacgttgattctgcgtgttattagataataagtcggtccaaatagaattcgggtataaatccggatcaactccatcccgataccttgccaacgcttctgcactgtatggagcgctattttgcacataattatcccaattaggattacccgcatcattccaagacgcttcattccacattgataaataatcccaagagttcatcaactccggcatacgggtaggagtagcaatactatattgtgcgttgaagctgataatagttttttgtgcacgcccacgttttgttgtaatcaaaactacaccattagcaccttcagaaccatatacagcagtagcagcagcatctttcaagacagtaaatgtctcaatttcatctgtgtcaagatcattcatgctacgaggaacaccatccaccaacaccaatggactcgtaccacctgcgtatgaactttgaccacgaatccaaaaatcggcatcatcatttcccggttctccagaacgttgaatggcaatcacaccagcaacctgaccagcaatcgtatttgataaactacgcgttggtatagcaatctctgcaggtttcattgtattcacagaagatactacactttctttcttttgtgaaccgtaaccaataacaacaacgtcatccagatttacattcgattccgccatagcaatgttgataacacttttatcctttactttctgttcaacactattataaccaatatagcggaattccaaaacttcaccttctcttgctttaatagtgtatttaccatccatatcggttaatacaccgttaatagtgcctttcactattactgtggcaccaataataggctcccctgctccatcggaaacggtaccagtgacagttttggtcgctcctttcttagaactcaacgtttctttagaagaaagcgacaatactatttgtttattctgaaatttgaacgtaatattagtcggttcaaacattttacgaagcgccagacgcacttcttcattcttgcagttcagacttaccaattgttctgcatttatttcagtcgcatcataagagaacaaataccccgaagccttctctactcttgccatagcttcttttaaaggtattttactaaacgaaatgctaatcttctctgtaccgctctgagcgaatattcctatagaaaagaggcatacgataattaataaataaaatttcttgtattccataagtaatttagatgttttttattccataacatttttaattctaagtgtttttcgaattgatgtaagatcatagtttcacataggctttcatatttaaagattcaacaatattgttttatatattctaaacaagcaattaccaaccagcatgttcgttcttattctcacgcgagtcagcattgcgtttcttttctcctgtataattccattcaatttcgtccgtgtattcttttccgttatgtgttgcaacggttcttattacatttttaccttgttccagtgttacattatcaaaaacataatgtacatcagtatatcccttgcgaataccagtcaattctttaccattaagatatactataggagtaccaatattagaataaactgtcacagaggtctgtttccgctcacgatccgcatttcggcgctgcgtcaaatacaatacaggctccttgctccagttggctttataccaataataagaatccttcttgattttccggtcaaaagtcatcaagcctttcaagttacgagcaggtacaccaccccgactccacatcggcacagcaaaatcaaacatattccatagataagaagcaatgatataaggatgtttcgaaataacactccattgatattcatgcgttttagtctggaatgtttccggataaaaaggttttccccaattcaatgcatcaccgagatattcagtctgatgttccaaattggcatccgcaccatattctgtcaacatcagcttttgccacgggtacttttcttccaatcctttcacccatggttcaatatcttgtagcttcttctcataccatccgaaatagcggttcatcccctgaatatctgtattctgattcactgcatgttcagcatgtccgaaaccattgacagctacagtataacgatccgggtcctctgtcttggcaagattatgaagtgcttgcgtcagcccggctgtatattcgtgaggttgatatacctcattatgcaacccccaaacatagatagaagggtgattaaaactctgacgaatcaactcacgaagctgagactgcgcgttttccgcttcgtagcctgtcacacgattcacaaaagggatttcagcccaaatgaccaatcccaaagaatcacaacgagaatagagataatctgattgttgataatgggcaaaacggacagttgtggctcctacgtccattatctgtgctaaatcaaaatcatgttctttattagtcaaagcacttcctaatccccaccaatcctgatgacgggttacaccatacatcggatatttctcatcattcaaataaaatcctttaccggcaacaacctcaaacttacgaacacccaaaggctggataacttcatcaatgacccttccttctgctaccaaacgtgaaacgactttatacaaataaggatctttacgtccttgccaaagatgaggtttgttcaatttaaaagttgaaaaataagtttgcgttccttgaggagttaattccaaaggaaggcgatgtgaagcaactctctttccttcttgggtatagagagtattttcaagtactaaattcgcaggagtaaggctgccattgtctaattttacttttacagtaatatctgcagaacgtttcgaaacatttttctgagtaatataaacacctggagaagcacaatcggtaactgttatattattttgctcagtaacaattagccataccgggcgataaatacctccatacactccgaaaaggctatgattcaccggaataacatccggtcgtgcagtattatcagcttttaccatgatttcattctcagctccaaatttcaaagctgttcctatctcaaaagcaaaagcactataacctcctttatgggttcctacaagcttactgttaacatatacctcggtgtttgcgcccacaccttcaaatcgaagaaacacacgcttccctttcaattcttcattaaagaattgttttttcttgtaatagccaactccttcataaaaagaagcagcctttacctgcatatctttagcattccatgtgtgaggcagatttacagtttcccatttcccctcccattgagcaacaacttttactgggtcttccgaaaaaggaccgcgtttgaataaccaaccttcattgaaagaggtcacttcccgggcagtgagagagaaaaactgcccgatcaatactaacaaaacgaatgtaaatttgaacttcatattacaatcctcttttgatttatgttaaagcatcccgataaataccttttgttcctttagctgcacgcaccttaagctgaataacataaggttcacccggattcttcttgggaacagatacattatattcgttacgagctgtttcaacaactttgatatcttcgttagtatctaataaagaagctttttcaactgaaattcctttcggggtttttactatcaaacgttcactatatggttgattgaataccaccatatacacttcaccatttttaccgcgtgtgtaatatccccaatcctgcttgtcgaatccggcataatcacaggcataaacggcctttccataacgactcatccatttgccgatagcagtcgccaaagctttttcttccggacgaaaatctccatctgcttgaggaccaaagtttacaaccatatttcctcccatagaaacagcatgtacaatacgatcaagtacttcaatcggagttttgacataactcaatgaccagtctttatgatatccccattggttttcgggtacagtcatacaagcctcccaatcccattgtgtaaccttaaggtcttttactggatcgggtaaacgacgttcgtaacctgattcataatctcccatcaaacgaccattactatcgaaatgacgttttcctttatcatcggcacgcagacggctattaatagtaacccccggaagcatctccttcagcatttgttccacatgagctgtccaccaaccattcttcttaatacttgcatcccatgtaccatcaaaccagaaatctttcactgtaggataacgtgtggccagttctttcaattgattgtctgtaaactccagaaaacggctgaacgcaatactatcttcttcagattttatactgtaacgataatccggatggctccaatccatcactgaaaaatagaaatgtacatcaataccttcatcgttgtaggcttttaccatttcgcccaacaagtcttttttataaggagtattcgctaccgtatattgagtatatttactcggccacaaacagaaaccttcatgatgcttcgttgttatctttacatacttagctcccatctctttagccattcttgcccacttctttgcatcaaatttggtaggattccattgatccatcagtttcagccattcatcagcaggtacttttgcccaactcttcaaccattcagcagccccaccgtacatttttccgttccattcacccccaggaatggcatacaatccccaatgaataaaggctcccaaacgattatcccggaatttttgcattgcaggatcctgtcgcttcccctcattcgttgctccatattttaaagagatttcttctttaattccctgagcggaggttatcgaaccaatagtaactaatagtaagaataatgttattaatttgcttttcatgtgataagttatattataatgagtataattagaagtctttgattgcttgaaatcttctcatatttcatcggtcatagccgccacatctattaccgttttttttataatcagccatattaatttcttctcttaatgcattggtctgattttcagtaattataaaaattttatttccatatttttttgtgcccttcatacttgtttaattaactttttgattttatgtactaaaactaaattaaagcgatgtaaaagtagaggagaaacacaatacctataaatacaaatattacaaaaagtagacgtatgaatccacatggaaaaaatgaacacctaaaatggaagatttggtcatattttagcctttttctccaatttaataagacctcttatgtacaatattagtggatgtcatgtataatttgatagtagatgaaaaacacattattctttcttcctacttcttacagtttgcggagcgaccccaaaaaatgctttgaaagatttactgaaataacgtggagaagaaaaccctaaccgtatagaaatctccgagatatttaattccggatggttcttcaataaagacattgcctcatccaactttatttttagaataaactcattcggagtcaatccggtcatttgtttgaattgcatatatagtttactacgtcccacacagagttcggaagcaagagcagtaacatcaaaagcaggattttcaaagttctccttaataatattcacacatttcgctaataattccttatctctttcatttatagcttctgtcaccggagactccgtaatggtcttacctgcataatgtgctatcaaacgttttttatttttaatcagattattacaacgagcaatcaatacttttacattaaatggtttcgttacataatcatctgcaccaaacattaacccctccacaacatactcaacagaagtctgagccgttaataaaatcacagaaatatgagaaagttccacattggttttaatcttataacataattctttaccagacatttcaggcatcatcacatcacttataatcaagtccggctgaatttgtcgtgccatttccagtccttcacgtccatcatgtgcaatatataccttatatatcggcaaaaacaaatcttccagcatagacaacaattcttcattatcatctaccaaaagaataatgggtttatcttcttccttaatattctcttgtactttcgttttttcttcttccacatccattatttgttcaaagggaagcataggaaccgcctcggaaataattactgactctctactttctacagtagccatttcttcatcactaaaatgacgatttcccaaaggaagagataacgtgaatttagtaccttttcccacagtactttctacatcaatctttccatgatgcatattcattattcctttagccaatgccaatcctatgcccgttcctaatgtgaacgaagaagaattatctgtttgataaaatctctcaaaaatctttgaaatatgttcttccggaatgccgactcctgtatcacataccgacacaatcgcttgagaagcaagcattcttacctctacccttatacttcctttattgggtgtgtatttaaaagcattcgacaataaattaaaaataactttctgtaattgttttgaatcaaaccagacagaaattgtttcttctacattatcaaaacgatacgtaatctcttttttttgtgcatactcatagaaacacatataaatctgtcgcgtaaatgtgaccagattctgttcttcaaccttaagtttcaaataaccttgttcctgtttacgaaaatcaagcaattctgatatcagattccgcatatgccatgcatttttataaatgcgaaggatacggttataaatagttgtgcccaaatccatctgcatcaatacctcaatctgtccaagaatgagtgttaatggggtacggaattcatgagagatattcgtaaagaaacgtaattttacctgattcagttcttcaatcctctctttttcctttctttcaaactccaaagaggactttaaagcagcctgacgagttttgaaacgaataaatgcaatcatcacccctagcaaacatagaagatagaaaaaataggcccagacagtggcataaaaaggagcagaaacatgtatattcaaatgaacttcctcatccagattttctttaccagctaatggacgggctctaagtatatattcaccaggaggtaaattcgtataagttattgttgtaccagtggtttgagtccaagccttatcaaatccttctaaacgatactcaaataaacggttacgatcattattataattaaaggatgcaaattcaacagttatattattttgtttatagcttaaataaatatccgatgtcttcgccagtatatcagtcaaaataccagactggtcattaggacaaatttcttcattgaaaataaacaatttatcaaaattcaaaagactcttggaaggtaaagcatataaagattgcttctggaataaagccaagccattagtaccgctaataaaaagagttccattcttatctagatacaaagcagatccctgactataagtctgattaaacaggtgataggtattttcaacttctcctttctctctattaaaaatagaaagtccttttccatgaagaataaataaacgatgatcttcaacagattcacagatataataacaataatcactcggcagacattgattcgaagtactgtatgacttaaatgattgctccccttcttgatattcatatatacccgatcctatcgtacaaaagaatacacttcctctactgtcctcaaaaatatggacaactttaaatcgtcctattgaagaaggattattagtatccattgcatactcagttatttttgatgaaggcaaatccacgcaaataacacctccattaaccgatgccaaccacatacgttgtcgactatcaatcaggaacgtttcaaaagcatatcttttattcaatagcttccggacatttacatcattcgagagtggtgaaaatttctcagtcaccggatccataaaagcaacccctccctgtgttaataaagcaagcccatccttatactcttgaatatcgttcactatctcatgcggtaatgatgtgggatcacctactatattatgaagcgtatgtcctttattcgatttcagatccaacacaaatattcccccaagatgagcaccaacatatagccgttcattttcttttcgatagaatattgacttgagattattactacccacactactcgcatcacctttccgatgttgataccgagtaaatatcccggtatctgcattataacaattcaatcctcctccctctgtacaaatccacaatcttccactactatcctccgccatctttccaacgacaggaaaactcaaacagtcttcctgcaacggctctgcatagtaaaaatgattactagtcttactcggattaaagacatttacacctccataataagttcctacccaaatattaccttgcatatctttgtggagagataaaacggagtggtggctcaaggtgtttggagaatcaccataacgtgtataatgctcccatttatcaattgtaggatcataacaatcaagtccgcgaaaagtacctacccatatatgtttgaagtcatcttccaatacacatcgaatctgattatccgacaattctcctttgtctgaagaatttatataacgtgtcatttccctattggcggagattttatacaaaccgttccaggtacctacccatatattacccgcactatctcctgaaatacattggctacctctgtcgaatgaagctagtatcttttgttgctttggatttttgcgcgaaatagcaactagatgattggtagcaacccatataaaatcgttatcgacatatatcataccttccgcacctactcctccctgtaatttcgtgaaaaaagtcaattctgaactttcagctgtataataatagataccagatttgcaactaacccacaacgtatcttctttacagaaaagatctcttacatcattccgaagtaaacaggtaaaccgttctttataaagttcaaattttatcaagtcattacccgaacgaatatatattcttccttttttatctccacacagtttattgatctcattattcgtcagaccttcatttccctgcgaaggacggaatatttttacatctttaccattatatctgtttaatccctccgaagtgcctaaccatactgcacccaactcatcttgataaattgaaaatatacaaacctgagataatccgtcagaaactcccagatgtttaaagtaatggtttttagcctccaccattataatacacaaaaggcccaagagaaagataaagcttcttttcatgtaatatataattagatttcaagttacaaaaatacaaataatacttaattattacttcaatacatagcctttttatatcatttattcgactaagtactaaaaatgcacttgacgattcttgctaaaatgcacgtttacagtatttttctttatagaatttacggacgtttatctctaaaaaacatatctttgccacgaactaaaagaaaaattggatgtttaactcattttcattccgtaaggattccgttctgtaaataatctgttagtcttcctctcactacagattatcccttatgttttctctgacatagtcatgtcagagttatattctattatctgaattttaaaacaatttgtatagtcgaatgagccgggcatcattgcatgcattcatttggcgtacacctaaaacattaaaaaacaatgagtaacgatttaaaatcaatccacgatttcgatttcacaatgatatgtaattacttcaagttattagaacgccaaggtcccggaagtcccgaagtcacacaaaaagccgtaagtttcatcaacgaactgtctgacgaagccaaaatcgccgatattggttgcggtacaggcggacagacaatggtattagctaactatacaaaaggacagattacaggcatcgaccttttccccgattttatagagatcttcaacagaaatgcagcaaatacccattgcgaaaacagagtaaaaggcattgtcggctcaatggacaatctgccgtttcaaaacgaagaactcgatcttatctggtccgaaggcgctatctataatataggattcgaacgtggcatgaacgaatggaacagattcctgaaaaaggacggattcatcgccgtaacagaagcctcctggtttaccccggaacgccctgccgaaatagaagacttctggctcgccaattacccggaaattgatactatcccgacaaaaatagcacaaatggagaaagccggctatacactgacagcccatttcattttaccggagaactgttggacagaacatttctatgctccccagttcccggcccaggaagcttttttgaaggaatactcgggaaatgccgcagccgcagacctcattgccgggcaacggcatgagcagagtctgtatgacaagtataaagaatattatggttatgtattctacataggacaaaaaagataattgccagctgccggagaagttagcaaaataggatagttctccggcaattattatcctttactttgcaaaaagatatggaaacgaaagaattaaataagcaagaatacctgttacggataaacaaagtcaccgactacatccataacaacatagaccagccactaccattacagaaaatggcaggcatcgcctgtttttcacctttccacttccatcgcgtatttactattctgacaggagaaactcccacagattatatcaaacgcacccggattgaaaaagcagcacaattattaaagaggaacaaggaactttctgccaccgaaattgcccgtctatgcggttttagcagcctttcactattaagccgcaacttcagacaatatttcaatatgaccattcgagagttccgttcacatcaataaaactctaaaagacatggaaaataagattctgatttttcgaacttctatcaccagaaaatgcgacatcaaacgcatcgagaaacttctggcacaatatccccaaatcgacaaatggaatgtagactttgaggattgggaaaaaatattaagaatcgagtgcagtggcatcaccgcactcgaaatttcggaagtgctccggaataatcatatttttacctctgaactggaataaagacaggaaagggttttaaacgcccaacaactgtttcaactcagccactccttcagaagctcccttctgaatcacatgtaccggacgagaagtatgtgtatccaccggctttgggtcaatgagatacacctctgcttcccgcggtacataatgaagtaatcccgctgcaggatacacgttaagcgaagtgccgataattacaaaaatgtccgctttctccacatattgaatagctgtctcaatttcggggaccgcctcgccgaaccaaactataaaaggccgcaactgtgttccgtctcccgccttgtctccaagtttcacctcgtattcttcaggttttaattcctttatataatggggattataaggatcacgactggaacatacttttgtcagttcaccatgcagatgaataatatgactgcttccggctctttcgtgcaaattatcaatgttctgcgttatcaccgttactctgaaattcttttccagctccgccaataattcatgcccgcgattcggcgtcacatccaacaactgtttccggcgttcattataaaagttgatcaccaatgcagggtcgcgctgatagccttccggagtagccacttgctccaccggataccggtcccacagaccgcctgcatcacgaaacgtactgattccactctcggcactcataccagcacccgtcaatattaccagattcttcataatcgttcctccttctgttcattttaagatatacaaatgtaatcagaatcatcgaataaaagaaaacttttgcacctaataatctagcttcgaaaatgcggggatttaagttgaagtagcctaaagactagcatcacatatactataatctatacacaaatactagaatcaatgagattaaatctcaggaacaaaagaataaataatctaaagaaaagcagttaactttcacggatataagaatttttaaataccaaatgctaaatgattcaaataaaacacgtacttttgcgattcataaatttgcaattgattgaaagctaaaaccatgaaggtgatacatttcaatcgccaacaaaaaacattatatggataaatttagttacgctattggccttggaatcggtcaaaacttatcaagtatgggaattcaaggtctcgcagtagatgattttgcacaagcaatcagagacgtactggaaggtaatcaaacggctatcagccacaatgaagcccgcgaaatagtaaacaaatacttcgaagaactggaagctaaaatgagcgctgtcgccattgaacaaggaaaggctttcctcgaagaaaacaaaaaaagaccgggtattgttacactgcccagcggattgcaatacgaggttatcaatgaaggtacaggcaaaaaaccgaaagcgaccgaccaagtaagatgccactacgaaggcacgttggtagacggcaccctgttcgacagttctatccagcgtggcgaacctgccgtattcggcgttaaccaggtaattccgggttgggtagaagccctgcaactgatgtcggaaggtgctaaatggaagctgtatatcccatcggacctgggctatggcgcaagaggtgccggagaaatgattcctcctcacagcacactcgtttttgaagtagaattacttgaagtattataaataaaaatttcaaagcaaaatgaaaaaaattagtatttttatggcaatcgccgctgctgcaagccttgcttcttgtacagctcaagctcctaaagcaaatctgaaatcagacctcgattcactgtcttattctatcggtatggctcagactcaaggtctgaaaggctatctgacaggtcgtttgaacgttgatactgcatatatggcagaattcatcaaaggtttgaacgacggcgtaagcaaaaccagcaaaaaagacattgcttacatggcaggtattcaaatcggtcagcaaatcagcggcgagaacggtatgataaaaaacatcaatcaggaactgtttgccggtgactctactaaaactatcagcaaagacaacttcatggctggtttcatcgcaggtacgctggaaaaaggtggcgtaatgtctatggaagctgctcaggcttatactcgtacagctatggaagctatcaaaacaaaagctttggaagaaaaatatgctgactacaaagctgaaaacgaaaaattccttgccgacaacaaagctaaagaaggtgtgaaaacaactccgagcggtctgcaatataaagttatcactgaaggtaaaggtgaaattcctgccgacacttgcaaagtgaaagtaaactacaaaggtactttgatcgatggtactgaattcgatagctcttacaaacgtaacgaaccggctactttccgtgccaaccaagttatcaaaggctggacagaagcattgaccatgatgcccgtaggttctaaatgggaactttatatcccgcaggatcttgcttatggcgcaagagaatcaggcggccagatcaaaccgttctctactttgattttcgaagttgaactgttgagtatcgagaaggataagaaataattttctgtctaaatagaaaaaggaaagaggtgcaaagtgattgcccctcttttttttgctttttcctattttttttctcggaaaagaagaataattaaaataaatctctatatttgcttactatttgataacaactggaaattacaatttattattatggaaagaatagacaacctcgacaggcaaatactagagattatctcacagaatgcccgcatccctttcaaagacgtagcagccgaatgcggagtgtcacgcgcagctattcatcaacgtgtgcagagattgattgacttgggtgtcatcgtaggctcaggctatcatgtaaatccgaaatcattgggatacagaacatgtacgtatgtcggcatcaaactggaaaaaggctctatgtacaaatctgtagtggccgagttgcagaagattccggaaatcgtagaatgtcacttcaccactggcccgtataccatgctgaccaaactttatgcatgtgacaatgaacacctaatggatttgctgaataacaaaatgcaagagataccgggtgtagtagctaccgagacattgatttctctggagcaaagcatcaaaaaagaaattcctatccgagtagaaaagtaagcccatggaatttctaagtgaatatcaccttgcagggttattcatcggaatttgtacctttttgattatcggcctttttcaccctgtcgtggtaaaggccgaatattattggggcacaaaatgctggtggatattcctgatactcggtattgccggtgtagttgcctcattaagcatcgagaacgtcatcatagcttctctgctaggcgtatttgccttctcctctttctggacaatcaaagaggttttcgaacaggaagaaagagtaaaaaaaggctggttccccaagaacccgaaacgcaaatataaattctgagaagaaaagtcacgtagttttttattgaaagaatttgcataattcaatagaaaatactacttttgtcaccgcatccgataaaaggatacatcggacttgtagctcagttggttagagcaacagactcataatctggaggtccctggttcaagcccaggctggtccacataagaagccttgtaaatgtaatgtttacaaggctt

SEQ ID NO: 3034 - DNA, 15271 bp, Unknown
  gut microbiota DNA sequence
gtctgggtgggagagtcggtctggaatctgaaatgaacgaaggttctactttctggttcgtgttgccgttgaaggcaacatcggaagaaattaatgaaaataagtaaagagtgccaaaaagcagtcgtaatctttattccccttcttaaagaaggagaagtgaagttattattagtttttggcactctttactttttttaggtagaatgaacacttagtctttatgacttaggcgtatccttatctttgtctccgcttcccagagacgtgctggttgatgcagaacttccgctcgaaggagcagagctgtttgatgaactcggaccggaagcggttgtgcttggcttggtaacactcggacttgcagtagcaggttgagcctgtacttcccagtggaaaggttcgaaattggaattcggatctacccaagacggtttcttggacgcatagatgatgaacggggcaacaactacgatgattgcaccgataatcaatacagagaaccaaacggtattgctaccggttgaaatctggctaggcgggataaagctgaggatgaaggcaagtaacgaaccacagaaaccaagaccaccgacgaaccacatcaaaccgttaccggacttaccgatacggaacggacggttcagtttcttcatcttataccgcaatgcgatagctccagagaacatcaataggtacataataaggtaaagaataactgtcagctgtgacaaaatctgataaaaactctgtacagaaggcataacgacgaacagtaagctcagtactgttacagcaagaccttgcacgaacaggatatttttttgtacacccagtttgtttgtcttctggaagaacggaggcatataaccggccttacctacagcaaatataccttttgatggaccggcaacccatgtcaatacaccggctaatactccgaatgccagagcaatagcaatgatcggtgataaccaggaagcgtggatgtatttaaagtagttgtcaaagccaacaagcaaactttgggtaaggttgatgtctttggcaggaatgataacacctagtgcaaacgtacccaaaacgaagatgagaactgtgataagtgcaccgataaatacggctttcggatagtttttggaaggattttccacgtcttttacgtggataccacccatttccataccggcataaaacaagaagatactagcagcgagaacgacattgtcgaagtttgtgaagtcggggaagaagctactatggaaatccatattggactgtcctccggttgccaggtaaatgattcctaggataatcagcagagcagccgggataattgtacctaccataccaccgattttggcaaccttaccgacccagctcatacctttcaatgaaatgaaagtagccagccagtaaatgacaagcactacgataagcgtataatacttgttgtttgccagtgacatatcgtgtacgtcattcattccgatgaaggcaatggatacggcgccgaatgtcaatactgtcggataccagattgtactttcaatccattgcacccagatagcgaggaatcccaactttttgccgtaggcttcgcctacccaccggaatacaccaccctgtttatcctgaaacattgccgccagttcggctgcaacgagcgatgtcgggatcaggaagacaatcgctgcgaaaagatagtagaaggccgaactcattccgtatacggcctcggctggcagtccacgtaaggatactaccgccgtaacgttcatgatagctagggtaaacacgcctagcttcactgcatttttaatatttgccataagttaaggttttaagtgaaaaatattttaaagtcagtcttataacaacatttagcgtgagatgttttagcaatctctttcaaagttcgttaattaacatcgataaactgctcttttgccaatctcaatttgtctgtttcaaaacaatcgctttctccgattgtttctaagcattataaattacatacgaatcattttattataaactaagtagttatgaaatcagcactttcagattttatcttagggaaaaagggcatttatggcattctccacattattatattggtgatgtctctttttctcgtaattagtatctcggtagatacttttaagggaattcctttttatacacagtcgtcttatatgaaaacccagttgtggatttgcatttggtttcttttcgattttgtattggaattttttctggcgaaacacaaaggacgttatttacggacacatttcattttcctgttggtagccattccttatcagaacattattgcttattatggatggactttttctcccgaaattacttatctactccgttttattcctttgttgagggggggatatgcgctggcgattgtggtcggctggctgacgtacaataaggcttcgagcctgttcgtttcttatctgacgatgttgctggctactgtttatttctccagtcttgctttctttgtgcttgagcataaagtaaatccgcttgtccatagttatggggatgcattgtggtgggcatttatggatgtaactactgtcgggtcgaatataatagcggtaacggtgaccggtagagtgttgtccgtactgttggcagcgttaggaatgatgatgtttcctatctttacagtgtatatcacgaatcttattcagcagtccaacaagcggaagaagcaatattatgcagaagaggaggaagaaaaggagaaggctgtcggacaagaaactccggcgcaatccgtacaagaggcaaaaacataatgcttttataaaagataatatccttcatattgaagtataaccgggaagaagaaaaaaggttactatctgcagacagtaacctttcatctttttcatagagagagtcgttaatcaactatagtgatacgattgttaccaaatacattcaatcttagtttgttcatgatgtattcgatagccaactgagcttttacagagttacccgatccgtccaaaggaggagcgaatgcagcgataccgaattgtccgggtaatacgcccattaccccaccacctacacctgtttttgcagggattccggaagtgtacatccagtcaccggtatgttcgtagaaacctactgcagcaatcatggctgtgattttaggagcaaggctagcatcgaaaacttcctttttagtcactgggttcacaccaccattggcaattgtcccggcagcaacagaaagctgtaatgcagtaactcctaatgaacattggcgggtatagaggtctaacgacatatccggatcatcgtagatacggttgtagtttttcaacaaccaggcaatagaacggttattgaagttcgtatccgattcggatttatataattcatcaatcagctgaggagcgctgccgcacaaatcggttacgtttccaacgatagcatcccatttcttggcagagtcaccgataggcttcaccatactgcaagcagaaatagcaccggcgtttactaatggagtagacggatggtcgctctccagtaagatagcgatgattgagttgaaaggcaagccggttgcatcagctccgatcttgtccagaatttccttggcgccatattgacgtaatgcaaggatagcggtatgtactttcgatacggattctattccgaagcggtaatcagtatctcccacatggatagtctgcccgttgagcaggcagacactaattccgaagagatctttattgacatttgccaagtaaggaatatagtcggcattcttgcctcctgtattggtttttacctggtcgtatgcctcctgtaccacttctttcaattgagcgagtgttacttttttatccatagatctattcttatttaactgttttgtaacggcggccaccatggttgaacatctttgtttctaccggaagattcttttcctgagccatacgggtaggagtcggataatccagtttttctagttcggcaacagcattgttgatgtcacctagtaacatgtctgccatatcgcggctgaatccttggcggacaacgacacgcattactacatagtcttccagtttagaaggtaatgtataagccggaaccatccaaccatgttgagacaatttgtcttgtaggtcatataacgtccatttggctgctttggcgtattcaggtttgagataccagatgaacaatgggttcactacatcttcggagtaattgacgaacggagccattttggcgatttcatcgtggatatatttagcgatcatcaacgaattgtattgtacttctttgtatccctggaatcctaaacgaatgaattggtaatattgtcccagaatctgagcggcaggacgggagaagttcagacctacctgtgtgatgttagcacccagataatttacgctgaacgccatttcttcgggcagatattctttgcctttccagcaaacccaaccaagtcctggatatactaaaccgaatttgtgaccggatacactgatagaaagcacccatttcaaacggaagtcccacttcttttccggataaaggaacggaaggatgaaaccaccgcttgcggcgtctacgtggataggaatgtcataaccagtttttgcgttgtaagcatcaagtgctttatctaatgcttcaacatcatcgttcaatcctgtccatgtaacaccttggataggtacgacacagattgtattttcgtcacacatcttcaatgcttcttcggggtcgagtgtggttttatcaagtgtcaaaggcacttcacgcatttcaatctgccacaactgtgcaaacttctcccataccacctggaaacctgttgaaataacgaaatttggtttatcgaatggtttgccttgagcctgtcttttcttacgccagcgcaaccatgcagctacaccacccagcatacaagcttctgaagaaccgattgccaatgcacctgttttccatgtgtctttttcgggagagttccataagttggcaacgatattgatacatttaccattcattactgcgatacgtggatactctgtttcatcaatataattgatattgatagcttcgttcatcagcttggttgcatattcgtccatataagtggtaacgaaagtagccaggttcaaacgtggttgagtttgggcgaatgtttcgtctttcaccatttgataagcgacttcaggagtagtagggccatcaggaattttctctaccggagagggttgtagcattctgtctgagccaaatacatcggtttttgcatcaccttttctgaaatttaaatcttccatactaatttgttttttaaaaggtttagggcgatggggattttccccgtcgaatttcccacaacaacagcagatagttttgaaagttttcggcttttacattatttggcgtttattaaggggggaagtttttcccgtatgtagggagtttcattagtgtgtaagatatagttaaacgaaaaaaaataagtagggagagaggaataatggatagtgagatcaataagaatagggaggcgggaaaataaaaaaagcaaaagaagaacagctccttttgcttttttatacctattgacttaactgaaaaatggcgtttcaacatagacgccggactctttgccgtttagcggaagtcttttaattcttcctgcaatttttggcgtgtgaagaagatacggctctttaccgttcctaacggaagattcagcttttctgctatttcacgatatttgaagccggaaacgtgcatcgcgaacgggactttatattctttaggaagtgtgttgaccacacggtgcatctctttcaggtcataagccttttctgtactctcaaaaccggcgtcttgtggcaggttcaggtgataaaggttatcggtccggtcgatgaatgtttggtcgcgaactactttgcggtagttgttgataaagatgttgcgcatgatggtatacatccatcctttgaaattagtatcaggcgtatatttgtcttcgttatctaatgctttcaatgatgtttcctgcaacaaatcgtttgcttcttcgcggtcggttgtcagtttataagcgaaccggagtaattcatcttgtactcctactaaatcttttctgaagcttaaacttttcatatgcgttgctttttaaattgtgagtattcgttgtaataatttcgatgatgcaagtttacggcattttttcagatacgacggggtagaatccgacggattttgacccaaaagctatcggtggatagtttttaggtggtttttgatagttttcaggtggtcttttgggggaatttcgttcagattctggatatttttctcttcattttcattcgagtctatcatgcaaatgtcttttttcttcaaaaatcatttcttgttattttgaactttataccggaagtattgttgttcttccaatctaaacttttaacgagcaagtatatgaaaataaagacaggtaaagggacgatccctctcataactttaatagctatatggtctatttcggcattgacgtctctgccagggttggctgtttcacctattttgggtgatcttacaaaaatattcccaaaagctacggatctggatattcagatgttgacttcgttgccatcgttgctgattatcccttttatattgctcggtggtaaattgacggaaaaagttgattttgtccgtgtgttgcaagtcgggctatggctgtttgcaacaagtggagtgttatatttgctttccaataaaatgtggcaattaatagtagtaagtgccttgcttggtgtaggggcagggttgattattcctttgtccaccggattggtttccaggtattttgtgggtacatatcgggtgaagcaattcgggttaagttcggcgattactaattttactttggttatagcgactgctgtaaccggatatctggcagaagtcagttggcatttgccttttctggtctatttgcttcccttgatttctattctgctggttggacatctaaagacgactcagccggaagctgccgtatcttcttctcagaaagatgattcggaagccgaagattcatccatagatataggaggtggtaaatatggtatccatatcaggcatctgatacagttaatggctttttacgggataattacttatattgtagtagtggtgattttcaatctgcctttcttaatggaaaaacatcatttttccagcggtaattcggggttgatgatttcgcttttcttcctggctattacggctccgggcttctgcttgaataagattgtcggccttctaaaagaacgtaccaaggcatatagtctgttatccatagctttagggttgttattaatctggatagctccgttggagtggctcattattccgggttgtctgcttgtcggattgggatatggcgttattcagcctatgttgtacgagaaaacgactcatgcggcgcttccacagaaggcaacaatggcactggcatttgtgatgatgatgaattatctggcaattttgctttatcctttcattggtgattttctgcaatgggtatttcatacacagtcgcaggaatttccgtttatcttcaatctgttgattactgttggcactttcttctgggcataccgttgccgtgatacttttttgtttaacgaccaattgaaataaagatgagaaataaaaaactggaagctaacgtcagcatggccgtttcaaagatattcggtggttttaatatgaatgcgttgaaatttcttcttccgttgtggatgagtccgctaacgggagcggcaatccgttgtacgtttgctgcggccgctttttggattatcggctggttcatgccgaaggaacagtccactccgaaagaaaaaatcctgttgcttctgttgggggcgttggggttgtacggctttatgttcctttatcttatcgggttgagtaagactacgcctgtttccagttctatttttactagtttggaacctatttgggtgtttgtgattatgattgtgttctataaagaaaaggtgtcagtgaaaaaaatagtaggtatggctatcgggctggtcggagctctggtgtgcatcttaactcagaaaagtgacgaccttgcttcagatgcatttacagggaatatgctttgtttgcttagttccgtagcttatgctatctatctggtaatgagccaacgtatccttgcaaacgtgggagcgatgacgatgttgcgttatacatttacgggagccgccattaccggtttgattgttacggctatcacgggttttgatgctcctgtactgacaatacctatccattggcaacctttcttgatactgatgtttgtattgatatttcctaccacagtcagttatttgctgattccgatcggattgaaatatctcaaaacaactgttgttgccatttatggctatctgattctgattgttgctactatcacttcactagctatcggacaggaccgtttcagttggacgcagacctttgccatagtgtttatttgtgccggtgtttatctggttgaagtggccgaaagccgtgacaagtctccggacccgttgaaaaaatgagagttttttctgaaagaagcaggaaaagaaaaaggcgtccttcgcaagacgcctttcgttattttgtcatcatgttttatagagaggagttgattgcttgtgcgatagacttgaattcttcgtccgacaatttcagtttcggattagagaacagcatatccgattccttttggatagggattaaatgaatatgtgcgtgaggaacttccagtccaatcactgcttcacccaccttcttgcacgggaaggccttttcgatggcacgggctacctgctttgcaaatacgtgcattgcagccaggtcttcatcgctcaaatcgaaaatatagtctacttcttgtttgggcactaccaatgtatgtccctttaccaacgggttgatatcgagaaatgcgaagaacttgtcgttttccgccaccttgtagcaggggatttcgcctgcgatgattctgctgaatattgttgccataacttttattgataaaataaggcaagcctcatacggagacctgccttaacgttaaatggatatgtttactacttctaatgcaattttgccttgcggtactgtaatttctgctacatcaccgatcttcttgccaagcagaccttgtgcaatcggggtgtttactgaaatttttccttccttcaggttagcttcactttcggaaacgatggtataagtcatcttcataccattctttacatttttcagttccaccttatttaaaatctgtacggaatcagttttgagcttggactcatcaatgatttttgcatccgcaatcactgttttcagtttgttgatacgcatttccaacagaccttgtgcctctttggctgcatcgtactctgcattttctgacaagtctcctttatctcttgcttcggctattgccgcggagatcttcgggcgttccactgtttccagttctttcagttccgccataagtttcttgtaaccttcttctgacatataagccatgatgttttcctcctttaattgttttaaatggtcatataaacaaaaaagaattccaacatgtgccatgttggaaccctcttttcattatttctttgcaaagatagctttttaagtgatacgtgtcaagcaaaaaatgctgctatgtaacatatttaaatgaaatatgctaatttataacaacttagagtaatgacttgacggatgcttccaaatccttgatatcctcgccacgaagtttcaattcgttgttgcggttaatcaaaaagatagatggaacctggcgaacattatatacagctacattggtggaataaactccgttgccgtcacgcacacatatccaagggaggttggctgctgccgttttccagtagtgttcgtccgcatcgagagagatctggtaaatttccaatccctgtgaagcatacttattatatagttcgcgaagcaacatattgtggggagcgcctgtcggtgactggaatacggagaagtcgagtaatacgactttgcctttcaggtcagtcaacttgcgcacattcccgtgtatgtcgcgcaaagcaatgtcgatgatgccggtttctacaattttttcctgtggaatctccagtgcttttgcctggggttgacgtgtgtttttcatacctttaataacgatattataaaggttcttggagcgtactgcatcgggatatgtattgttgaggctggtagctacggctgcaaaacatttcacatcgtctttgttgttcaacggatcgaatatcagatagttgttgagcttttggaacagggcgaaataagcggctgccgtattcggtgctgcgaatatatagtttactttcacatcctctttatagttattgagcaacgtggccaggctgtcttcgaaaatatcgtggctgatattattgttgcgtaatgtagctagcaagtcgtccacattcttttgaagagcgatttgtttcagcgttagctcttttattttgttgctgtttccggaaccttctatggtgtacgcagttgaaaagtctacatacggtgcttttatctggagcgtttcgatagaatcgacagaaaagttaatgactttgtcgtctattcgcaaacggtaaaattcgggtgattcggggcggggctgtttgaaactgaatgctccttctcctttcagtttgaccgagtccaatgcggcgatcccttcaaggccggacgcttcgagataaagcatttttccgtcggctcctgaaatatctccgttcacttggaatttaggaccggaactacaagctgtaatagtaagtgcggcaagcgcaacaaaagtaatctttttcatatctcgtgtgttttttacaaggtgcaaatatacgtcttttcgagattagtcaaagcattttgcagtgttcttcatcctaatttagaaaaaaaatcagttactaactaactttttagctcatttccacctaattaccacgataaatgtatatctttgcaggaattttgaaagaaaaagtatagataaaacaatttttatgattaacccaattgttaagacgatcgagttacctgatggaagaaccatcacactcgagacgggaaagttggcaaaacaggcagacggttctgtaatgctacgcatgggaaacaccatgttgttggctactgtttgtgccgctaaagatgcagttcccggaacagattttatgcctttacaggtagagtacaaagaaaaatttgcggcattcggccgtttccccggtggttttaccaaaagagaaggtcgggcttctgattatgagatcctgacctgccgtcttgttgaccgtgctctccgccccttattccccgacaattatcatgcagaggtatatgtaaatatcatcctcttctcagcagatggtgtagatatgccggacgcattggcaggacttgcagcttctgcagcacttgctgtttcagatattccatttaacggaccgatttccgaagtgcgtgtagcgcgtattgacggtcagtttgtaatcaatccgacttttgagcaactggaaaaagctgatatggaccttatggtggctgctacttatgaaaatatcatgatggtagaaggcgaaatgcacgaagtatccgaagcagaattgctagaggctatgaaagtggctcacgaagcaattaaggtacattgcaaagctcagatggagttgactgaagaagttggcaaaaccgtaaaacgtgaatatgaccatgaggtaaacgacgaagacttgcgtaaggcagttcgtgaagcttgttatgacaaggcttatgctgttgctgcttccggaaataacaataaacatgaacgttttgctgctttcgaagctatttgtgaagagtttaaggctcagttctcagaagaggaactggaagaaaaagcggctttgatcgaccgttattatcacgatgtagaaaaagaagcaatgcgccgttctattcttgatgaaggcaaacgcctggatggtcgtaaaactaccgaaattcgcccgatttggtgtgaagtaggttacctacccggtcctcacggatctgctatctttactcgtggtgaaactcaatcactgacttctgtcacactgggtacaaaactcgatgaaaagattattgacaatgtattggaacacggaaaagaacgtttcctgttacattataatttccctcctttttccactggtgaggcaaaagcacaacgcggcgtaggtcgtcgtgaaattggtcatggccacttggcttggcgcgctttgaaaggacagattcctgctgactatccgtacgtagtacgtgttgtttcagaaattctcgaatctaatggttcttcttctatggctaccgtatgtgctggaacattggcattaatggatgcaggtgtgaagatcaagaagccggtatcaggcattgcaatgggactgattaagaatgcaggtgaagataaatatgcagtattgtctgatatcctcggtgatgaagaccacctcggagatatggacttcaaggtgactggaacaagagatggtattactgctacgcaaatggatattaaggtagacggtctgtcttatgaaatcttggaacgtgcattgaaccaggctaaggaagggcgtatgcacatcttggataagattgctgaaacaatcgctgaaccgcgtgcagacttgaaagaacatgctccccgcattgaaaccatgacaattcctaaagaatttatcggtgctgtgattggtcctggtggtaaaataattcaaggtatgcaggaagagaccggtgctgtcatcactatcgaagaaacagaaggtgtgggacgtatcgaagtttcaggtactaataagaaatgtattgacgatgcaatgcgcatgatcaaggcaattgttgctgttcccgaagtgggtgaagtgtacaaaggtaaggttcgttctatcatgccttacggtgcgttcatcgaatttttgccgggtaaggacggtttgctgcacatttctgaaatagactggaaacgtttggaaacagtggaagaagccggaattaaagagggtgacgaaattgatgtaaaattgattgatattgatcctaaaaccggtaaattcaaactttctagaaaggttttgttgccaagaccggaaaagaagtaaaaagtgacagttttaatataatatagaataacccgattactagaagtcgggttatttttttgtctaaacttttgcttttctgcaaaagtttccgttgagttattacataaatattttaagggtaacactactgttgaggaagaaaaatgtcttcttaactgggtgaatgaatcggaggaaaaccgtcggacattgcagaaagaacatatgttgttcgatattgcccttttcatcaataccaaaataaacaataagggagagaaagtggctgtggatactcatatcttacctatgttaaggtagagtgcccgtatagctgccgttatagtagtagcaatcagttgtgttttttattcaaggagtatcattacggtaatacagcgcatctgcagacagtgacagtgcctgctggccagcgagcacagattactttggcagacggtacgaaagtatggctgaatgcacagtctacattaacatactcccatgatttcggacggaataagaggaatgtggaactagacggaggagcttacttcgaggtggcgaaaaataaagaaatcccattctatgtaaatacggaaactaatcaggtgagagtagtggaaacacattttaatgtgtgtgcttaccggggtagcaatgaatttacaactactttgcttgaaggtattgtcgatatctatgcgaaaggcagcgaacattcgcttacacgtctggaggtgaacgaggtttttattttctgggacggaaagttcagaaaggagcgttttactgattttgattatctccgttggaaagatggtttatactgctttgatgatactccttttaacctgttgcttggtaaactggagaaatattataaagtgaagatcgttgtggagaatccgaaagtactgaattatcgttgcacgggtaagtttaaagatcaggatggggtggaacacgtactgaaagtaattcagaaagatcattcgtttatttactccataagtaccgaaaaagacagtatctttataaaataaagaaatgagctcacgctaaatatataccttaaattagtactaacccttaaaagcataacaattatgaataacagtcaatagcctctcattaaaagagaatcggaaagtacccccatactttccgattcgaaacagtcaaaaatcgaccttaatcaatttattaacttaacacgttgcaaagatatgagaaaaatttctttgaaagggcttttttgcccaaaaagtttagaatctaagcaaataatactgactatgaagatcactttattccttcttctgttcgtaacatttcaagcttattgtgagaatggatactctcagagtgcaaaaatcagcattccccactcaacgctgaaagtaagtgagttactctctaaaatagagtcacagaccaactatttgtttgtctacaacaaaaaacagtagatgtaaaacgggtagttaatgtagctgccaacaatcagtcggtatccgaaattttggaccgagcttttgaaggcacaggtattcattatgtaatggaaggcaatattctctgcatctcatacccagttctcttacgggcaggaggaattctcaatagcctattggatgtgtattaaagaaggtggcaagctaggagatatttatggaaatgcttttgtttgcaatggcgatggttctattcaagtaaacgctgacggttcgccggtgaataagaccggaaataaagacctgccggagctttaaaggtggatgaatagtttataattataggtgtaactttttttgattcaaacgtgtttctccgtgtattaggaaatgagaggagaaagattgtgagggagtgaagtcgagggggcttcgctcccttttattaaaaatactccctcctttaaaagaaagagggcgttaaggcaaaaatgaagtgaccccaaaaatttggactggtta

SEQ ID NO: 3035 - DNA, 499 bp, Unknown
  gut microbiota DNA sequence
gagttatttctcatagccccctttcctgttctttcttctctctactccatatttttctcctgccatatgcttctttttctgcagtcttccctttaataccatatgctatgttcatgtttttttaatattacgtctttctccttgtgcttttcccctatcctctcttttgttccactccggtgcccggtctttttcactccggtggccggttctttccactgaagttccctgtcctgttcactgtagtggaacgaacagcatgtcttttcgattatccgttattctcctccttccggaaggatgattccccctcaggggtaggtggtaggtaaatgtcggaatgggtaattccccgctttttatatccggcctgttttttttagtaccgaataaatctgcctgcattacttgtttctttgtttagtgctttcctccctcgtttaaatataataatgtgtatagttttgtattcttcccttcgtagcttcttgtatagaaa

SEQ ID NO: 3036 - DNA, 6791 bp, Unknown
  gut microbiota DNA sequence
atttcacttttttgtagtaactttgcaaactaaacaatatcatcatgaaaaagcgaattacacaggacgattacattaaagcgaatcgtaaagcaagccgtgaggcggaaattgagatgtacggacaccctatttgtcacaaaagggtgcaccagtcaaagaaagtatataaccgtaaaaagataaaggcaactgacaaagagttgccttatttttttgtccttttcacacaatccgcgtcaattctccggttgtagaatcaataatgaatccgtataccttcacatccaccggaatcaaaggatgatgcacaataaaatcaaccgttcctcttaccgacttctctgtatcttcgaagccgtccagccatgaatgaaagtcgaccccgcaaaaacgcatcatgtcgatataatcaggattaatgccccttgccttcatcttctccaacatttcttcgctatgcatatggcaagcgccgcagtcggagtgcgcaatcaccataatttcctccactcccaactcaaaaatagccacgagcagactacgaatcacactaccgaaaggatgggaaatgacgcctcccgcattttttatcattttcacatccccgtttttaattcccagcgcagcaggcagtaaagctgtcaaacgagtgtccatacaggaaagaatagcaatcttcttatcaggatacttatttgtaatatacgcttcatatcccttgtcctctacgaattttttgttgtaagccaatatttcttctaacataaattgcttcttttaaagtgtttgccaatacgcaaaagtaacgaaaatcagataaaaaatagaaatattacgcaagaaaaatagactgttcgttttaaaggtcgccaacaaaatctccgtttttttgttgaatgaaaaataaaaagtgtaaatttgtcccacatgccacttaaactaactacatattatcacggaaaggatattcctgacctgccgggaaataacacattccattccaaggagttgtttcaaatatacgaagcaacgcccggttactcgcccttactgatagtggcaacagaagacggaaaacctgtggcacggctcttggcagcgatccgcaaaactaaaaaatggcttccttcctgtcttgtgaaacaatgtgtggtatatggagaaggtgaattcctggaaaagacatttacagccgaacagaaagattcgcttccgaacatcagggaaagagaggaagaagtgttcggtgaaatgttggaacatctcacgcaagaggcatcccgtacctgtatccttatcgaattccgcaatctggacaactctatgttcggttaccgttctttccggaacaacgactattttccggtcaactggttacgggtacgcaattcgttacatagttcgaaaaaagcggaagaccgtttcagcccgtcacgtctccgccagataaaaaaagggcttaaaaatggagccaaagtagaagaagcgcacaccacagacgagatacgtgatttttcacgtatgctgcataaggtttactcttcccgcatacgccggtatttccctgccaatgactttttccgccacatgaacaatatgctcatcaagggaaagcaagctaaaatatttattgtccgctacaaagaaaagattatcggcggctctgtatgcatttactcaggagacaatgctttcctctggttttcgggaggaatgcgaaagacgtatgcactgcaatacccgggcgtactcgccgtttggaaagctctggaggatgctcacgaacgaggtttccgccatctggagttcatggatgtgggacttcctttccgccggcatggttatcgcgatttcgtactccgcttcggaggaaaacaaagcagtacccgacgttggttccgcgtcagttggccttggctgaataagttaatggtcaaattttacgtttaaatgcaatctccagattacaaaaccattcttcatgctccctccctaccattttttatactttatatcccaataattaaatgctgaaaaatttctttattaggtaagaattgtctttctttgtgctgttttatgccgtataagcacataattaaaaccaaataaaaaagtatagttatgaagatttcacacattgaacatctgggcattgctgtaaaaagcattgaagaagcccttccttactacgaaaatgtattaggtctgaagtgttacaacattgaaacagtagaagaccagaaagtaagaactgctttcttgaaagtaggcgaaaccaaaatcgaactgttggagcccacttgccccgagagcactattgctaagttcattgagaacaaaggtgcaggtgttcatcacgttgcatttgccgtggaagatggtgtagccaatgccttggcagaagcagaaagcaaggaaatccgcctaatcgacaaagctccgcgcaaaggtgccgaaggtttgaacatcgctttccttcacccaaaatcaactctgggtgtgttgacagaactctgcgaacattaatctataaactctaaaaccaacaagaactcatgagtaatcaacttgaaaaaattaaagagcttattgaacgccgtgccgtagcacgtatcggaggcggtgaaaaagcaattgcgaagcaacacgaaaaagggaaatacacagcgcgcgagcgtctggctatgttgctggatgaaggtagtttcgaagaaatggacatgttcgttgagcacagatgcacgaacttcggcatggaaaagaaacactatccgggtgacggtgtagtgaccggttgcggtacgatcgacggacgtctggtgtatgtattcgctcaggacttcactgtttccgccggttcgttgtcggaaaccatgtcacagaaaatttgtaaaatcatggatcaagctatgaaaatgggtgctccatgtatcggtatcaatgactcgggtggtgcacgtatccaagagggaatcaacgctttggcaggttacgcagaaatcttccaacgcaatattcttgcatccggtgtgatcccgcagatatcaggtatctttggcccttgtgccggtggtgccgtttattctccggctctgacagacttcacgctgatgatggaaggtacttcttatatgttcctcaccggaccgaaagttgtgaaaaccgttacaggtgaagatgtaagccaggaaaacctcggcggcgcaagcgtacactctactaaatcgggtgtgactcacttcaccgctcagacagaagaagaaggtctggcgctgattcgcaagctattgagctatattcctcaaaataatcttgaagaagctccttatgtggattgtacagatccaatcgaccgtctggaagattctttgaacgatattatccccgacagccccaacaaaccatacgatatgtacgaagtaatcggtgcgatcgtagacggcggcgaattcctcgaaatccaaaaggactatgcaaagaacatcattatcggtttcgcacgtttcaacggtcagtccgtaggtatcgtagccaaccagccgaagttcctggcaggtgtactagatagtaacgcttcccgcaagggcgcacgtttcgtacgtttctgtgatgccttcaatattcctatcgtatcattggtagacgtaccgggattccttccgggaacaggtcaggagtataacggcgttatcctccatggcgccaaattgctgtatgcttatggtgaagctactgtacctaaggtaactatcactctgcgtaagtcttacggtggctctcacatcgtgatgagctgtaagcaactccgtggtgatatgaactacgcatggccgacagccgaaattgctgtaatgggtggtgcaggtgcagtagaagtgttgtacgcacgcgaagcaaaagaacaggaaaacccggctcagttccttgcagaaaaagaagcagaatacacgaaactgtttgccaatccttataacgcagcgaaatacgggtacattgacgatgtgattgaaccgcgtaacacacgtttccgcgttatccgcgctttacagcagttgcagactaagaagctgactaacccggctaagaagcatggcaatattccattgtaatccaacttttcacattaaaacaagaaagattatgagcaaaaccaaaattggaatattcctttctttgctgttactggttggactgacctcttgcggagagaaaaagacaaacagtaagctaatgctgaacgaagtcctgatagacaatcaaagtaattttcaggatgattacggactgcacagcgcatggatcgaagtattcaacaaatcatacggtagcgcagacttggcgggatgtttactgaaagtaagcaatcagccgggtgatacagttacctattttatccctaaaggtgatgtactaacgttagttaaaccccgccagcatgctctattctgggcggatggtgaacctaaccgtggtacctttcacacaagttgcaaattgaaccctgagactgccaactggattggcttattcgattccggcaagaagctacttgatcagattgtagtaccggcaggagttctgggtcctaaccaatcatacgcacgtataagtgacggagcggcaaattgggaagtaaaaggtggaagtagtgacaaatatgtgactccaagtacgaataacaagacgctcgacagcaatgctaaaatggagaagttcgaagaacatgactctgtaggtatcggtatgtctatctcggcgatgagtgtggtattctgcggattgatacttctttatatctctttcaagattgtaggtaaagtagccgtgaacttgagcaaacgcaatacgatgaagtcaaaaggtatcgacaaggaaacagccaaagaactgtcacaagctccgggcgaagtttatgccgcaatttctatggcattgcacgaaatgcaagatgaggtacacgacgtagaagaaacggtactgactatcactcgtgtgaaacgtagctattcaccgtggagttcgaagatttacaccttgcgtgaaactcccaaaaagtaagtcaacccttaaaaagataaaacgatgaaagaatataaatacaaaatcaacggtaactcatataaagtgaccattggagatatcgaagacaatatcgctcatgtagaagtgaacggtacgcactataaagtagaaatggaaaaacagccgaaggcggcacctgcaaaaccggtagtacgcccattgccgaactctccggctgctcctaccacaccggtagtgaaaccggctgcacagtctaccggaaaatcaggtgtcaaatctccgctaccgggtgttatactcgacataaaagtgaacgtaggcgacacagtgaagaaaggacaaaccattattatattggaagccatgaaaatggaaaacaatatcaatgcagacaaagacggtaagattaccgctatcaacgtaaacaagggagattctgtccttgaaggtaatgacctcgtaattattgaataatatgggagattttataaactttttaggaaacaaccttgccgatttctggacgtatacaggatttgccaacgcaacaggaggacacgtcgttatgctccttattggcctgttctttatttatctggctatagccaaagaattcgagccaatgctgctgattcctatcggattcggtattctgatcggtaatatacctttcaacatggatgcgggactgaaagtcggcatctatgaagaaggttcagtattgaacatattgtatcagggagtgacgtccggctggtatccgccgctcatctttttgggtatcggcgccatgaccgacttctctgcacttatctctaacccgaagctgatgctaatcggtgcagccgcacaatttggtatcttcggtgcttacatgattgcattggaaatgggatttgacccgatgcaggccggtgctatcggtatcatcggtggtgcagacggtccgacggctatcttcctttcatccaaactggcccctaacttaatgggagctattgcggtgtctgcctattcctatatggcgttggtcccggtgatacagccgcctatcatgcgtctgctcaccacaaaacacgaacgtgtaatccgcatgaaaccgccgcgtgctgtttctcacacagagaaagtgatattcccgattatcggtttgttactgacttgcttcctggttccttccggtttgcctttgttgggtatgctgttcttcggtaacttgttgaaagaaagtggtgtaacacgccgtttggcaaacactgccagcggtccgctgattgatacgattactatcctgttaggtcttacagtaggtgcttctacgcaagcgtccgagttcctcactttcgactctatcaagattttcgccctcggtgctttgtcattcatcattgcaactgcatccggcgtactgttcgttaagctcttcaacctcttcttgaagaaggacaacaagattaatccgttgatcggtaatgcaggtgtatctgctgttcccgactcggcacgtatctcacaagttatcggtttggaatacgatccgaccaattacctgttaatgcacgctatgggtccgaacgtagcaggtgtaatcggttcggctgttgccgccggtatcctgttaggattcttaatgtagagataagatgccctgccggatttccattcggcatgtcttaaactataaaagtaaaattcttctctacgaaaatggaggtgtgtcaaaatgcgcatcttcttttttt

SEQ ID NO: 3037 - DNA, 10970 bp, Unknown
  gut microbiota DNA sequence
aaagccccagcttgtgaaagtcggggctttgtgcttaaaaaaaagaaggtgcgcattttgacacacctccttatataattagaacttgcgtttatagtttatatactatcaaaaacaacttaaccgttagaccggaaaaagttaacttctaatgcaacaggatttatctaacgatagaccggaagaaagataataggttgcaatggacaaagcgctacatgatgaaaggtaaaaacacagcaattaatgcctcatcctcacccgcaagtgctttatttattgtgattttcttcgtcaacagcaggctgcatatattgtttcggcgtttttccgaactcagcctgaaaacatttggaaaaataagaatggttggagaagcccaccatatacattacttcggcaacggtgaacttcttttgctgcaataacatggcagcctttttcatccggattgacttgatgtattctacgggagacattccggtcaattgcttaattttccggtaaatctgtttgttactgataccggataattcacaaagagcattcacattcagttccgactccgaaagatgatcttcaatcaggcgaattatattcgacaggaacttctcgtcctgcgattccgcttcaatcggtttgagtacaggcaacgattccagtcgcttcttctcctgtgtcgcggggatttcctcttcctccactgctatgacgggaatattcaatccgacggaagtcccttttccttcttcggaggtgacgccggtgatgtgtccgccgtgcagttctgtgtaagtttttaccagataaagcccgatacccgtaccttccttattgccggagtggggggattggaaaaaacgttggaagatgtaaggaatgtcccgcggcgggattcccgatcctgtgtccgatacacagatatccactaagccggtttcttcgcgatagaaaagagacaaccggatactgccgccgtccggagtgaatttcactgcatttgaaagcagactgtctagtatcactcccagtttgatagcgtccatatcggcataaatcttcgctttgtttgtctcgaaaaggaaagtcagccgcttgtcttcttcgtagacggagaacagactgtggctgaatgacacaagttcgatacgcgacagtattagtagtgaatcttcgttatcttctatacggttgaagttgagcacctgatgaatcagcgaattaatcttcatcgcattgcgttgcacttcttccaatgtctgtttctcgtgcgcttcctccgtcgcagggagcagctggctcacgggtgcaataatccggctaagcggtgtctttagctcattggacaggttgctgaagaaagccattttctggcgtgactgttccagaatcttctctttctccatacgttccattttcaaccggttcttgacgcggaagaaattgattgtccagatgatgaggctgaggaacaaaagaacataaatcacctttgcccaaaccgtataataccacggaggcaggatcttgatattcaaaatataaggatgttcggacgggtggccactcttttccaccttactgataattaattgataatctccgtagttgaggttgctgtatgtaatgcggtttgtattcgatttcaggaaattccattctttgtccattccctccagccgatagacaaattcatgcttttcctctagcgaataggggaggtcggaaagctcgaaagccagattattctggttatatgccagttcgatagagttcgtataacggatattaggtatgctttctccggtgtgcggagacatcaactggttgttgatatataaagcagtcagcaggatcgggcgttccggttgattcatagcctgtatgtccggccgggaaataccgaatccgtccgcacctcccaaatagatgttttcgtctttcgggtcaaagaaaagacttgtgaaacgcttgtctgtcatgttctgttggcgtgcatccattgttttccggtcgacaatccaaagcccgttggttgtagaaatccagatatgctcttttacggaagtcatagacagaatttcattgttactgaagctgccgaaggtaatactttgctgaccggaatcttggggattgatgcgcatgaccccaccgtgaaatcctacccagagcataccgtcctcatctcgtaggagataattcgggctcttttcaccgctcaactcatcggcaaacaatttggttacttgctgcgtgcgcggattgattttgtctattcctttgctgttgtagagcaatacccatacattaccttccgcatcgggaacaatttggttgatgaacattcctgacaggccgttgcgagtggaatagttctgctcggctatgtaggttccgccggaagattgtaccagtttttgtttgtctactacaaaaatacctccgaggcaggttgctatccagagttttccgtcggtgtcttcaaacaggtaataagcccagttggtgttgtttgttcctgtgctgtctacgatgttgtagtgtacaaattggtgagtcttgtagtcgtaacggttaatactgccgtccgtggctatccagagttgttgttctctgtcttcgtagatgtgtcggatacggttgtgggacaacggatggtgcttatctcccattctgtaccagacagcgtcgtgcttgttaccggtggggttggtaaaacggatgactccgttagttcctccgaaccagtagaaccctttggaatcccggaacagggaataaaactggtttccgtctcctgtacccgtgatttgcgagataggaatgaattgcaatgcactgttgtagcgtgaaagggagatgccgtaatccgttcccagccagatgttctgttcctgatcggcaaatatattccagataatattgttggttagcgactggatattgcgggagtcgtgtacgatgtgttgcagtgtcccattatcgttctggtaaacataaagtccgttatcggtacccgctaataaatttccatccccgtccaaagccagtgatttaatggaattgttgtggaaggcatctatcggtttcattagtcccgtggccggagtatattggaaaagagatccttccattccgatccagatacattggcgggacgtatcttccaataaagagttgacaaagagattgctcacgctccggttgacgggcaacgggatattttcaaactttccgctttcctctatatatcggcataaaccattgtaggtgcctacatatatctgattgtccgttgtgcggatgatagaataaatagtgtgatggggaagtccgttgctcttactgtcgagtgaagccagtttctttgtgttgagttgatacgtatacagaccgttcaacgaacctatccataaggtgtctccttgaagcgccattgtccgtacatctgtcgggaaatccgtttccggttgttcgtatttgtccgtccggtagttgttgacgaggattccgttatctgtccctaaatataaataagtattgtctgctattattccgcagtaaatgcgcgtgttattgcgttctccataagtgaagtgctgctgtgtggaatatccgtcgtaactgaataaccctttgttggaacctatccatatcaacccttcgctgtcttgcaggaagcaactgatgaccgatgcttcggcaccgaggtagatattctcgaattgttgataattcactttctgcccgtatgcactgccgcctatacagaatgcacagacaagaaaaagaatcgttatcattcgttggcacatattgtcaggtttgcaggtttttaaatcagtaattattgcaaataactttgttctttattgcaaatgtaggaaaaatgccggttactcttgtaaatctcaccgtctttttgttcctttgtcgtctatttataaacagaaaacttcaggatgaaaaagcttatttatctgcttttgttgccgctggttgtggctgtgactgcttgtggcggtaaagtaaactcgaaaaaggagtcggtattggcaacgcaggatagcgtagacgcccgtggaatacaacggatgcagacttctaaaagtgaaatagacatcaaattcaaagggaaggattatcgttctttcgtttcccgtacaccggacgagagcctgcctcatgttaccaatgaaatgggggatacgtatatggataataaaatcgtgctgcgtctgacgcgcggcggtgaatcagtgttcaacaagaccttcaccaagaatgatttttcttcggtagtggatgccgacttcctggcaaagtccgtgctcgaaggaatcgtatatgataaaacaactccgcaaggcattgtatatgcagcgagtgtctgctatccgcagacggatttgtatgtcccgctttccataacgataaccgccgacggaaagatgagtattcagaaagttgatatgctggaagacgcgtatgaagaagaaacacccgattaagcctgtgaacaggctttttagtagaatagtacaaatgtgaaagcatttgagacaaacgaaaggcaaccgaaaaaggttgcctttcatatttttgtaccgttgataaatttgctgtcctgtttttatttgtataccgaggactgaaagttaaagaacacaaaaaaaagactgttcttcggttattcccaaatctttcctaaatctgtatcgttatttgctgtataaaataaagtatagtattaacgttaaaaaaataatgattatgaagaaaattctatctttactcgtgttggctattgttgccgtacagttttcatgggctgctgatgtgataactaaagacatgaatcagttaccgcttccggcacgcaattttattaaccgtcattttactaaacccgaagtgtctcatatcaagattgataaggaaatgctggaggctaccaaatatgaggtgttactgacagacggtacggaaatagaattcgacagcaagggaaactgggaagaagtaagtgcccgaaaaggacaggtgattcctgcaagtattgttccgaactttgccgttgattatctgaaagcacataattttgctgctgaaggagtgacgaaagtggagcgtgaccgtaagggatatgaagttgaattgtccacaggcgtctctttcaagtttgacaagaaagggaagtttgttaaagcggacgattaagtataagtgatagtataataaacctgaaccaaaaaagtaactatgttgagatttaagtttggcgcctgggcggtggttctgatgttggctgccctttcattcggcgcctgttccgatgaagatgatgatccggctttcaatccgccttccaatattacggaagccttgaaacaattatatccggcagctcagaatatagaatgggaaatgaaagatgtgtattatgtggccgattgctgggtggccgatgacgaactggaagtctggtttgacgggaatgcgaattggctgatgacagaaaatgaactggaaagtatagatagtttagttccggctgtatatactgctttcaataataccaaatacagttcttgggtggtgaccgatgtctatgtactcgtttatccgcagaatcctacggaatctgtcattcaggtgaagcagggaagccggcgctattcactggttttctcgcaggatggtggattgctgcacgaaaaggatatcagtaacggggatgatacgatttggcctccggctgaataatttcttatccatttagctgaaatggaaagagtgacggtatcttgccaggatagcgtcactcttttgttagtatagtgacggtcttccgataagatagcgtcactataattgtaggtttacatttgctggtaatctttggccaatcctccttcactcgtctctttgtagagtgagggaaggtcatgtccggtttgtttcatcacttgcactaccttgtcgaaagagacacgatgcataccgtccgtaaaggcggaataaagatttgcgtcgagtgcgcgggcggcagcgtaggcattccgctcgatgcagggaatctgtaccaatccgcatacagggtcgcaagtcatacccaagtgatgttccaatcccatttctgctgcatattcaatttgtgccggactacctccgaataattggttggctgctgccgatgccatggcacaggcaacgcctacttcaccttggcaacctacttccgcgccggagatagacgcattgaatttgacgatgtttccgatcagtccggcagtagccaatgcacgcaaaatacgcatatcgctaaaatcacggctcttttgcaggtgataaagtacggcaggcatgacaccgcaggaaccacaggtgggggcagttactatctttccccccgaagcgttctcctcgcttaccgccagtgcataagagaatacgagtcctctcgattgaagggactgtttgtatccggtagcacgtatataataggtagaagctttccgtcgcaggttcaatgggccggggagcactccttccgcttccagtccgcggtgaatggcttctttcattgtatcccatacttcagcgaggtaatcccagatatcttcattctcgcactctttcacatattcccagtaactctttccggtacgttcgcaccattccagaatttccgtcatactgttcatcccatatacttcaggactttcaattgtcggattgctgttgttttcagctagtgcgcctccgccgatactataaactgtccaattctcctgaatcttgttgttggcgtcgaaagcggcaaatgtcattccgttcgggtggaaaggaagaaagactttcggttgccagatgatttctaccggggcggtagttttgagtgtgtctataatggctacatccgtcatgtgcccttttccggtagcggcgagacttccatagagtgttactttgaaagaggctgcatccggatgacgttctacgaacatttctgcagctttgcgtggacccattgtgtgactgctggaaggaccagtaccgattcgatatagctctttaattgatttcatgagttatgtgtgcttaattaataccatttcttttttctaaaatacaaatatacaacaataccgataactcccattaaaatccatgcaaataaatatccgtatcgccaatcaagctccggcatccatttgtaattcattccccatactccgactaaaaaggtgagagggatgaagatagtggatacaatggtcagacgtttcatgatgtcgttcatgcgtaagtcattgttggatatatatagatcgactaatgaagaaagcgtttcacggcagatttcaatagtctggagaacgaactgtaaatggtcattcacgtcattgaagaacgcacggtttactttatggataagcaggttttccgcccgtaacagttttacgtattgttccttcagggggagaatggatttcttcatcagcatatattgacgccggagtgactggatctggatacctatatcattttcgtcggtgatagtcagcaactcctcttcaagatcttcgagggcatcgtcgatagaagaaattgttgagatgtaattggtcattatactgttcagcagtacactgagcaaataatccgtctgacggctacgtattttcagtacatcattgcgtaaggcagcgttaatatcatcgaagaagtcggtttcctgttcgagaaaggtcagcacatagttgcttcccagaatgacacagacttgctgttggagcagttcgtccagttcgttttcctccttatgggtgttgggatagaataatttcaggatgagaacgatatatttatcatgttcttcgattttagtcgggtggtctgcgttcaggatatcctgcaaaacaaggaagtctatttcaaaatgagcgcaaatctcgcggattgtttccgtatcttttaaaccgtgcacttgcaaccagttgattcgcgcactgtctaatgttgctttgacggattggaaggtgtcgccggagctttcctgcatctcagtggcattgtaggtgcagagatgaatgtgggtaggagtaaggctgtcccctgtgtaaatgagcttttcgcttaataggttatttttcatgctttattctcgttttagaaaaccaccgcaacaaaggtagtggttttctaaatgagaacaagttcttgcgacgttttgtttacaatatgtcttatatccgggtcaatcaaaatctactactgtgattccggcacctccgaactgcacatgctcgtcggcataatggcggatactcggtacggtggacagatattggcggatgagtgtacgaaggattcctgttcctgttccgtgaagaatacgtacacggtccatgccgaccaatatagcatcgtcaataaaataagtgactgcttgcaacgcttcgtctccgcgcatcccgcgcacatcgatatcttgtttgaaactaagtttcttttcgtacatctggtcatgtgtctggctgctgacaaaggaacttttggctatgctttccgtcttgggggccgcgttggagcgttcgagacggtccaacttgacggttgtcttgatacttccgaaggcgacgattgcattcttgccactgatttccattacctgcccgacgctggtctgacctttaatttttacattttcgccaacggagataggagccactttaggagtagcggttgttgaggaacttgccgctttctgctcgttctttttattcttcttccgttcctgtttctctttcagtttctccattttccgagccattttttcttcttgttccttggaagccaatgcatccaaagaagtacggaagtcagttagctcctgacgggccatgcgggtcttttctttttctgcctgtgcctctttaatggtacggatcgtattttcaatacgggcattcgattcctgtaacattcgttccgcttcctctttagcctgccggataatctcttttcgtgatttttgcagttcttccatttcagtctgatagcgggcgatcgtttcttccatgtgcttctcccgttggcggatcgtttggcgtttcccttcccagtaacgtttgtcgcgcacgatatcctgaagatatttgtcggcattgatgtactcgctccctacaatttccgaggcgtcagcgattacatcttccggcaatccgattttccgtgcgatctctacagcaaaggagcttcccgggttaccgatctgcaattggaagagtgcctgcattaaatggcggtcgtaaagcatggcgccgttgactacgccttcatggtcttctgcaaaatgcttcagattctggtagtgggtggtaatcactccgaaagtccttttctggttgaaacgtttcagtacagcttcggcaatggcacctccaatctgcggctccgtacctcctccgaactcatcaatcaggatgaggctacgttcattgcaacttttcatcattatcttcatattggtgaggtgagaggagtaggtactcaaatcgtcttcgatagactgttcatcaccgatatctatgaaaatgctgctgaatatacctgcatgactgcgttcgtgcatcggaatcaacatgccgcattgtaacatatattgcaataagcctaccgttttcagacagactgatttacctccggcattcggaccggagataatgagaatacgctgtttcttgtttaattctatgtccaaaggtacgacctttttcccatgcttggctagcgacagttgtaacaagggatgtacggccatagtccagtctagtaactgttcattttctatggcgggtttcagactgttggtctgtatggcgaaataacttttcgcacggataaaatcaatttctgccaagaattcatacgactggagtatctccggaatagacgggcgcaacacattggagaattccgtcaggatacggataatttcccgtctttcgtctccttcgagttcgcggacgcggttgtttgcttctacaacctccgccggttcgataaatacggtttttccgcttgccgattcatcgtggacgattcctttaatcttacgtttgagtcccggagcgacagggataaccaagcgaccgtcgcgcatggtaggggctacgtccttatctacatatccttcggattgcgcactgcgcagaatgctgttcaacgagcgggaaatacttcccattgtattggctaattccctgcggatacgagccagttctgtagaagcattatcttttatctttccatatttattgaggataccgtctatttttccaatcaattgggggaatacggcaatgtctcccgccagtcgtttcagactggggtaggggctatcactttcttcttcgtcttcattgttccgatgcaggaaacggacgatatcacgaatggtctctagtgaacggcgcaagtcgaataattcctgttcgtccagatacattccttctatccgtacccgtttcagtgaagggcggacatcgaaaaaaaattggtcgggaaatccgtcctcttcttgaatgatgcgaacaaactcggttacttggtttaaattctcttctactacttcatattgttcggaaaagcccatgtctgaaactttttcttcgcctaaagtgctaagacacttgtctttcagtaactgccttatctggtcgaatcctatcttttgctcaaaattttgagggtatatcatatctttattccttataactgggcacaaaaatacgattaattcacgaaaaaagtatcagattgtttgcagatttaaaaatgattcgtacctttgcaccgctttcaacggaaagcacttctgataaaggagttttggagaggtggcagagtggtcgattgcggcggtcttgaaaaccgttgtaccgcgaggtacccggggt

SEQ ID NO: 3038 - DNA, 15268 bp, Unknown
  gut microbiota DNA sequence
aaagccccagcttgtgaaagtcggggctttgtgcttaaaaaaaagaaggtgcgcattttgacacacctcctttttttttttcatttgttactaatcagccatatattccgtatatttgtcacccgtaaattaggaagaacaactcgataaaatgaaaaagcaaatcgtacttattgcaatcttatgttgtacagcctttgcacaagcacaagaagtttttgtaaatgccgattttgtcagtagttacatttggcggggaatagactcgggcaatgcctgtatccagccaacactaggtcttaattggaagggactgacagtttatgcctggggttcaacagagtttcgcaacaaaaacaatgagattgacttgtcgctagaatatgaatataagaatctaaccctttatgctaacaactattttacccagacagaagaagaacctttcaaatatttcaattacagttcacactccaccggacatactttcgaagtcggagccggatatatatttagtgaaaagttcccgctttccgtcagctggtatacaacgtttgccggcaatgattaccgggaaaacgataaacgcgcctggtccagttattgcgagctaagctatccctttagtgtgaaagatgtcgatatgagtattgaagccggcttcacaccgtgggaaggtttctactctaacaagttcaatgttgtcaacatcggattatccgcaaccaaagagttaaagatcacttccggcttctcccttcctattttcggaaaactgatagccaatccctacgaagaacaagtctatttcgttttcggacttagtttatagcaagacatatttattaataaatcactaataattacccccatgaaaaaacaccccttgattctttgcgcaggaattacttctcttttattgagtgcctgcaatccggtaaaagctccggaagcaatcttacccgttcccgaagccaaacaagtggaatggcagaaaatggaaacctacgcttttgtacatttcggacttaacacttttaacgaccgtgaatggggatacggagactccgatcctaaaacattcaaccctgcgaagctcgactgtgagcaatgggtaaagacctttgtagaatcgggcatgaaaggagtaatcctcactgccaaacatcacgacggtttctgcctgtggcctacccaactgacagagtattgtatccgcaacactccctataagaatggacaaggagacattgtgcgcgagttatcggacgcctgcaaaaaatatggtatcaaattcgccgtttacctatccccctgggacagacaccaagctaattacggaactcccgaatatgtagattatttctataaacaactccatgaactactgaccaactacggtgatgtctttgaaatctggttcgacggcgccaacggaggcgatggctggtatggcggagcgaaagattcacgtactatcgaccgcaaaacatattacaactatccgcgagcctataaaatgattgacgaactgcaaccgcaagcagttattttctccgatgggggacccggttgccgttgggtcggaaacgagaaaggatttgccggagccaccaactggtctttcctccgtgccggagaagtttatcccggttatcccaactatcgcgaactgcaatacggccatgctgacggtaatcaatgggtggcagccgagtgtgacgtttctatccgtccgggttggttctatcatccggaagaagacggccgtgtgaaaacagtggacgaactgaccgacttgtattaccgtagcgtaggacataacgcaacgttattgctgaacttccccgtagaccgtgacggactcattcatccgacagactccgccaacgccgttaacttccataagaacatacagaaacaattagaaaagaatctgctggccggcctttcccccaaagcatcggacgaacggggaaaagcattctccgctaaagctgtcacagacaacgactatgatacttattgggctaccaacgatgatgtaacttccgccactattgaatttgacttgcctcaaccggagaagatcaatagaatgatgttacaggaatatatccctctgggacaacgtgtgaaatcattcgtagtagaatataaccaggaaggtgaatggcttcccgtgaagctcaatgaagagacaacaaccgttggttacaaacgtctcctccgtttcgaaacgatcacgaccgataagctccgtgtccgtttcacggattcacgtgcatgtctctgcatcaataacatcgaagcattctacgcaggagcaacttccgatacatactctacaaaagcggaagaactgaagagtttcccgttcactctcagcggagtagacacagaagaagcacaaaaatgcatggacaagaatgaccaaacggcctgtttcgtcaatggaaacacactgttaatcgacttgggagaagaacgtacgattacttcattccattatcttcccgaccaaagcgaatataataaaggtgtaatcgccgcatacgaaatatctgtcggtatggatagcaatgctgtcaatcaagtggtagcaaaagacgaattttctaatataaagaataacccgatcctgcaatctgtctacttcaccccactcaaagcccgctatgtccagctgaaagcaacgaggatgatacatgacggagaaccattaggattggccgagatcggtatacaataacataaaaaaagaattttatacttacatacaaatttagcagttcttattgtcagaccatcatttctattcttagcatattgatttccattagacactgacgataagccctgacaataggctggcaatattatcttatacattttattgtcagcctatgattttattactccctcatagttactgtccgtccggctttacttaccttccgtgacaagccccctttaaacatacgttatacaaccgctatacttctgttaaccaataagtattgttctgtcgggataccgatatagttacctcgccacggctgtggaaagaattcgccacagttgtggtaacttctcgtcacgaccgtgaggagaagttaccacggccgtgacaaactaaagatgaaggcactctaacagtactataccggcattccgacagtactataccggtttcctttcctataaagtcctgcttaaccactctgcaaataagcaacttgccagaaaagcagtagtaatatcgagcaagaacaaattcaataaatatactttcaccccccaaccaaatctataaaaatccttcttcttttgctcaaaatccttaaacctgtgcattttttactcggatttcttgtcagaaccaagtgtttgcgtaaatttgcacgctgatagttaaccggatagtttgaatagcaagagattactacttgactactggctactacctacttgtagaaatactaatactaaaattaataacatgagtttgaaaattgttgtattggcaaaacaagttcccgacacacgtaatgttgggaaggatgccatgaaagccgacggaaccattaaccgtgcggcactccccgctatcttcaatcccgaagacttgaatgctctcgagcaagctcttcgactgaaagatgcccatccaggctctaccgttaccattctgacaatgggaccgggtcgtgctgccgacattattcgtgaaggacttttccgtggtgcagataacggttacttgctgaccgaccgtgctttcgccggtgcagatacactggctacttcttacgcgctggctactgctatccgcaaaataggtaactgtgacattattattggtggtcgtcaggctatcgacggggatacggcgcaagtaggtccgcaggtagcagaaaagttgggattgacccaaatcacatacgcagaagaaattctggaagtaggtaaagacaagattacagtgaaacgccacatcgacggtggtgttgaaaccgtagagggcccgttgcctatcgtgattactgtcaacggctcggcagctccttgccgtccgcgcaacgcgaaactggtgcagaagtacaaacatgccaaaactgttaccgaaaaacagcaaggtaaccttgattatactgacctgtatgacaaacgcgactacctgaatctggtagaatggagcgtagccgacgtaaacggtgacctcgcacaatgtggtctgtccggttcgccgacaaaagtgaaagccattcagaacatcgtgttccaggctaaagagagcaaaaccattagcggcagcgaccgtgacgtggaagacctgattgttgaactgttagctaaccatactatcggataatcatgaataacttatttgtatattgcgaaatagaagaaggtaacgtagcagacgttagccttgaacttctgaccaaaggtcgttcgttagccaaccagttgaactgtcagctcgaagctgtggttgccggaacaggcctcaaagatattgaaaaacaaatccttccttacggagtagacaaactccacgttttcgacggagaaggactttatccttatacttcactccctcacaccgctatcctggtgaaccttttcaaagaagaacaaccacaaatctgcctcatgggtgccaccgttatcggtcgcgacctcggcccgcgtgtttcttccgctttgaccagcggactgactgccgactgtacttctctggaaatcggtgaccacgaagacaagaaagaaggcaaagtttataaaaacctgttgtatcagatccgtccggcattcggcggcaacatcgttgcaacgattgtaaacccggaacaccgcccgcaaatggcaaccgttcgcgaaggtgtgatgaagaaagaaatcctctccccgacttatcagggagaagtgatccgccacgacgtgaagaaatacgttgccgacacggattatgtagtaaaggtaatcgaacgccatgtggaaaaagccaagaacaacctgaaaggttctccgattatcgtagccggcggttacggtgtaggttcgaaagaaaacttcgacttgctgttcgacctagctaaagaacttcacgctgaagtaggtgccagccgtgccgctgtggatgcaggttatgcagagcacgaccgtcagattggacagacaggtgttacggttcgtccaaaactttacattgcctgcggtatctccggacagattcagcatatcgccggtatgcaggaaagtggtatcatcatctctatcaacaacgacccggacgctccgatcaacacgattgccgattatgtaatcaacggaacgattgaagaagttgtaccgaagatgattaagtattataaacaaaatagtaagtaaggaacaatggctaattattatacagacataccggaactcaagtatcacttgaacaatccgatgatgaagcgtatttgcgaactgaaagaacgcaattacagagataaagatgaattcgattatgctccgctggacttcgaagatgccgtagactcttacgacaaagtactggagatcacaggagaaatcacaggagaaatcattgctgccaacgcagaaggcgttgacgaagaaggtcctcactgcgccaacggacgtgtagaatatgcttcgggtacgaaacagaacctcgacgccatggtgaaagccggcttgaacggcatgaccatgccccgtcagttcggtggactgaacttcccgattactccgtacaccatgtgtgcagaaatcgtagcggctgctgatgccggtttcggcaacatctggtcattgcaggactgcatcgaaacattatacgaattcggtaatgccgaccaacacagccgtttcatccctcgcatctgccaaggcgaaacaatgtctatggacttgacggaaccggatgcaggctccgaccttcagtcggtcatgctgaaagcgacttacagcgaaaaagacggctgctggttgctgaacggtgtaaaacgcttcattactaacggtgacgcggatatccacctcgtactggcacgttcggaagaaggaaccagagacggtcgcggtttgtctatgttcatctatgacaagcgtcaggggggagttaatgtccgtcgtatcgaaaacaaactaggtatccacggttctcctacttgcgaactggtatacaagaatgcaaaagctgaactttgcggtgaccgtaagcttggcttgattaaatatgtaatggcgttgatgaacggtgcccgtctgggtattgccgcacaatcggtaggattgagccaggctgcttacaacgaaggattggcttatgccaaagaccgcaaacagttcggaaaggcaattatcgaattcccggctgtttatgatatgcttgccagcatgaagggtaagttggatgcaggacgtgcactgctgtatcaaacagcacgctacgtagacatctacaaagcactggatgacatcgcccgcgaacgtaaactgactccggaagaacgtcaagaacagaagaaatacgccaaactggccgacagcttcactccgcttgccaaaggtatgaactccgaatatgccaaccagaatgcttacgactgtatacagatacacggtggctcgggcttcatgatggaatatgcttgccaacgcatctaccgcgacgcacgtatcaccagtatctacgaaggtacaactcagttgcagaccgtagccgctatccgttacgtaacgaatggctcttacatcgctactatacgcgagttcgaagctatcccctgctcaccggaaatggaaccgctgatgtctcgtctgaaaaaaatggcagataagttcgaagcaagtaccaacgcagtgaaagaagcacaagatcaggaactgctcgacttcacagcccgcagattaatggaaatggctgccgacatcatcatgtctcacctgctgattcaggatgcaagcagatcttccgaactgttctctaaatctgcacacgtatatctgaactatgcggaagcagaagtggaaaaacatgctaactttatcagcaacttcgataaagaagacttggctttctataagaagtaacagaatattatacaacgcaagggctggatttgcctgcccgaatatgataatctttacgtattcgggcggacaaatccggccctttctgtttgatatcccctccccttcgttcgaaccggctatgtctcacccaattaagtttctctatatctataaaaatataccctacttatttctactttttctcattattattccatacatttgtctgtcaggaaataggcaatcatttacaacaattaaaagagaataatatggcatttagactcaggcctttacatgaggacacactacaatttgctggcttatcaaacacacaaattctgattttagcccttgaagcttctcaaaagttagaatggaatattgaagaactcactcttgaaggtgtccgttttgatgtccctatgagtataaaatcccatggagaggaaattacagtctctattcaggaaggaagtgacggagaaatatctgttcgcagtcaaagcattgccatgcaactggtagactatggcaagaacagaaaaaacatccaaagtttgcagaaggcaatggaagaaataaaatcaactctttctccggaagaattagagcaaaaagccaaaaaactggaagatgattttaaccggccgttgaccgaggaagaagaagcatatctcaaagaaatagaaaagaaatcatcctttatcagtttcttcattccccggaaaggatttatagcgactcctatcctaatggaccttaatcttctgatctttatcttaatggtggctttcggagtgggaatcctggaaccttccacactggccttactgaaatggggggctgattttggaccgctaacccttaccggagattggtggcgcgccataacctgcaacttcatacatatcggcgctttccacttgctgatgaatatgtatgctttcatgtatatcggactttggttggaggacctgataggaacgcggcgtatgttcatctcctatctgctcaccggggtttgttcggcagccttcagtctttatatgcacgccgaaacaatcagtgccggagcttcaggagcgatcttcggactttacggcatctttctggctttcctcctttttcaccacatcccgagagcacaacggaaagcattattaattagtatccttcttttcgtaggctacaatctggtatatggcatgaaagcaggaatcgataatgccgcacatatcggtggattgctcagtggttttcttttgggaatcatttatgtaatcagttacagatttgagaagaaggatgcacaaagaactatttctattgtaggggaactggggatcttcggaatcttcctgttcagtttcctcggactttgccagaacatcccttcaacatatcgggaaatacgtaaggaatgggaaagcggaatcgtggaagcttatcttaacggtgaactggaagaggaaaatgacaaccagcctgcaacgaatacgccaagcaagtcgtccaccctgcaaatgccaccttatacccctgtcggcaacaatgacacatggctttctttctatgatgcaacaacaaatttcagctgccaatatcctacaaactggcataagataacaggtgcgcgaggactgactcccactgcggaacctccttttctaatgctcgtcaatggaggaaaccaattaactgccgtcgcgcttacctatgacacacggaaagagtttgaacgcgtaaaagaactgacactcctgctcccgagaaatgcaaatggagagccttcggaggattataaacaaagcaacgtaacgatcaacggcctgtctatgacacagacctcgaatccattgcatatcggagctcccgatgagccagggcatgacgtacagcaaattgcattacgttatttccaggaagatcaactaagagtcttttccatagtaatgcttgtctacgacaaggaagcacaagcagacttggaagctattgtatcaagcattcaaataaccaaataaagtaaacaatgagagtatacattcaagtaaaacaactgggaaagcgaaagtgctgcattgaaaagctgcccgtcgacttttctgttcctcccaccaatgtgcaggagttgattgcaagtattgtcagctggcaagtaagcgaatataacgatcgcatgcaacagagtgaagtattgcaatatctcactcgggaagaagttgaggacaaggctgcctccggaaaggtaggcttcgaagtaaactataacggcagaccggccgcagaaactgaagcaatcgtcaatgcgctgcaatcttatgaggacggaattttccgtatctttatagatgacacggaagcaggcgggctttcttctcctgttgtattaaaagaagaaactacactgacctttatccgactgactatgctatcgggaagattatggtaagtatctataataaccccaaaaaaacagataatcatgagaatcatttacaatgaagatttgaataaacgaatcatcccgtatgtggacaaattaataaagaataaaaaaaagctggataaagaaacggctgttctcttcgatgtattcattcaatatcttgacatggatacccgttacgggacgtatggcgagcaattggagccttgtatcaccgaaatcatccgagaggaaagtatcaggaatgtcgcccatctttttgacggaaaactaaataaactacttctctacttattgggggacgaatatgccgggctgtttcatacttacttgaaaatcaaggcccgttgcccgtatacttgtgggtattcacgacgttcacaacgttcggttgacccgaccctgcatctcaaccatgtgacagatgcactgacccagtttctgaaactacgtgcaaccgggtttaacgaacaggccatactcaacggaggaagaacaccggaagaaatagaaacaatcaaagacgctatgagttgccagagttggatggctgcccaaatagcggaaggaaatgccaccgtcattgagtacttgcaaaacgtgctgaccagcgaaaacaatgccaaccgtctgaatcagggacaccttcaagctatcgctgccagcggataccgtccgttgctcgaactggaagggaagttattgttggctgccaaactgcaagaaggactccggcaagctatcgtagagacaatggacgaaggctgtcccgaaagctacctctacctattttccattatctacgacaacggacttcaacgctttgcttccgtgaaacgcggcatagcagtcagtacaggtatcggcgaacaggacagcagtgaccgtatcaccaataaatatgtagaactcatccggcatttcctgaataatcaagaggacgcccgcgaggctctccaaagcaaagacacaaccaagctttacctggcattatggagtatcggattctataatacggaagacattcaggcacttataccgcaaatcatcaaagaaggtgctaaatatcaggtagaaactctcctctatttcctgcgttgcacgcaatatacagggatgaaccatcgcatcagcaaagaagcgctggaagtatggcacaacgaaccttcggtggttgcatccattcttcctctctatatgaacgggatccatctcagccggtacggcaattatcaagaaggtccgcaacttatcgactacttcgaaacaaaagaagaagcggtccgccactatgaatacctgaaacaagtctatcagtcaatctctgccaaagagacttactctccgtacatattcttctgggaaagtgcattcctcacccgttcggacattgtactcaaaatggcatacatcacctggatgctgcatgactcggcattaagggacgatctctgtgcttatctgcctactctggaaacttatatgagagcaggatatatcggcattgtactgaatcctcccaccagccaattacaagaagaatacgtacttcaatcactcggtgaccgttcggtagatgtacgcgacgaagcttataaagtattgtccgatatgactttatcacccgaacagaacctgaaggtagaggaattgttacgattcaaatacagcgagatgcgtattaacgctatcaatctgctgatgaaacagccgaaagaacaactggcagacagtatccgccgcttactgacagataaggtattggaacgccgtctggccggtctggatatgatgaagactatccataatacagaatttctacaggatatctatcaggaacttcttcctgttgtcaaagaaatccgaaaaccgaacgccaaggaaaaggtattgatagagtctctgattggcgacggaacggaaaagacagtcacacagcactacacgaaagagaacggtttcggactgtacgaccctgccctggaagtcaacctgccggaaatcactccggacaaaggattcaatgtgagaaaaacatttgaacttatctgcttcggaagggcaaagctcatcttcaagaagctgaataaatacattgaaacatataagaacgcggagtttaagaatagctacggggaagcgtgcctgataggcaatagtgtcttgataaactggagtaactacggaggattgagcggactcggacgtccggaactttggaaagccttctatgaagaagagataggcagttatgacaaattactgatgatgagcttcatgcttgcatcgacaggaactccccaggatgaagacgattatgacgaggaagatgaggaagacagaaaagcagaccagaaatcggccaatagcttcgatccgcttatcaaccggatgtatacaggtgtcgtctatcgcgggctgcaaaaagaactccgcaagctgacatattacgatcagattaacgatatcatcgaagcactggctcatgaatacagggatgaagctgcctatcaacagttatccgtcaatatgcttctccaattattgccattgctgaatacagaaaacattttccgtcaatataccaacaagcacgcatggctcagggataaaatggaatacggaaagaaacaaatcgtttacccgatacacaacaacaagtttgtgaacttctggctcgaaatacctcaaaagccgatcagcgatgatctgttcgtccgctacttcaccgtacgctaccagctctacaagctcaccaattacatggagcatacacccgaactggaagaaacggactcttacctccaggctacggacttcgcccgagcatggatgctgggattaattccggccgaagaagtttaccgggaaatgatgggacgtgtcaactcccccagccgcgtagaggctatcacaaaagtattgaatgacaatttccgtttcagtaaagagaaagaaaggtatgccgatatcaaaggaatcgacttctctctgttccgttcactggcacaaaaggtggtcgacaggattctggaaatagaattgaaacggggagattccgaaacgcaggtaaccagtcttgccgaagaattgtcttatgtctacggagccaaaacgttcatcggcatcctgcaggcattcggcaaagataccttcattcgcgacagctataactggaacaatacgaaacgcggagtattgagcagcctgctccacgcctgctatccactgccgacagacaccagtgcccaactgaaaaagcttgcaaaacaggctgaaatcagcaatgaacgactggtagaagctgccatgttcgccccgcaatggatagaacttaccgagaaggcgatcaattggaagggactgacaagcgcagcttattatttccatgcccataccaatgagacctgcgatgacaaaaagaaagcgattatcgcccgctataccccgattgatgtggaagacctccggaaaggcgcatttgatattgactggttcaaagatgcattcaagactatcggcaaacaacgctttgaagtagtctacaatgccgccaaatatatttcatgcagcaacagccacacccgtgcccgcaagtttgccgatgcaaccagcggcacggtaaaggcggcagatgtaaagaaggaaatcattgccaaacggaacaaggatttgttgatgagttacggactgatcccattgggacgcaaagcagacaaggaattgctggaacgttaccaatacctgcaaaagttcttgaaagaaagcaaggaattcggtgcacaaagacaggaaagcgaaaagaaagccgtcagcatcgcactgcaaaaccttgcacgtaattccggctacggagacgtcacccgcctgacatggagcatggaaacggagctgattaaagaactgctcccttacctgactcccaaagagatagacggtgtggaagtatacgtgcaagtcagcgaagaaggcaagccagagatcaagcagatcaaagcgggcaaagagctcaacagtatgcccgccaaactgaaaaaacatccgtatgtagaagaactgaaagcggtgcataagaagctgaaagaccagtatacccgttcgcgcattatgctggagcaagcaatggaagactgtacccgttttgaagaaagcgagttgcgcaagctgatgcaaaatcccgttatatggccgttgctgaaacatctggtctttatctgtaacggacaaacaggtttctacactgacggattgctggtgacggcaaacgccgtctgcctcccgttaaaagcgaaagacgagttacgcatcgcccaccccaccgacttgtatgcaagcggcaactggcacgcatatcagaaattcctgttcgataaagcaatccgccaacctttcaaacaggtgttccgcgagctctacgttcctacttccgaagaggcggaagcaacacaatcccgccgctacgccggcaaccagattcaaccgcagaaaacaattaccgtactgaagggacgtcgttgggtagccgactatgaggacggacttcaaaagatctattacaaagagaatatcattgccaatatttacgcaatggccgattggttctcgcctgccgacatcgaagctcctacgttggaatatgtttgtttctacaaccgaaaggattataagcccatgaagatttcggagattcctcccgttgtgttctccgaagtaatgagggatgtagaccttgccgtaagcgtggcgcacgccggaagtgtagatccggaaaccagtcactctacgatcgaaatgcgtagcgtattggtggaactgacaatgccgttgttccatttcaacaatgtgaaggtggaaggcaactttgtccgtatcgagggcaagctgggcaagtacaacattcacttgggaagcggtgtgattcatcaggaaggaggcgcacagattgccgttctcccggtacattcacaaaaccgcggacgcttgttcctgccatttgtggatgaggacccgaaaacggctgaaatactgacgaagattatcttctttgcagacgacgacaagataaaagatccaagtatattaaatcaaatcaagtaacaaccgatatggcagaaaatttatcaatcaacgcgggaagcaaggaggaaaagtatcgtgaactactcccacagttatacgcattaataagtacggaaacggatttcatagccaatcttgcgaatctttccgccgcattaaagcagactttcaatttcttctgggtaggcttttatctggtgaaaggcgatgagcttgtgctaggtccgtttcaagggcctatcgcctgcactcgtatccgttttggcagaggagtttgcggcacggcctggaaagaagcacatacgctgattgttcctgatgtagaacaatttcccggccacattgcatgcagttccgattccaaatcggaaatagttgtaccgatgatgaaagaagggaacgtgatcggagtgctggatattgacagtgattcattggatagtttcgatgatattgatgcgcactatctggaagaaatctgtacatatctccgatagtcatattctctcggaacagtcttattaaaacagaggctctgattgagtgaatcagagcctctgtttactataaatgaaggaggtgtgtcaaaatgcgcaccttcttttttttaagcacaaagccccgactttcacaagctggggcttt

SEQ ID NO: 3039 - DNA, 5262 bp, Unknown
  gut microbiota DNA sequence
ctttttatacaatatgtcaaagaacacttgattcttactttttacacaacctccccggaaggaggggaatggagttaccaccgacttgttaaatgcacattataattatatctaaagaaaaaccttcttttttctaacgttctttttctatctcctattatcaatcctctattatcttattttctcctactatcttatcttcctctattatcaatctcctactatctcatcttcccctattatcaatctcctactatcttatcttcccctattatcaatctcctactatcttatcttcctatttcccgtacattttttcgtaatagccttgataatctccgctagttacttcttccacccacggctggttattcaagtaccattcgatagtcttcacaatgccgacttcgaatttcgtttcgggataccaacctaaggcattggtaattttggtcgggtcgattgcgtaacgctggtcgtgtccgaggcggtctttgacaaaagtaatcaaatcctcgttaatccagtcgattgagatttctccgttttcacctttcactttctttttaagcatttggcgatattcgggatgttccgtcatcaagcggtgaatggtcgagatagtcagtttcacaatttcgaggtttgtcttttcgttgtgtccacctacgttgtagacctctccctctttgccttcgcgcacaacgaggtcaatcgccttgcaatgatcttccacatacaaccagtcacgcacgttacttccgtcgccgtagacaggcagatgtttaccttcaaggatattcttgataatcaatggaatcagtttttccgggaaatgatacgggccgtagttatttgagcaacgggtaatcgtaaccggcattttataagtgtcgtgataggccataacgaccatatccgcgctagtcttggaagcgctgtacgggctatgcggacaaagcggcgtagcctccgtgaaaaacccttcagcacccagagagccatacacttcgtcggtagaaacctgatgataacgcacacctttcctccaagtcgggtagccctgttcgtccttgcccattacccacgcgcggcgtgcacagtccaacaagttctgcgtgccgagaatattagtaatcaagaacaactgcgggttttcaatgctacggtccacatggctttcggcagcgaaattcaccacgtaatcgaagcgatactcagcaaacagaccgtctactacttcgcggctacaaatatctcccttgataaaaaagcagcgttcattgtcgatatccttggcaatggttcccaaatttcctgcatacgtcaaagcatccagaatcacgaccttcacgtcgctatgttttgccagaatatacttaatgtagtttgcgccgataaatcctgcggcaccggtcaccagataagttttcatatatttcttattatgttgattttaggattgttttgccagttcaataaggtatttgccgtattccgtcttttcgagttgccggccgagcagaagcagctgttccgtcggaatccagccctgacgccatgcgatttcttcgatgcaactgacataaaaaccttgacggttctgaatggtggcaacaaagttagaggcttccagcaaactgtcacagttaccggtatcgagccatgcaaatccacgtccgaaaagttccactttcagcgtgtcttcttccagatagaggcggtttaagtccgttatttcatattctccacgggcggaaggacggagggcggcagccttttccgtcacggtagcgtcatagaaatacaatccgggaacggcataattgcttttcggaacggcaggtttctcttccagggaaacgactttgcccgtctcgtcaaattccaccacaccgtaagcgcggggatctttcacgtaataaccgaatatgcaagctcctttctccacactggcagcacggcggagcatggcggaaaatccctggccgtagaacatattatcgcccaaaatcagacatcccggttcaccgttcaggaaatcggctcccaatacgaaagcctgtgccagaccgttgggttgctcctgcacctgataagagaaggacattcccagttcttcacctgttcccagcagatcgcggaacatcggcaagtcacgtggagtagagataaccaatacttcgcgtattcccgccaacatcagtgtagacaacggataataaatcatcggcttgtcgtacacaggcatgatctgtttagaaatcgccttagatagcggatagaggcgggtagcacttccaccggccagaataattcctttcatgttcgtctttgttattcattcactggctgcaaaggtcggaaagaaatccgaaatgacaaaaataatgcgaagttatttatccgccagctcgataacttccaaatccttgaacgctccttcgtcaatgacaaaccgcaccaatgtacgtactttatgaaatccggacattcccgccgctcccgggttgatgtgcagcatatccaacgttttgtcatatttcacctttaatatatgagagtgcccgctgataaagagtttcggcggccgcgtcatcaggcttccgacaatggaaggatcgtactttcccggatagcctccgatgtgttttatgagtacttccgcaccgtccaccgtaaaacggttcacctgcggaaacaacttccggatttcctgcccatcaatattcccgtagactgcccgtaacggccggaaagccgccaatttttccgctacttccaacgaaccgatatcgcccgcgtgccagatttcatcgcacggttcaaaatattccaggtatttctcgtcccagtaagcgtgagtatctgataataatcctattcttgtcataattttctttgtttaatcccgcaaagatactatatttggaaaaatcttaaagtacatggaaagcaaatataattatttcaagcgagatatcagttggctctcattcaattaccgcgtattgttggaggcaacggatgaacatttgccgctctacgagcggattaacttcatctcaatctactcttccaatctggaggagttttacaaaatccgggtggccgaccataaagcagtggcttccggagcaacggaaagcgatgaagaaaccgtacaatctgcccgtgaactggtagaggaaatcaaccgggaagtcacccggcagctggacgaccgtgtgcacatctacgaacagaaaatactccccgccctacgtagaaaccatatcattttctatcaggacagacacgtggagccgttccaccaacaatttatcaaagattttttccgggaagaaatcttcccttacctgcaacccgtaccggtatcgaaggacaaaatcgtctctttcctccgggacaaccgcctctatctggccatacgagtttatccgaaaaaagagaatgagacagagcaacggcaacagccgtattacttcgtcatgaaacagccttatgccaaagtgccccgtttcatcgaacttcccgcacatgagaaagaccattatctgatgttcaccgaagacatcatcaaggcgaacttaaacctgatcttccccggctacgacgtcgactccagctactgcatcaagatctcccgcgacgctgacatcctgattgacgacaccgccagcagcgccgaccttgtagcccaactgaagaaaaaagtaaagaaacgcaagatcggcgacgtctgccgcttcgtctacgaccgcgccatgccgcaagacttcctcgattttctggtggacgccttccgcatccagcgtgacgagcttgtccccggcgacaagcatctgaatctggaagacctgcgtcacctccccaacccgaacaagtcgctccacagccttgagaagccaaagccgatgaagctaaccgtcctcgacgagaaagaatccattttcaactacgtcgcccggaaggacctgctcttatattatccgtatcattccttcgaacacttcatccatttcctttatgaagccgttcataacccggaaacgcgggaaatcatggtcacacaataccgcgtggcagaaaactccgccgttatcaacaccctgatagccgccgcccaaaacggcaagaaagtaaccgtattcgttgagctgaaagcccgcttcgatgaagagaacaaccttgccaccgccgaaatgatgcaagccgccggcataaagataatatatagtatcccgggactgaaagtgcatgccaaggtagccctcgtccgccgtcgcggacagaacggcgagaagctccccagctacgcttatatcagcaccggcaatttcaacgagaagactgccaccctctacgccgactgcggcctgttcacctgccgcaaggaaatcgtgaacgacctatacaacctcttccgcaccctgcaaggtaaagaagaccccaaattcacgactctccttgtcgcccgcttcaacctcatccccgaactgaaccgcctcatcgaccgtgaaatagaacttgccgaccaaggcaagggtggacgtatcatcctcaagatgaacgccctccaagaccctgcaatgattaaccgcctctataacgcctccgaacacggcgttcagatcgacctcatcgtccgtggcatctgctgtctcatccccgggcagtcatacagtcgtaacatccgtgtcacccgtattgtcgacagttttctggaacacgcccgcatctggtacttcggcaacaaccaccacccgaaagtattcatgggttcccccgactggatgcgccgcaacctctaccggcgtatcgaagcggtcaccccgatactcgaccccgacctacgtgccagcctgatagaaatgctgaacatccaactggccgacaaccaaaaagcctgctgggtagacgcccaactgcaaaacgtattcaagaaaagaacgcccggtaccccaagcgtccgcgcacaatataatttttacgagcaactaaaaaacagcctgctcccacataatcccacataatcccacataatcctatataaccctatataactataacacatataacgccccatgccgcacccacccgcatggtttccccggactacttttttatccgtcaagcgagcttccgtaacggagcggatttttcttcaagtttggtggtaatttagctagtcggtggtatctccattcccctccttcggggaggttgtgtaaaaagtaagcatcaagtgttctttgacat

SEQ ID NO: 3040 - DNA, 578 bp, Unknown
  gut microbiota DNA sequence
tccactttttaagacgttcaaagcgttcaaacggataaatacagctttccatcatagtttgacacttataagggcaaaaaaagccgcttttgcggcttttaattgcgttctaaggcattttatccctttctggtacatgttatcaagcgagactgaataatcattgcacgtttcgtgtatttggcaatgccatcaaccagtccagcatgtaaaagactactcttagtgattccgacctgtttctccgtcagagtttcaaaaatggccgatatactaccaaagtagatgttctttttctcaaaaatcaaatgtacatggataactttactcatgatatacggtatttatttcactgcaaatataccaaatatcagctatatggaataatttcaatgaataaaaataggagagaagcgaagcgctcccctactccacttgcataaattacaccatttggttatctttgtatatggaagtatggcctgggcaaagaatcggagtaaaataataccatactgcctgaattctcccctaccccactcctaatgtaaagagattcatttgaacggcgttcaaac

SEQ ID NO: 3041 - DNA, 23786 bp, Unknown
  gut microbiota DNA sequence
tatgaccccaaagttgtactatagggataccaaaaagcaggccacgaaatacacacaaactacaaacgaacaacttacgaaaatgaaacttagcgtatcactctaaagcatcaacaaaagtgtgtatatccgtagcctgcgtgcttaaattgagatgatgccaatacaacaagattcccggaagaatgattagaaaggggacttaaagaatgcaaaggaaatgaaagaactgtactaaaccggcttgaatagtgggaaacagatgcaggacagatataaagaagcgcctccacaatcttcgaaaagactatggaggcgctatttattatttattctgaactatcagaagaaataggatcagatacccaatgacttcttcactgcttcaatcttttccattgcagcagactcggcagaagcataacagttacggcaacccatttcaccttgtacttccatatagaatttgatcttcggttctgtacctgaaggacgaacagaaactttgctgccgtcttctgtgaaatattgcaggacattagacggttccggcatatcaatagcagttacattacctttatcgtctgtttgtttcaaagtcttatagtctttactcagaatcactttcgaaccacccaattctttcggaggattagcacggaagttttccatcatagctttgatttcttcagcaccactcttgcccggtttcactacattcacagtaaattctttagagaatccgtattctacgtagatatccagcaacaattgatacaatgacttaccgttatcttttgcccatgcagcaacttctgcaatcaagcagcaggctgataccgcgtctttgtcacgaacgaagtcttcggcaaggaaaccatagctctcttcaccgcctccaatgtatttcttcttaccttcacgcagacggatttcacgtgcaatccatttgaatccggtgtagcagtcgagcatttcaatgttattcttatcagcaatcttcttgataagttccgtagttacgattgtcttcacacagaactcattacctttaatcttacctagttgtttgtattgagtgagaatatagtaaagatacatcatacaagtctgattaccgttaatcagcacccattcacctttatcatccttacaagcgatacctacacggtctgcatccgggtcggaagccataacgaggtctgcatcaatttctttagccagattcacagccatagaaagagcttcggcattttccgggttcggagagatgacagtcgggaagttaccgtccttaatcatctgttcgggaacagtaaacacattttcaaatccccacatcttcaaagcacgcggaatcaacatcatacctgtaccgtgaatcggagtataaacaatcttcatgtctttgtggcgggcgattgcttccggatcaatagaaactgtcttcaccatgtccagataaactttgtctatatcttcaccgataatctgaatcaaatccggattgccttggaatttgatatcagcagcagaggcaatagcgtttacttcgtcgatgatacctttatcgtgcggagccagtacttgcgcaccgtcatcccagtatgctttgtaaccattatattccttcgggttgtgagaagcagtcaggatgataccgctctggcaaccgaggtgacggatagcaaaagacatttcgggagtaggacgcatatcgtcgaacagatatactttgataccgttggcagagaaaatattggcagaggtctccgcaaacaaacggctgttgttacggcagtcatgaccaaccacaacagaaatctgcggcagatctttaaaattcttcttcaaataattagaaagaccttgtgtagcggcacctaccgtatagatgttcatacggttgctacctacgcccatgataccgcgtaaaccaccggtaccaaattcgaggtctttgtagaatgcttctattaattcggttttatcatcgttttccaacattcgcttcacttcagcctgagtttcagcatcgtatgccggggtcaaccatttttcggctttttcagtgacctgtttaataagttcctgattttccatttcgattattgtttattggttaatgaattattactatctatttcttgagcacacaaatgtaaaataataagtttataaatcctacatttttcctcaaaataataaccgtaagaatacatttaccggctctattcagttaaaatgatacagcactaaaacataaatatcatctcttgtcaagcaagaggccgcttcacatgcccgcccctgtaaatttcctctccgatagtactgcataaactcccgggaatgaatagaagacgcaccggcatatttcggaaaacttccgttcatattatctatctcaaccggcagttcagggataaaatcactattgaccaacaccggagtaaagatctccttttcgcggtaatcgtagacaaacgagtctccgtccaacttcttgatattccgtctatacactttctctatcacatccaaaaacagaaaacgcctgctacaagctgaaaccgacattaacttcaaaggaaaagtagaacggggagccggagtacgtaccaacaaaggtttcgttccttctttcccataagagaaaacggtgtcattggaaaattcggataatatcatttcatcaccattcttcaacaatggctttacggaaaacatacaggaaattaccccttgcctgtctccattccttagtcggatgcgaaagcggttcgtaatacgatactttacatgaaaaggcaaaggacgcattcctccgtcagttttcgacattaaataataataagttcctttttggacaggattatctacatcttcccttccgtcgttaaaaatcaatgaatctttatcataatcaaacacctgttcgaaagacatatcatagggaagattcaacgtacgcttatagttgccagacaggctataaacctggattttgaaaactgaaccgactacatatatttcttcacgttcttcatctacaaacaccgagaatatataataatattgttctttttgctgtccctgatgattaaaacgataacgaagttttccggttgcccgttcaaaaaccataattgtctgctgccaattataagctactacccaatggggcgaaacactcgctgaagtcagactatatctatctaatgaatccgccccgactgtatacaaaggaatatattcaggactcgccacctctgccaaatccagtttcttttcaggataagcagcattcaaatctatcaccggtaacgtttgttccaccgataccgccacatccgaacgtttacatcctaccagcagacacaaggagaaaaagaaccatataatcttcatctacgtttcatttgaatttgtacaatatgagtaaaggattatcatctactgtcatcttctccgccaccttcttcaagtttcccgtcaactttcctttctccaacatatccaataaacggtcagtatcccacgaatcgaaaacacatttttcaggtaatgccgataatacgcctcccattcgcattgaacgggcgggcgaatagtcttgattctcaaattccaaatcatatactttcttctcaaccgtatcataaacaaattctttggtatcaaacgaagttttccccggttcatactttttcaatgcagtcgacattaacagatagttcccaatcttggcataacattgcataacgagtcttggctcggaagcatctgctttcggagtacgtacaaacaacggggtcaacttatgattacaataagaataaacagtatcacctgccaaatctgcaaagataaactccgaaccactatttgctaacggatagagagacattgaaacggtagccgtctgtcccccttgagtaatataaatgcgttttcccacacgtttgtggatagttaccggaaggcgggaaacaactccgttctttttcgaaatcagtaaatagggacgactattgggctgtttatcttttctatccaacatataactatcgtaacccaacaaatgttgctcatcacaattgtacataatttcaatccgtacatctttggggatagacaaagaacgcttgtattttccctctatcgaatagacctgtattttattagatatgtcaagcagaaacaactctttagccttttcgtccaagcgtaactgcaaaggatagttgtattcttccccactccctcctttatgattaaatgtatggcatattttcccttttctgtcgaatacgaagatttgcccttcattggcattatacgttgttatatagtgttcggtaaatgaacaatgcagagtagccactccgtccagcaacactttatccgatgtttccagcggaatgtattcagcagttgcaatatcttgcaatactaatttctttttcggatattccttagtgatatcaatagtcggcagtttggaagtcatctgccccgactgagccgaaccggcaacggcaaggcataaagctaaaaaggtaaataatagtcttttcatggctgttttatatttaaagtgaaacaatctatatactattttttattctcattaagaaatgtttccagcacatcgttagggcccaatcccagttttttctttatacgttgcttggatttagtcacagaagtattatctatattgaataatatccctaaagctgaattgtcaagcccggcatgaagcaaataacagattcttctgtcatgctctctcaataactcacaaccattcagtctggcggaaatattcccataaaacaggtcaatgagttcaaacaatcggttccattcttcttgtgtctctatgattccataataaggttcacttttcaatagccaaagttgtgtgaaagcggtaatccgttgtgaagaaatagatgagttggttcccatttgaagttgctgtaacaatccttccctatcggaatgcaatatatgcagttgtttcatcaacaacaaattctcatgttgcagattctcataatttatagatttgttcttttcttcatgtaacagtaacgcattcttctgctgagttcctttcaaatcactgataatacgcctattcttttctattacagctgtgtaattctctatttgacgctcattgtcacgtaaacgtttcataacaccagccaataccttctctttcttccacttctcccgataatacaaaaccaaccctactaccagcaagcaacatgaaattgacagaatgatcaaataatacatacgctttcgaagttgctcattctgcaattgctgattctcccatttaagacgttctttttcataattctgtcctaaagcacgaatcgtcgaagaaaccgaaatctgtttatcaagcgaatctttacactggatataatattcggcatacttaacggcagtgtccggatgattggttctcttctcaatttcatataaaagctgatatgcactcgaacatatatacatatcgctcgtctgaacagctttcttcaaccaaattctcgcttcttcggcattattcataccgatatagtactcccctgcaagcaaattggaaaaatcgtcatcagatacgctatccaaacacttcaacatcagacgaggtgaataatcgtaaaatcccgcctttgaatagatagcttccagttctttggatatagtatgcagtaacttcttatcttccaagcgggaagccacctcaatagcctgctcataataacaggctatgctatcggaatgatgcaacaccaagttcgtacgccctatattacgcaatgccaatgccaaccggatattttctcccgtcaatgcataaatcgacgcactttgccgaaataaatcgagtgcatcataataaagttcacgatataaataaacaattccgagacgatcactagtagctgcttccaacaattgttctcccgtttgcttagctaattccaacgaacgataatagaaggctattgaattttcctcattaccaacctgacggcaactgtcacccttctgtaacagagaggctatcttttccctctctacttcaacagatgatgactcttggcaagaaacaaagagtaatgtgataagcaagtaatatataataaagatgattcgcatagtagttggtgtttgaaatagaataaggcaaagataggcagcagcagaaaagaatccaaatatttggaatggacaaatacatggcaaatacattactgattatcaacataataaaaatccacatcacccgcaaagcagaaatgacgtggacattatatatgatttaataacaactaaaacaactattattccggcacttcatatctttttcctgtctgcttcacatattcttccagaaattctttcggataccccggacgaataacaccggcaggctgtccgatagaattacgttcaaacttaccgtcctttactcgtttcactactccgtcgttatacttcacaatcaggaatgtgcctaattgtttccaagtatcgaaagtactctgagccgtcatattggtataattcgtcaaaaattcaactgcagcagacttatctttagccaaaagtctggcagccatttcttctatgccctcctgagcattattgaaagtcgtttccagttctttttgagttgcacgtacatcatcaatcatcaaactgtaacggggataaaccatattagacacccaattgaaaatccagaaagccgaattccatgagaaagtgatataatcagctccgtccacacgtgtgtaacataccggagctttagttgcacagcaataaacaggtgtgaacaccgccatattcgcatcatctactccaaaccaaagcacaccacctatcggatcgggtttattggcacgcatctgcgccacaaatacaaagccgctttgttgagtggaaatcggacgttcgttgaaatattcccggtcgcctactttgaaattcagaggagaaagacgatagggagtcttgtaaagacctgccccgaaatcattggaaatatcgagaggcgtaccttcataatggtcacgcatcatgtcttttacatcctgcacggaaagcttatgcttcggcttcacaaaaagaggcattggggtattagtctttccttctatataaggaagataatctttaccgttatctgtaaatttattgaaatagctccacacacgagcttcacagaaacgacgggctccgaaatccaacggtgcatacgcattggcaaagctgaaatccttattcacaccactgaaatagcctttctcacgggcaaaagatacgacatccggcgagtatatacaattctccttgtcgttcatatcgaactgatgaatgcgtgattggttggcgtgagccgagatacagtcatccggcacacgtacagctacccatactgctccacggataccgggacctttaccaatcatttccataatccaaatttcattcgggtcggcaatggtaaaagattccccttcactgtaataaccgtattgctgtaccaaatcagtcatcaccttaatcgcttcgcgagctgtacgcgaacgttgcagaccaatataaatcagacttccatagtcgataattcctgtagaatcagccaattcagggcgtccgccaaaagttgtctcaccaatagtaacttgatattcattcatattacccactacattgtaagtctggcgtgcctgttcgatttctcccaaatatttaccggtatcccattcgtacactttcaacatggttcctttaggatatgtagcagcaggatagtgataaagttctccaaacaggccatacgagtcggcagaataggaaacgatagtcgaaccatcagtcgatgcattcttgccgacaattaaattagtacaggcgaaagtatccgccactgccgccaggaatagagcagcacaaaaaataagtcttttcttcatatatgattttcttttaataatttaccagataaaactttcacgggatacggtttcatttccgcaataatcagttaccgtaaattcaacgatatgttttccacctttcttcacacgcttcggatcaagtacacattcccaatacgatttcacaatattcggtcgtccgaaaagtgcatattcgccgtcaatcgttccacggtaggatgcaatacccgttcctttgtccttcaaacgatagataatctttccggttcttccccattgcttcttattaacaggaataatttcaggcggaattgtgtcaatggcaaccgtataagttcccaattcacgaatagatgccttcatgtatccgtcttcatactttccaccgacactatattttcctcctctcggggtgacacggactacataatattttgtagtatcagttataggctttctacgtaagccaatacgcaattcacagcttgcatgaagcggaatcggtttgtcatttaactgatatgtaaacgcaacagcaccgctatcagcttttacttgataattaaggggggcatcgtcatataacattcctttgggaacaaccagattcaaacccggctcttgcagatagtttaccttatcccacgcaaagaaatacttttcgcgatgttgcaatggctcaagcggttgttttcgccccctaaccgtgaaactgtatttagaagtattgccaaaaacgtccttcagagtatacaagaagcgataatcgcgttcttcatcaatagtcaccaaaccacgattagtgttcgatgcctttaataaacgtaatgtatttcccggctcgatgaaggatttcatatattgcccgcaagtccaagagttaatcatccggttttcttcttgtgagaaacgatcgacagtactgcggaatacttctttctcatctactgtaagcactacagaatacactccgtaatgattgctcactccatccatatagtcatacgccttgatgcctgtacctatcacaccccatgcttccaccggacgtccggtgttcggaagaatcattttattttcttgcttaccatccactactcctttaccaagttgaggaaaaaacattatgccgtccgctttcggagcacgcgtatcttttattttcgttttgaaaaaaggcatgggatctacataatctcccgtctccgtttcaaaaacatccaaatgaagatgcggtccgaatgaatagccggtatttccactccatgctatttgttgtcccgcttttactggatactcatccggttcggggataatctctacttcccagttttcattttcatattgcagtttttccaccctttcggcaataggggaaataaaaccgctcaaatgacgattgatagtagaataaccgttatgatagcagacatcaagtacatagcccgaaccattcgtcacacggatacgtgaaatatagccttctgccaatgcacgaacaggtttaccgattactcctcccgttttaaaatccaatccgccgtgaaagtgattagaacggatttctccgaagtttccgctcaatgtaagaggaaagtcaaaaggtggtacaaaggtggcttgcttcttttcttgcccatatcctccgatgcagcaagccaacatcaaagtggtgatatatcgtctcatcattccattcactttttactcccgcaaatgtacactattcccactaaactacgaaatatccgaaaggaatgataagcggaaatactagttaataatcctttttattattatattcattgcaaatctgtagcaattatgttatttatattagtacttttgtgcccgattttaataataattaaacataaaaggactcaatgagaatgtatgtaaaggtaatggcagcggtcattgcatgtatattgatgagtggagaaacacactcaacatctgcaactatccctgctacagaaaatcagagttggtttaaaaagagaaagaagaaaccagagcaagaggagaaaaccaaaagcgactacgaaaagcttgtggaaggtagcaaaattaccaaaggaatgtttgctgttcatcaaaaaaagaacgattattattttgaaattcctacatcacttttagggcgtgatttattaattgtcaataaactgcaacgggtacctgccgaactgaatgacgcaggagtgaaccgcggagtgaactacgagaaccaaatggttagtatggaatgggacaaggcaaccggcaaactgatgtttcgccaacaacgcccattaccactggctcctcaaacggacgctatcttccgttcggtaaaggacaattttatctcgccactgattgccgctttcaaaatagaagctatcaatcaggactccactgcattggtgatcaaagtgaatgatatttacgatggtacggaaaccagtatcaataatgtttttacaaacattaatttagggacttccgctatcaagaacttatcacgtattttgtcgatcaaatctttccctaacaacgttgtagcaacttctgagctgaccactaaagtgacagaaggaacgacaagcgtatatgtgacggtggaagttagttcctctattcttttattaccggaaaaaccgatgacaggacgtttcgacaatcagaaagtcggctacttcaccaatccgttattaagtttcagtgacgcacaacaaggaacggataagaaacaatatattacccgttggcgtatggaacccaaaccagaagaccgggaagcatatctaaaaggtcagacagtagaacctattaagccaattgtgttctacatcgataattcgactccttatcaatggcggtcatacataaagaaaggaatagaagactggcagactgctttcgaaaaagccggtttcaaaaatgcaattatcgctaaagaaatcacagacagtatgcatgtagacatggatgacgtcaattactcggtactgacttatgctgcatcagaaaagaaaaacgcaatgggaccttccctactcgaccctcgttcgggagaaattctggaagcagatatcatgtggtggcacaatgtactttctatggtacgtgaatggattactgttcagacaggaactgtttgtccggaagctcgcagcgtacaattacctgattcgttaatgggggatgccattcgttttgttgcttgccatgaggtaggtcactcactaggattacgtcacaacatgatgggttcatgggcattcccaacagactcattgcgttctgcggcattcacttcccgaatgaattcgactgcttcgtctattatggattatgcgcgtttcaattatatcgcccaaccgggagacggtgtaaaagtactgtccccgcatatcggtccttatgatatgtttgctatcgaatatggatatcgctggtatggcaagaatactccggaagaagaaaaggatattcttttcgatttcttgagtaaacatacagaccgtctttacaaatatagtgaggcacaagatgtacgtgacgccgtagacccgcgtgcccagaacgaagatttgggagacgacccggttcgttcgtcacaacttggcattgctaacttgaaacgtatcgttccgcaaattcttcagtggactactaccggagaaaagggacagacttatgaagaagcgtcacgcctctactatgccgtcatcaaccaatggaacaattatctatatcatgtacttgccaatatcggcggtatttatattgaaaacaccatagtaggcgacggagtgaaaacctacacatttgttgaaaaagaaaagcaacaggcagccctgaaattcctaatggatgaagtcctgacatatcctaaatggttatttgatacggaagtcgggcaatatacttatctgctccgcaacactccgatcggaaagcaagaaaatgcacccactcaaatccttaagaatgcacaagcctatattctttgggatttactaggcaatacccgcctaatgcgtatgattgagaatgaatccgtcaacggtaagaaagcattcacggtagttgaactaatggacggactccacaaaaatattttcggtattactgaacgcggaggtatccctaacgttatggaacgctctttgcagaaaaactttctggatgcattacttaccgctgccgcagagcccgaagctgtaaaaatcaacaagaagatcgccaacgaacattttttgcttgaccataccactcctttctgtagctgctatgctgccgaacaacgtgcacttcgtcaagaagaccgcatgggtgctccacgtgtactcaatttttacggaagtcaacttaaccgcatttcagatgccatttctgtaaaacgtggtgaattattgcgtatcaagaagttattgcaaaatcgtctggggacttccgataccgctacacgttatcattatgaagatatgattttacgtattaataccgctttgggaatcaagtaaaacaaacctgttaattaaactatcttacaattaatgagaatcaaatttttgtgcattattatatgcttatttgtgaatgcactggtttttgccagtgctaccaaccacacgataactggtgttgtcatttctggtgaagacaatgaacctctaattggtgcttctgtatatgttcacgccgatgatctgaaaaaagccggagtatcacaaacctctttgggtactatcactgatattgacggtaagttttctatttccgttccggaaaaagtgactcgtattcattgcagctatattgggttcgaagaacaagcgattatattgcaaggaaataaaaaaaactaccgtattgtactacaaccttcggcacatgctctggcggatgtggtagtaacgggataccagacattagaacgtcgaaaattaacggcagctattgcaaaggtagaattatctgatgccatgatcggagcgaataaaagtatcgaccaagcactaaccggacaaatcgccggcgtagccgtcacaacaacttcaggtgcaccaggagctccggcacgtatccgtattcggggaacggcttctttaaatggaacccaggacccgttatgggtattagacggtatgcccttagaaggaacagatattcctaaattagatgatgcaacagataatgatatcgtcaatatgcaacaatcatctattgcaggattaagtccaaatgacatagaaagtatcactatcttgaaagacgctgccgctactgcaatttatggcgcacgtgctgctaatggtgtcatcgtagttacaaccaaacgtggaagaacaggaaaaccaatcattaatttcaacacgaaattaacttatactcctaatctagacacttcccgtctgaatttgttaaattcacaagaaaaagtagatctagaactacaattattaaaaaacaatcaaagcatatatcccaacaaaggtggcgttgcaaccattttgaataaatacaatttaatgaatcaatatctgcaaaatggttgggagggattatcccccgaagctcagaatgctatcaatcaattaaaaacgatgcagactgattggaatgatatattatttagagatgctttcacacaagaatacaatataagtatttcaggaggcacagagaaaacaacgtattacaactcattaggctactccaaagaaaatggtaatgtaccgggagttagtatgacacgtttcaatctgacaagtaagacttcttatcaaatcaacaaaatattaaaaattggtgtctctattttcgccaacagacgaaagaatcaaaactttgtatctgataagtatggttattccaatcctgtattctactctcgtacggccaatccctatttttatccgtatgatgcagagcacaactaccaatatgattatgatatcctccctggagatgaacctgacttaaaacgtggatttaatatctttgaagaacgagaaaatacagataatgaaacaatcatttcttcattcaattcaatcttcgacacagaactacgttttaacgatcaatggaaactcagttctcaagttggtattcaatgggatcaatcttctcaggaacaatatgtaggagaaaatacattcaatatgcgtaacatacgcgaagatagtagctatgacgaaaatcaatacattgttcccaaaggaggaatgcatactgtaaataatgctacgacttctcaaattacatggaaagtacaaggagaatacaaaaatacattcaatgatatccatgatattcaaataatggcaggttctgaaataagaaagaactggtataacactcaatttacagccggatatggttatgatcccaaaacattgacaacaaagccactgaatatcagaaatgacaaggatgcagagaaatataaactacatactaaaacttatcaagaaaatgcttttgcgtccttctatactacaggttcatattcattcatgagccgctatacgatagggggaagtgtacgtatggatggctctgaccttttcggagtagataagaaatatcgctatttaccaatttattcaattagtggtatgtggcgcgcctccaatgaaccttttatacaacgatacaaatggattgataacctggcaattcgtctttcttacggtctgcaaggaaatatcgataaaactacttcaccattcctagtaggatcctatgacaatgtaggactcttacccggatatgacgaagaacaaactatccaaatagaaggtgctcccaacagcaaattacgttgggaaaaaactgcttcatataaccttggattagatttctccgtattaaaccaggcaatcaatttaagtgtagactattactatagaaaaggaacggacctgattgggaaaaaacttctgccgttagaaaacggatttgaaacaatgacgattaattgggccagcatggagaataaaggagtagaaataaatctgcaaacacgcaatattaccaccaaaaaattttcatggtacacaacattcaattttgcatataaccaaaataaagtactgaaaattaatactccggattcacaagaaactcccagtcttgaaggttatcctgtcggagctatttttgctttgaagactgatggcattgattctgaaaccggacgtattcgcgtaaaggcaaagaacggaaaaagcatgtttcttgaagatttatataaagtagcaatagacgaatggggaatcggaatctatactcctcaagtatcaactcttgaagaaagagaattctatagctatataggaacatccgacgctccatataccggaggatttatgaatacctttaattataagagttgggaattgaacttgaacttctcctataattttggggcttatgtaaaaacaacaccttcttacagtctgacaaaatttgatgcgagccgcaataccaatcgggatattctggatagatggactcctgaaaacaaaaacggaaaattccccgccatattgacagctgcttctaatcctgcagaatatagtttgttgtttgatcaaccacgtatttacaactccttagatatttgggtcaaaaagttaaattatatacgtttgcaaaatatacgtttagcttaccagattccttcaaagttactaaacagaataaacatcaacggagcaaccgtcgctgtagaggcacgtaacttatttgtattcggttccagctacaagaattatctggaccctgaatcaatgggaaatctgtatgcaactcccattgcaaaatcagtgacattcaatttaagcctaaacttctaaaaaagaataagcatgactaagaaattatatattacttttgcattattgggaagcctattaataacttcctgtgacagttttttagatatccaacctataggaaaagtaattccaaatactctatcagaatatcgggcattgctaacagaagcatattcccagcctctcttcgacagaggagttactgaatttcgtaccgatgaggtgacaatcagagataatgaatatgatcaaaactattattcggaaattgagaaatggaacgactctaatcctattcccggtacacgtgaatttgcttggagcaattattatagcattatctattatgccaacgccataatagataatagagataaaataacagaaggaactcaggaagacatcgatcaacttgtaggagaagcatatctacttagaggatatatgcattttctattagtgaatctttacggacaaccatatacaaaagatggagctccggaaactaaagcaattccaataaagttagatattgatttggaaaaaactccgtcccgtaatactgttagtgaagtatatacagcgattttaaatgatattgaatcagctcgtaaattgatccattgcaaagagtgggagaaacaatactcatatcgtttttcaactatatcggtagatgctatggaatcacgcgtatatttatatatgggaaaatggcaagaaacttataatagtgcagaaaaggtcttatcacaaaaatcatcattagaagattttaataaagagaattctaaaattcccaatgattttcaatcaacagaggtcatcacagcctatgaatatgtatgtaaagatgtcgataaagcatttagagccacacctatgctgaaagaaaaatatgacagaaatgatttacgccctaacaaatactttgacgtagcagacaaaaatggtaattttcctgttctaaaatgcggttctacgcaattctcatgttctttccgcacgggagaaatttatctgaatgcagcagaagccgctgctcacttaaataagctctcggaggctcgtggtcgattattaaagcttatagaaaaccgatataccccggaaggttatacactgaaaaaaaatgaaatagaagtaatgtcccaagaagcgcttcttgctgaaattcaagaagaacgtactaaagaactcgctttcgaaggtcatcgttggtttgatttacgacgcactacccgcccacgcatcgaaaaagttatcgatggtaaaacgtatattttagagaaagacgatgcacgctatacattgcgtattccacaggctgctattgatgctaatccagaattacagcattaataatcaagactaagacaagaaagtacttcctttcagatatgatcttgcagaaccctttaataataacataacacgagtgggtctctatggaaaaagcatgaaaatcaaaaataggacaatgaatgtctataaacaaccactctatgcactacttattcatctcaacgcagacgacattctgttctaaaacatgaggttgtgtctaacttttggggtgcacttcaaaatgccggcacaacctcattaaactacaaataatcttttttcgctgcccgttgacaagcttccactaattctttcatgacctccgccacaggctgctgacgggaaattatcgacgatacttgtcctatttccagttctccttcttcaagatctccttcaaagatgccttttttggcacgcccccgtcccaataaagctcttaattcttccatggaagctccactatcttcggccttctctacagcttcccggaaactatttttcacaagacgagtcggagctaattttttcaacagcaacttagtatccccctcacccagactcaaacaatattccttgaatagcggacttgcagaactctcatcagtcaatgcaaaacgagttcctatctgaacaccttcagcccctaataccatagcagccagtattccttctcccgtagcgatacctcctgctgcaatcaaaggtaaagtcgttgcttcacgtacagcaggaatcaaacaaaaagtagtagtttcctcacgcccgttatgtccgccggcttcgaaaccttccgctaccactgcatctaccccggcctcctcacacttcacagcaaaacgggaagaagaaacgatatgaacaaccgtaattccacgctctttcaaccatcctgtccatgttttcggattcccggcagaagtaaaaataatcttcactccctcttctaccacaatattcatgatttcttctatctgcggatacatcaaaggaatgttcacaccaaaaggaaactctgtagctacacggcatttgcgaatatgctcgcgtaaaatctccggatgcatagaacctgcaccaatcagtcccaaaccaccagcgttactcactgcggaagcaagcctccaaccactgcaccataccattccaccttgaacaatagggtattgaatccccagaagagaagtaattctattcataattaataatttatcaatgtgctaatttactaatataccggctagaataaccagctaaattactaatgcgctaatacaacaatatacaaatatataaattattcaattacaaacgttccctagtcagtatattgtcgtatcgcgacattagcacatttatataaacaccctcaacggataatctgttcaataggtttattaatcaacaccgtggtagaatccccataagctctcaaaacttccagcgtacgttcacgacgatctcttcctttcttatcccagaagttctttgtaaagacagccatcagatcaagtcctccaatagttcctccattgatatacactccgctaccaccaaacaaaggaataggactatccgtcaccaccgaattcaccatcatcccattggcacgttcacttaactgacggaaccgtactccgctcgcctgtatttcctctaaagacttccgtataccttttgccatcggattccgtgcccagttggtatacgatctttggtgtcgaatctcatagaaaggatctccccgccatgtattcttatccacccttatctttttttgataaaccggatcccaattaaaacgggtattagccttatatggcatcaaagaaagaactacttttggtttaggcaatgcttcgggaagcgattcgtcaggcagcatccagcttttctcctccgacatccggggagtacccaccgcactgccgaaatcaatctgcctaactgctttcggattcagcttcaactcctcactgctctccaatagcttctgcaatttgagtgaatcctgtacagaccactgggcatagcataccactgtcagcagcagtgatactgccgatataaataaacgtttcctcatttttattgtttttttatttcccgaagattctcctcttttttaccaccagcgataccctgtaccacaaagcggttcatcgtaacacgggtcaatcgtccaccgcgtcttcgggtattgtctttcttcccaccaacgacggtagcaagcggcagcatcaagtacttcttcgtctgtcaggaaatagagtgcttcataattctcggcattagccaacaccattttgcaacccaacgacggaggtgtaccttgacgaatagattcaatcacccaaagcatacactcacctaaacggattttaccattattcatattataaaccgacgggaaagaaggaataatagtcagatcttccgcatagttcagaagttcgggaatatcctcttccgtaaaatgagggacctccaccactcctttgtcattcttcatcttatacgtacccgtcttcaattgcttcacaaaaagggtaacatccggattgttataatccatttcttcgctgccgcacccagtaaaggatacaatcaggcaaatagccaacagcattacaagtgtttttttcattttcttcaaggattaatacgtcatgcgaagtccgcaaagcaaattaaaattagtcggccgtttcgtgcgtaccgtagctagtttcgaatcagttttgaaatgatgagaaacacccggttcggcaaaaagcgcgaggcgatcatttatcttataattaattccaataccagcggtcacagccaattggacaggttcttctttgaaactgttgtccggtgcaccggcaatgcatttatctataattcctcctactgtagcgtaaaggtcaactttttttgtatccaacaatgtcacgttaattttgacgggaataccaagataatgtaaatgctgccctgccgagcgaagatttgaataaagcaatccggtttcaatacccagataatcatttaatttccgttctacggttacacctacagaaaccggcattttatagacgccatcctctgctggaagtgccgtaccaacttgggctttcatcgcccagcggtttttctttgtagagatcttccggactactgattcgcccgtttcatattgttcttttcgcgaatccgatgattccgtattaccattcgttgcctgccaatagccattatggccttggtttccatatcggtttccatttccggtggaagtcgtagccgagaaagagaacgacatagagaaggtaatggaaagcgaatcttcttctgtgtattgagacaacattccataagatttaggagccggtttcggcaacactggttctaccggcaacggtagttgattgacacgtattccatctccgtccaactgccctccgttcgccacggctatcttggtaaatgcttcttccatttcctcttttggagaaagatataagaaggtagccgatgaagccgccaagacaagcaacacagatgccgcagctgctacacggaagagtagtaaccgacgacgttgctggcaagccacaggaatctcctgtgagagttcttcccagaagccgtcccggacattcatcccggcatcagcgagacgagtgcgaaacagatcggttatttcatcattttctttcttcatgatttctatactctttaattctttttgctaataaatacttggcccggtgtaactgcgaagtagacgagtgctctttaatatgaagcatcttggctatctccttgtgtgacttctcttcaaacacataaaggttgaaaacggttcggcatccatccggtaattcggcaataaaagccattaattgttcctctgagattccagcccctcctcccgagtccgatatatcaggtatgtcgggaagctcatcttcatgcaccaccaactgactgactcgtttctcacgccgcaaataatcgagcgactgggtgaccattacccgggtaatccatgtgctaagcgaagattcgccccgaaacgagaagttggtaaaaatcttaatgaaaccatcatgcaatacatcgtgcgctgcatccatatcgcccgtatagcggaaacataccgccagcatctgtttggaatagagggtgtaaagttccttccgggctgaatcctttcctgcccgacagccctttatcagttctatctcgttttccaagtcaattaccttttttaaaaatcgaacgtatgtctgcgtcgtttgtccattagacgcaagaatttgaggaatgctgcaatgaatattgctaaaagaagttaaagagacgataaataataaatggagaaaaagaaaaggtgaacgataaacggtaaacaatgaacagcactatacactaccgtgctgcaaagtattcaccattgactgtttatcgttcaccgtttactgtttatcgtttaccgcttataatcagcatgccttgaaactcatatccagccctttcaccgaatgagtcaaagctcctaccgaaataaagtctacgccacattcggcatagtctcgaagagtatcaaaagtaataccgccagaagattcggtctcatatttacctgctaccatctctactgcctttttcgtcatttcaggagtgaagttatcaaacataatacggtccacaccacccaagtcgagaacttgttgcagttcatcaaagttccgaacttcaatttcgattttcagatctttgcccttttctttacaatattctttggcacgggtaatagctttatcaatacctccggcaaaatccacgtgattatctttcaggagaatcatgtcgaaaagtccgatacgatgatttacaccaccgccaatctttactgccattttttcgaggatacgcattccgggagttgtcttacgcgtatctaacacatgagtacgggtaccttccaatttcttagcgtatttgcgggtcattgtcgctataccactcatacgttgcatcacgttcagcatcaggcgttcagtctgaagtagtgactgcacttttccttctaccaacattgccacatcacccggttccacttccgttccatcgttgataaatacctcgactttcatcgtaggatcgaaacgattgaaaatttctttggctacttctatacctgccagcacaccggcctctttgataagcaattttgattttcccatagcagtagcgggaatacatgaaagggtggtatgatccccatcccctatatcttctgcaaaagcaagatcgatcagcttgtcgatcagttctttttccttattcattgattttgtcaattcttatttgatgtattaaatattgattctccactttcttcaggaagcagtttacacggaagtttcctctggtagtagccaatgtaccaataatgaaactcgattcatcccgttttccctgatgatttacgttaaatccgctgactttattctccgtaaagaaatcttgcatcatagctgttgctttctgcttgtcaacgtttgtcgagcgaccctggagcaccaagtttaccttgccccccatatacttactcagctcttgcgaacttcctcttttaaatgccgtaatcactcctgccggtatctcttgcgccataagcaacgagatagaaagaagcaaagcggtcattcctacaagcactcgttttttcataaatacaagctttaaagttgaagtttaaagccttaaactttcaactaatgataggcaaaggtaatcattaattgcagaataacataaaaaatgcctatttttgtgcattaatcagaataacagacgtatgaaaacaatcctgctcgtcgttggacgaaccgtagaacaacactatataactgccattaatgactatattcagcgcaccaaacgctatattacttttgatatggaagtaatccccgaactaaaaaacacaaaaagcctttcaatggaagtgcagaaagaaaaagaaggagaactgatattgaaatcactccaaccgggagacgtaatcgtattacttgatgaacatggaaaagagatgcgttctctcgaatttgccgattatatgaaacgaaaaatgaacacagtcaacaagcggctagttttcattatcggaggcccttatggattttcagaaaaggtatatcaagcagcaaacgaaaaaatttcaatgtcgaaaatgactttttcgcatcagatgatccgattaatattcgtggagcagatttatcgggcaatgacgatactgaatggcggaccgtatcatcatgagtaatacttaacgaacaaatcacagaggaatgaagtactaccctctttcatgattttcctgtatacatacaggaatattcatggtttaaaatactgagctaagataatatgaaactgcgctctactcaacaataattattcccaaagagagacatttgccgaatatcatatagtttgtaaatatgagggaatgagtaatttagtatgtatttgttatatatggaagaagtagttagtttatttagttcttgcagaacttattacatgt

SEQ ID NO: 3042 - DNA, 30799 bp, Unknown
  gut microbiota DNA sequence
ttatatttataataggcaacaaattttatgcgcaaagataactatttatttgaataacacgcaagaatgcatattattttctttatgaattaaaaaaaatattttcgccttgtgtcattcccgaatcccccaataagcattttattgtgattagtatataaaataggtataatatactacatggattattaagataattaattgaatatcaatacttaaggagcttatctcggtagaacaatagtaccataatcttctatccgaccgcttcacaagggtttctcatgcaaccgtgtactatcggagtcatcctaaaaaacttgataatgaggttgtagacatgtaataagttctgcaagaacatattcaacctttaactcaatctacaattaaccaaatgttaaatctaaaagaaaaagcatgagacaatttcattttttttgtaaacaacggtatttgaagtatactgttctgtcattgcttctttgtccgctttcttcctctgcagcagaggaatggaaggatgtgaaaggagaatctactactaaaattgttgaatcgactcaacagaaaaagcaaaagcgtgttattaccggtgtagtaagagatggcgataccaatgaacctattattggagcttctgtttggctaaaaaacagttcggtaggtgctgtgaccgatatagacggtaaatattctatcacgatagaaggtgtaggtggagtacttgaattctcttatatcggtatgaagaagcaggaaattgcaatcatagaccaaaagagtatcaatgtcactcttcaacccgatactgaagtattggacgaagttgttgttgtcggatatggtagccagaaaaaagaaagtgttgttggggctatctcaacgctagacatcaaaaaactgaaagttcccggagcatcaatttcaaatgtgttggcaggtcagttatccggtgttgtggctatgacccgttcgggagagcccggcaaaaatagtgccgcggatttctacattcgtggtgtatcttcctttaagggaacttccactccgttagtgctggtagatggcatcgaacgtgatcttgatctggtagatacagacgatatcgcttcattctccattctgaaagatgcttcggcctctgccgtttatggtgtacgaggtgccaacggagtaatcttgattactactaaaaagggagaagaaggtaagccggcaatcaatgtacgcacagagtttggttttaccagtcctaccaaacgtccgaagatgctcgactcagcaagatgggcggaactttacaatgaagcttcttcaaccaagtattattcggacgaagtcatgcagaaatatagagaacatagtgaccccgatctctacccggatgtagactggtttgatgctttgttcgacgacatggctgaaaatcaacgagtaaatctaagtatcaccggtggtggagacatcgtgaaatattatgtttcaggctctttctataatgaaagctctatctacaaaaatgcaggaaacatatatggatacgattcatctattaattacaacaaattcaacttccgtgccaatatagacctcaacctgaccaaaagcacagtgctgaatgtcaatctggctaatatctatgaaaaatcgttcggtcccggatttggtgacaacgataacgacatttggggatatacgttcaatgcttcccctaatgcattcccgatagaatactctgatggaaaactttcaggaccttctaccgattccggtttcaacccatggaatatgctggttcactccggataccgtgaacagttctggaactcggcacaagcacttgtcggcgttacgcaagatatcggtaaactttggaaaccgttggagggattaactgccaacttgaaattctcatgggatgcgtggaacactacattgcaacgccgctccaaaacaccgactttctatcatgcccgtgggagagacgaccaaggcaatctgatttatgacgataataatggtgacggtgaatgggaccccgtacataccggaagtgagtctttgggattcgcaatcggacgtagcggaacgatgacacgttatttggaaggctcattgaactacaaccgtttgtttgcagaaaaacatcgtgtaggcgcattgttactatacaatcagaaaatacatactaacacacaggccggtagcggagacgctgcacttccttataaaaaccaaggtttggcaggacgtgttacttatgcattcaaagatacatattttgctgaagtaaatgtcggttataacggttccgaaaactttgcacgcggacatcgttttggctttttccctgcagcagctatcggttggatgatgtctaacgagaagtggtttgaacctataactaacactgttgatatgttaaagttaaaagcttcttacggtaaagtaggtaatgatgacatcggcggacagagaagatgggtatatgaatcttctattgtaacaggaggaaactggcaatacggtcaaagtgccaaccaaggaggtgatggtattcgtattggtgaagttgaaaacctgaacgcatcttgggaagaagctctgaaattgaacgtcggtatcgaattctctttattcaacaaggttaaagtacaggccgattacttccgtgaagaacgtaccggaatcttcctgcaacgtgccggattgcctgccattgtcggtatttccactatcccttatgtcaatatcggtgaaacactgaaccagggtttcgatagtaatatcgaatactcacagaagataggtaatgtttatgtaacggcaagaggtaactttacatataatcgtaacaaattgaagaacaacgacgaaccagactgggaatataaataccaaaacagaataggcaaaccttttggttcaggtggttccatgcagcctttcggactcgtagccttagggttattccagagtcaggaagaaatagacaacagccctgtacaaagtttcggagaataccgtgtaggtgatattaaatatcaggatatcaatggtgacggagttatcaactctcaagaccaaatcgctatcggatatactaacttaccggaaatcatgtacggtttcggcgctacggcacaatggaagaactgggatttcaatgtattctttcaaggagcggctcgcacaagtttcttcttaagcggatcatcagttaagagtcttttctcttcaggaaacttggaacgttcggctgtgaacgaaaatatatacaacaatgtatggatgtccactaatacccccgaacagaatgcaaatgtactctacccgcgcctcagcaatggtagcggaggtgccggagcatctaacaacactcaaacttccacatggtggcaacgcaacggttctttcatacgattgaagaatatggagattggttatacacttcccaaatcgttgacaagtaaaacattcattaagtctttccgcttttatgtgtcgggaagtaacctgctcacatttgctccattcgatatgtgggatcctgaaaaaggtggaggagaaggttccggctatccgttgaatcgagtgatcactatcggcttcaatgctaatttctaaatcttataactgtataacttatgaaacttcaaataaaatcactttatctgttatgcttcgctaccggcgcgatgttgttatcttcatgtgaagatttcctcgacaggcaagaagacgaaaaactgactttcgaaaaaatctgggagtcaagaaatacgatcaagcagtattggctcaatgctatgtcatttcttcctaactacaatggaggattcattggagataatgagccctatttgggagcatcggacgaatgtaccattacttatgaccgtggttaccgttctatgaacttcggatcatggaatgcctcaaatgtaccttattacaaaatggacaaatactataaaggtatccgtgaatgtaatattttcatgcagaatgtatataaatgctcagaccctctggctacccaggaacaacttgacgaatggtattggcaggcgcgctttgcccgtgcctactactattttagtatgatgtgcgattatggacctattttcctgattggagacgaattactggactttgcagcttctacagaagaattataccgtcctcgtaacacatgggaagagtgtgtaaattatgtagtcagtgaacttactgcatgtgccgaaagtagtgctgtacctgttcagaaggggctgtcgaccagtaaatacggtttagcgactaaaggtacctgttatgcagtcatttcacgtctgaaactttattcggcacgcgacttgttcaacggtaatgctctatatcgtacggtaaagaacccagtaacagacaagttccccgaactttcgggagtggatcttttcccgcaaacatacgatgccaataaatggttggaagcagcaaaggctgctaaagtcttgttagacgatactgattacgaactttatcgtgcaggtaacggtgatccgtatgaagattattatggtatcacccatgtgaactggaatagtgaattgatctggacagaccgttacaatagcggatatagttggggagtaaatacagctcccaccggattacccggtactgcatacggtggtgtaggtcctacacagcaacaggtagatgcttatgcgatgaacaacggacgctatcctattatagggtatgaagcatcaggtgatccgataatagacaatgcttcaggatacagcaaggaagaagaactgcaaaaatcagactgggaatatccggcaaaaggatggagcaactttaagaactacaatatcactgctcctaacatgtataaagatcgtgaacctcgtttttatatcactgttttctttggaggtaactattggttgcatggtgctggcagcacaatgatctcttttgccaaaggaggtaatggtaacaagagccacgactatcctaagagtggttacctgtgcaatcgtttttatgaccatacactgaactccggtgatggacaatggggtaatctgacattcccggtattccgtctcggagagatgtatctgaacttcatcgaatctgttctggaatgtaagaagaggaatgttgctttgccggcaggatatgaagaactggcaatggaaaaatgggcggatttgcgcgaccgtgcgggattgactccgattacaagtgtatatcccaatgcttccgtggacgaactgattgaactttgtcgtaaagaacgtcgtgtggaactggcatttgaaagacatcgctatttcgacacacgtacttggatgattgcggaacaaacggataatggtccgatgtatggtatggatgcaacctgtccgctggaaggtaatgatacgaaagtaactcctgacggattttggaaaagaaccgtatttgaaacacgcgtgtttaaatccaaccactatctctatccgttctctcagcgtgaattggatcgtaataaattactgaccagaaactatggatggtagtgagaaatacacataaaaccactttattaataaaaagaaaatatttatgagaaaaaatatattattagtgtcgttcgtatctgccttccttttaacgcagactgcgtgcgaagatggcaaggatgaatttctggatgatttcagtactatactttatttcagaaatagtggcgaaatacctgtaagtgtatataacacaggggaagatgccaactaccaggttgtgataaacaagggaggctcagaactcaacgcagtgacggaagtaagtataggaacgttggatgatgctgcattggctatatataatgcagaacagggagtaaaatacaaagccattcccaccacttgctatgaattgaatggcgatagaaaatttacttttgctgcagatgaactgtataagactatggatattactctgaaaacggaactgattgacgggcttcccgccttgaatgccggtgaagagtatgtgctaccattgcaactggaaaattcacaggactctatcaattcaaaattaggaaaggtttttattaagccaaatgtacaaactccgacagttttcttttcaaagagcggctatactcaaaactttttctcggacaacggccctattaaaatgaatttcactttgccattggaaattcctattccaagcaaatgggacttctcttgtgaattaactatcgattcgaaattgttagacgaatataatgcagcaaacgaatgtgattatgcaatgttaccttctactgcttacacgctggagacaactgtcaactttaccaacgatatggaaagtgtaaaagaggcgaatattgaagtagaccgtaccggtttgagttatggtaattatgtgcttccgatttgtttgtcttcatgcactaaaccacaatttgttatcgatgcagaaagaaatacatcgttatatgctatctcttatgtacctgatgcaagcaaattaaccaaagtcgacctgaaagaaaatatgattagtattttcccggatccgacaaatgaaggttctattgctgaaatgctcgacggaaaagaagatacgtattaccatagtaactggagcggagtagcaccaatgcctcactggattcaaattgctctgccgaaagaatccacagcagtatcaataggatatcaaatacgtcataacaacaataatggcgctcctctgcagtatacacttctcggtagtccggacggtactgccttcagtaaaatcactacggttacagaaaatctaccaacggcaacaaaagcaaaatatacatcgccggtattcgtcggcaaaccatttaaatatttgcgggtacaagtagataaaacgtcagtaggaaacagttttgcatttgcagagttctggatgagcacagactgatttttctcctaagtaatattttaatgagagagagaatgttttctctctctcattaacttttatggttaactttgaataatcttttgatgatacaatactttatgaagcaatatccgttcttactatgggggattacttctctcatcttttcttctttgttcctggcttgcagcgatgatgaaccgggtgataaaactcctgtattcacaataaaagaggagtacttacaacaggatttcgatcaaaaacaatcctcgcttgtaatacctgtggaaactaatctggccgcagacgcatgggtagtctcatcaaatcaagactggtgtgtcgcagcaaaagacatgtcgggttcttcgcccgcggtaaaagtattggtacatgccaatgaagaaccggacgtacgctctgcagaaatcacattaaagagttctgtgcaaaactatactattcaagtacgtcaattagggtacggtcctgctatccttgtcaagaatcccaatccgataatcgatgcggccggcggtcctctttccattattgtcacttcgaatatagaatacacaatagagcaatcggaaaacagtgattggatcaaaactgttcctgccacccgtgcgctgacagataaagaataccaatatacggtagatgccaacccatattatgaaacacgtactgtcacattcacttacatatatactaaagacgacaagataagagcattatgctcagttacacaaaaagctaaagattccggtgtttcggatgtagagatagaaggtgatttgaaaatatctcccaatggaggaaaagatagtgagcaccagccgggacaaggaatcgagaactcttttgatggcaagtttggtggaaccccctatcattcaatttggaatcaaaaggctaattttcctgttactctcgaatatttttttgatggcacaaaagacatagattacttgatttatcacacccgtagtggaaatggtaattttggcaaattggatatttacacggcaacagaagatgctcccgaatatacgaagtacggttcattcgattttaagatgcagaatgcttcaagccgtgtggtgtttgctcagagtttgaagaaagctactaaaataaaatttgaggttcactccggctttggagactttgtaagttgtgatgaaatggagttctatcaaaagaatccggataagaaacttgacgcacaattgctgggcgtttttacagatataacttgtacggaggtgagagatgaagctaccgatgcacagataaatgcacttcccggctattttgccaatatagccattcaattaaagagaaacacatatgacgaatgggaaaagtctttccgtatacaagattatcacccttacagtaatgtagaggaatgggcagaaacactgatgaccaaacgatacagtaacttagacaatcctacgggtatttatgtggaagccggagattcggtcattgtgttggtaggtgacacccatggacagagtttgtctattcaatgcatcggtgaagaaaagtccggcgactatgtgcaaacagcagcaagcggagaaacccgtttccttgaagaaggagtcaataaacttggatttacacagcgaggaatgttgttccttatgtataacactaacttgcaggatgtcaatgcaaaacctgtgaagatacatattcctttaggtagcggatatgtcagcggattctttgatgtaaaaacggataagactaatgataaatataaagagcttataaataaagctacttataagtatttctgcatacgtggtgaaagaattatgttctacttccatcgagataagatgatgcaggctgttccctacgatatactgtctgccattaatctttgggataatatcattagttggcaacaggaactgatgggtattgatgacgtccgtccgtcacaggtcaacaatcatttgtttgccatctctccggaaggtagctatatgtgggcatcagattataggattggattcgtatatacttatctcaacaatattttgctttatgataacgtgatggctgctaaagacaatgcctggggaccggctcacgaaataggacatattcaccagcgtgctatcaactggcccggttcaacagagtcatccaataatcttttctcaaattacatactgtttaaactgggaaaatattgttcgagaggatcggaattaagcgcgttggcaaaagcccgttttgttgataaacaagcttggtggaatatgggtagcgccactcatcagaatgaggatacggaaatacatatgcgtatgaactggcaactttggaattattatcatcgttgtggctataaaacagatttctggcagaaactcttcaaactcttgcgggaagatcgtattgttgaatctaatccgggagcaggtcagttacattttgcaaagatggcaagtaaggctgccaatgagaatctgactgaattcttcaggatgtggggattcctcgaaccggtaaataatgtggagattgaacagtatggtaaatggaactacaatgtgacaccaaccatgattgccgaagcagtgagctacatgagccagtttcctgcacctaaacatgcattttattatcttgaagacagaaagaataatgatgtgggtattgaacaatatcaggtaggtgatgtaggctattatacacagttcaagaatgaccagaagattacaaagaatgtaacatatacccgttccgggcaacatattacaataagttcgggtgatgaagctgtcgcatttgaagtaaaaaaaggtagtgagataatgtatttctctaatttcttctcatttgatattccggcatccattccttggaatgatagcatgaagatatatgcagtacaggcgaatggagagagaaaagaagtgaaatccaattaaatgagttcccccaatcttacaatatccaaatgtatggttgggggaaattcatagattattctttatatattgattcttttacattatcattcaaaatcactttgttgtttttccacctcttttaacttcgagcggctgactttctgctgtcgcttcaagctgtttccgttctgtcccttaaaatcagtgctcattgctttctgtccggaaacagaattcaatcgttccagttcctttttatctgccagcaaaatatgctccgcctgataagtcggaataatcaactctgccgaaaccggagtatgtttgccttgccataccacggatgcacgcaccttgatttctcccggaacagtagaagatcttaccaatacaggcgcagttccccaacgaaccggagccggatttgtaaacgtcttactgtcagcaatcagttgtccgggaccttctatttcaaaggttatttcataattattcaatcgtttgatgttcccattatcatctgcaatagcagctattacagtcatgatatccgaaccgttcgctttcatactcaccttctcgtcatccgcccaaagtagtattttagaggggcggcgggccggcatcaccttatgtgttgcaaccacctttccggctatcagaccttctgccagaagatacgaatcggcctgtttccttcctcgcgacaattgcttatcatacataaaatcaaaaacatcgctaaaggttataacaggcgatggcattccggccttatcgattggtttatgataaatatgctgtttgccattcttgcagaaagtcagacgaacttcttcacagttactatacaccgtaacatctttcggagaaaaaggagtcatctcattcgcaatatacaccataggaccgctatctgcaatcagttccttgttttcctccgcaggacgttgcgaacagaacatataataagagaacttcggttgccggaacgcatccataattcctccataaaacggatcgggatgatatcccctctgatgatcgaaggaatgccacaaacaacctcccatgtgctgtctggaagttctatacagtacatcatagcacgtatatttataatcggggtttgcatatccctgcgcttgtatcaacatcggcacttctccccagacacggttcacacgactcggagaattatgcgaataccagtcatccacattatctccccattcccgggtaaagtaacaaacatcgggattcaaagtctccgtattaaaggcccctcctccccccattaccggatgagtgaaatggatcggaaaatgttcgtgtccacgtgccgtaacatcacagccggcataacaatatggataaggatattcctcattcagtacatctaccacatttttagcaaactctgccggataccaggtttcatttaaaatcggctcccacatccacacacaaggatgattgcggtcacggcgaaccatattacggatatcactatatactctttgggcaaaaataggttcatcattccagaattgccatcccggagtattgacaataacaaagagtcccaactcatcacacgcatccataaaagcaggatcttgcggataatgtgcgttacggataacacgcaaccctgcatcgcgtaatttctttgcatcgcgccagtgcaggttattagacaaggcattgcctatcacagcataatcctgatgtctattagccccaatcaacggatagggatacggttcaccgttcagccaaaaaccgtcttttcctttaaactccacactccggataccaatgcgacgacgatatccgtcaacaatgctgccggctttatccttcacatagacgtgcaactgatagagataaggactgtcgggcgaccaaagatgaggactgtcaaccttcatacgagaggccacttttgccgcatgctcattgcccacggacaatcgtttctctgttgaaagcacaagacggttatcacggtcatacagttcatagctgacttttccactgaagaactttcccgaagtattacgtatatgcacatccagatttaccaaagccgattgccgcgacactttatcataagaaacaaacagcccgccgcctgctacttcatcttcataattggggtcggtaataaatacgcggttgtgagctatcatccaacagtcacgatagatcccgccaaagtaagcaaaatccagtgtttcctgcgtcttaccgggaggataggaaggatcgtcactattatcagcccacaccgtgaccacattatcttcaccaaagttcagggcagaagatacatcaacaataacaggcagaaagcctccgaaatgctctttcagcagtttaccgttaacccatatttttgatttccccattatagcttcaaaatgaagaaacaattgtttgttcttccaggcttcatcaggtgtgaaatgtttccggtaccatatttcgccttggtaattaatacacccgctagcctcaaccggaagatattctatcccattaggtaaggatacgatatcccatttcttatcattgaagtttttctgttcggcaccttctatcttccctttgtagaaacgccaggcgggattcatatcatacaccgtgcgaccggtattgggcagcgaataaaaacctgccgttgaataagaaggttgaaaatcagcataagacactaacggatttgctaacaacaggcaaaccattagtactttccatagcataaaaatatgtttcataaatttaatggattaaataatttattatagaacttcatccggccaaggaacgatttacccccgtctctttaaaagaaagacgttgagcataatttttccgtaaatatacacctaattcttcagataacttctttactacatcaggtattcttctacaagattatttttccgaaatatcttctacaatattaaaccattcattaaatcatccagccttttatccatttcctcaagaagtgccgcataagcaatgccgatgtttgacaagccttttttattattcccgattcatcagccgatgttccgccatttgttcgaacttcgttcccggacgaccgtaattggcatacggatagatagagatgcctccacgcggagtaaagattcccgtgacttcgatatatttggggttcatcagtttaataaggtctttcatgatgatatttacacaatcttcatgaaaagctccatgattgcggaagctgaaaaggtagagtttcaaacttttgctttctaccatttttacttccggaatgtagctgatacgtatttcggcaaagtccggttgtccggtaatgggacacagacttgtgaactccgggcagttgaaacgtacccaatagtcattttccggatgcttattatcaaaagcttccagtacttcaggagcataatcttgcttatactcggtctttcttcccaataaggaaagttggtcttttaattcagtcattactcttgttaaactacaacctctacctagataaaaaaatgcatttcctctttcacctatcaccggacaggctcaaacatcttattaacaggcatttaagtggtgatagattcatttttcaacctatcaccgtatctatcacctatcaccttcaactcttaaccaacggctactgtatccgttccccacgggtttcagaatgtttcttggcttgaaacaaagtgtttccttataggaaacttttagtttcaagcctttggaactacagtttcaaggcggtgaaactttagtttctcactgatgaaactattgtttcaagctgctgaaactaatttaacccggcgtgttccaaacgaaacttacggccgttttataaataagaactttcttgtgacagcaggatgtgacagcagaaaatgcattttaatctctatgtagagatattattgattcttactttttaaatacttctccaatccttcccggcgcaacgtacaagccggacaatgtccgcaaccatcccccgggataccattataacacgtcaatgtctcatgacgtatcacatccagcactcccagttcatccgccaaagcccatgtctcagccttatcaatccacatcaacggagtgtggattacaaattgctcgtccatagccaagttcaacgtcacattgagagacttgataaacgcatcgcgacaatcgggatagccactgaaatctgtttgggaaactcccgttatcagatgattgatgccacgctcacgggcatagacagccgctatgctcaggaaaaacaggttgcgtcccggcacaaatgtattcggaaaactatccgcaggtttttcctgatccattaccatgctcgtatccgtcaatgagttatgtcccaggcttccgatgaaggaaacatccatcacatcaaattccacttcagctttccgggcaatctctcgcgccagctctacttccttcttatgtttctgcccatacagaaaactcaaagcatatactttcttgaagttacgttttgcccaaaacagacaagtagtcgagtcctgcccaccgctgaataccaccaatgcgctttctttattcatattcataaagttataaaagggtaaggttatgttctctatttcaattatatatctttcactttcagcacgttgtaagaaatatcggtgtcgtagacatcgctaccgtctatcttcttaatggctttcactacacggatagtcaccggaaggataataacctcatacatggatttcagtatgatctgaatacacatcatgataagcaattcccgccacgcaatgatacctccgaaagcaaccgggaagaaaatcaacgagtctgccgtctcacctgcaagggtcgacagaatggcacgtgccgagaaatgccgtccccggctggccactttcatcttactcatcacatacgcattgagaaatgaaccgaccaagaatgccatcagactggcagccacaatacggggtgccatgccgaacacaaaatcgaaatgctcctccccttcccaaaaaggagcggcagggatcgcaacagctatcagcccaagggcaacaacaaagaaattcatagcgaagccgctccaaatgataaggcgcgctttcttgaatccccaaacttcggcgatgcaatcattgataatataagaaataggaaaaaccaataatccggcggttacggtcagactaccgatctggattactttcgtttcaagaagattggctgcaatgaggcacacattaaaaagaatgcccagcagcataaagggtacagatactttctctttcataattcctgttttttacgtggtgttctagaatacacgaccgttattcacggcatcatacgtctctttttaattctttcggggtgcaaagatagaaaataaaactgaaagtatcgctttcttcttatcagattctatacgccggggaaacacggaaataaaaaacaagcctccccatcagtttcgcattcagacaggaaggctcattcactttgaccttaaaacacatcactcaattaaaaagaactgtatcaggagaagtccttcagttcttccttcaaccgcttgcggataaagaataaacggcttttcactgtccccatcggcaatcctaatttctcggcaatttctctatacttaaatccggcaacgaacatctgaaaaggaactttcatatcttcggggatcgaatgtatcacgcgatacagttgcttcatgtcataagcaaattcaaatctgtcgctgtcttcatcttctatcagactttgctgattgatagaatacgtatcatctataatattcatctcgcggacggtacggcgatagttgttgacgaaaatattgcgcataattgtaaacatccagcctttcaagttcttggcatgcgcaaatttctcgtggttatccaaagcctgcaatacgcaatcctgaactaaatcgttggcagagtcacggtccgacgttaatttatatgcaaagcgatgcagatcagattccatcgccagtattccttgagtaaattctactttttccatcgtcgtatttcttttatctaattggtacggtacaaagatccgcctttttagaatcattataaatagcaattcttccgattagtttggcaatttttcctttggcctttcaaccatttctttttttagttgttcattgggcattcacctaaaacttaacttataatgaaaacaagctttaaaatggtagctatgctactggggataggagttttccccgtctgtgcccaggcacaaaagaaagtagtcatcgaagatgaggaacccaattcgatcatgtttgtctcacgggataaagcgggcgatgaaatcatccgtatcatgaacgaccgttcgcagatgcgtttccatgacccgaacgcgcctcgcttcctgcttaccgaccaaaagggaaaattcgccctcggtatcggtggctacgttcgtgctacgggagagtatgactttaatggaatcgttgacgatgtggatttctatccggcattgatcggccgaccgggaaagggtaattttgccaaaaaccagttccaaatggatatcactacttctaccctgtttctcaaactggtaggacgcaccaaacatcttggtgatttcgtggtttataccgccggtaacttccgtggcgacggaaagaccttcgaactgcaaaatgcttatgcacagttcctcggtttcacaatcggatacagctacggctcgtttatggacctttcggccctgcctcctactatcgacttcgccggtccgaacggttcagctttctatcgtaccacgcaactaagttatatgtgcgataaactgaaaaactggaaattcggagtttctatggaaatgccttcggtagacggcacgaccaacaatgacgtagcaatcaatactcaacgaatgccggacttcgccgcttccgcacagttcaactggaacagcagcagccatattaaattaggtgcgattgtccgcaatatgacttattcgagcaatgtgcacgataaggcttactcaaagaccggattcggtctgcaagcctctacaacgtttaatatcacaaagaaattgcaggcatacggacaattcaattatggtaaagggatcggttcttatctgaatgatttaagcaatctgaatgttgaccttgttcccgaccctgacaatgaaggcaagatgcaggttcttccaatgttgggttggtatgcaggattgcagtacaacattacgccgaatgtatttgtctccggaacgtacagtttatccagactttactctgaaaacggctatcctagtgcaaaccccgattcgtatcgcaaagggcaatatcttgtagccaatgctttttggaatgtaagcggtaatcttcaagtcggtgtcgaatatttgagaggctggcgcagtgatttcagttcttcaacgagccatgcaaaccggttgaatatgctggtgcagtattctttctaagacaaaaaaataaagaaagccgcctcaagacaatgtccgagacggcttctttatatataaaggtcggattatgaaatcttagaacttgtagtctacaccaagaccgaacaccttattagtacggctgtatgtagttgatgaagctccaagagctgtttctgtcattttattatagtccttgtagtttgtccagaaataagcaacattcatcgtcaaatgcttcgtcattttgattgcggcaccaaaaccaagtgaataagaatcgcatgagaaactaatatcgctctggaaatcatctgccaatccataatctgtattttgataaccaccgctaatcgtcagttgtttagtcacatcccactctgcaccaagtagaatttcgtgtgtaccatgcttcaaagctttctgcttgtcattggccataccggcagccttatcgaagaaatgatgatattctactgttgcacgaagtgtaggaaggatttcataaccaacggcggcagtcaataaagcaggaatatcactcggcgtatttacaccgtccttataatcagccaacggatttccttcatcccccattacattccccatctgacgaacttccgctttcttggtcttattctcaagattcaagcttgtcatgaactcatatttcaaaccgatattccatttacccagtttcacatcggctccaagaataggcgtaattccccaacctgtctggtcacaatccaattcgatacctgctaattccgtacctgccggcatacccggcaagtctgctttcactttcgcagtcagaaagccttcataaccaccactgaaatagttcatacgtccaccggcaaaaacacccagccaatcgttaaccttatatgacaagcctaattgaacgccataaatgaactggcttccgtccattgcactattgattgtgtacatattaggagtaaccttgccacttgcagcttgataaatctgtcccattaccattgaatcgaacattcccaaaccgtcatcgaaagaagcctttcctcctccaccgccaacagcgaagctaccggatacagtccagtctccttttttataagcaccttggaaactaggaataaaaggagcagaagctttacccttataataacgtctgtgcccgtcttccgggaacagtggaaacgtcatatctatattacgcgtttgataagcactttgtccgttcaaagaaagataaagaccgtcgcccggcaagaaagccagaccggcaggattggaataaacaccgtcaatatcaatggaagcaccgcgtgctaacattctaaggaaagccacatgttgattagtatttgtcagaagacctccggcaaaagttggaattgaaacgattaacatcacaaatccaatcaaggaaatttttctcatctaaatcttttttaaattatttcgggcgcaaagatacgatataattgcacatagaaggtatgattgtgcatttattttcattaatccccctattttaattgaaaaaacaaacagtttctaatgaaacgatttatattcaagacataggaaaggataaacaattcaccctatttcagtgtttattatgtaagaataaaaatagaaaatattatggcctatacaattgcatttttcggcacaaagccttatgacgaatcttctttcactgataaaaacaaagagttcggatttgagatacgctactacaaaggacatctgaataaaaacaatgtattactgacacaaggggtagatgcagtttgtattttcgtcaatgatattgccgatgcggaagtactccgcatcatggcttccaacggagtaaagctactggcattgcggtgtgcaggatttaataatgtagatttaaacgctgccgcagctgccggaatcacggtggtacgtgtccccgcctattcaccctatgcggttgccgaatataccgtagctctcatgctatccctcaaccggaaaattccccgtgcctcctggcgtaccaaggacggaaacttttcccttcacggactcatggggttcgatatgcacggaaaaacagcaggcatcatcggcacgggaaagattgcaaagatcctgatccatatcctgaaagggttcggcatgaacatattggcctacgacctttatccggactataacttcgcccgcgaagaaaaaatcgtatatacttcattagacgaattataccatagttccgacatcatctccctccattgtccgcttaccgaagctaccaaatacctgattaatgactactctatcagcaaaatgaaagacggagtgatgattatcaataccggtcgcggacagttgattcataccaacgccttgattgaaggcttaaaaaacaagaaaatcggttctgcaggactggatgtgtacgaggaagaaagcgaatatttctacgaagaccagtccgaccgcatcatcgacgacgatgtgcttgcccggctgctttcattcaacaatgtcattgtgacctcccaccaagccttcttcacacacgaagcactggagaatatcgcaatgacgacattacaaaatatcagagattttatcaaccataagcctttgctaaatgaagtgaagaaataaaacctttcccccaccctctttgttcataaggcatataaacaacaagaaaaaggagaacattatgaagaaagttatacataaagcagatacaagaggacattctaaatatgagtggctggatagttaccacactttcagtttcgatgaatatttcgattccaaccgtatcaacttcggtgcacttcgtgtattgaatgacgacaaagtggcacccggagaaggattccagacgcatccgcacaagaatatggaaattgtctccattccactgaaaggacatctgcaacatggtgacagtaaaaagaacagccgcatcatcaccgtgggagaaatccaaacaatgagtgccggaacaggtatcttccacagcgaaatgaatgcaagtcccgtagaaccggtagaatttctccagatctggattatgccgagagaacggaacacacgccctgtctatcaggacttcaatatcagtgaactggaacgcccgaacgaattggcagttatcgtttcgcccgacggaagcactcccgcttcccttctgcaagatgcctggttctctatcggcaaagtagaagccggaaagaaacttggataccatacacaccaaagtcatgcgggcgtctacatctttctgattgaaggagaaatcattgtagacggtgaagtcatgaaacgccgtgacggaatggggatttatgatactaacaacttcgaactggagacattaaaagattcacatattctgttgatcgaagttcctatgtaatgaacgaacaatttaaatgccagataatcttatggtaaaaataaacattgcagatatccggcaagaatacacgaaaggcgggttgagggaaaatgaacttcccggcgacccgctttcgcttttcagccggtggctacaagaggcgattgacgcggaagtagacgagcctaccgccgtcattgtaggtacggtgtctcccgaagggaaaccttctacgcgtaccgtactgttaaaagggcttcatgacgggaagtttatcttctacactaattatgaaagccgtaagggaaaacagttggaacagaatccacatatctcgctctcttttgtctggcacgctctcgaaagacaggtacacatagaaggaattgcaacgaaagtcccgccggaggaatcggatgaatatttccgtaaacgcccctataaaagccggattggtgcacacatttctccacagagccggcctatcaagagccggatgcagctgatacgcgctttcgtgaaagaagccgcccattggataggggaagaagtggaaaggcccggcaactggggcggatatgccgtcacccccaaccggattgagttttggcaaggaagaccgaaccggctgcacgaccgttttctgtatatcctgaaagagaatggagaatggcaaatcagtcgccttgccccttgatttcgtcgatttttcttggcaacttcaactagaatacgtaatattgcaactacaaaaatattcagcttatgatactggattacatttatcatagcggtttcgccctcgaagcagaaggcgtcaccgttattatcgactattacaaagactcctcggaagccgaacatagccggggaatcgtgcatgattacctcttgcaaaagccgggtaagctctatgtattagccactcacttccaccccgaccatttcaaccgcgaaatattgacctggaaagaacaacggcctgacatccattatattttctctaaagacattctgaaatctcaccgtacccaagccgaagatgccatctatataaagaaaggagaaacatatgaggacgagacgctccgcatcgatgctttcggttcgacggatgtgggcagttcattcttgattcacctgcaagattggagtgttttccatgccggcgatttaaacaactggcactggagcgaagaatctaccgaagaagagatacgaaaagcaaacggagatttccttgcagaagttaaatatttaaaagaaaaagcgccggacattgatttagtgctgtttccggtggaccggagaatgggaaaagattatatgaaaggggcaaaacagttcatcgaacaaataaaaactactatatttgtgcccatgcactttagtgaagattatgaaggcggtaatgcgcttcgtaatttcgccgaaaatgcaggatgccggtttatcagcatcacccatcggggcgaaagttttgaaattaccaaataaacacataataattatgaataaatttacaatcctgtttcttaccctgttcctcgcattgccgatagcaatgaaggcagattcagcaaaagaaaaaaaagacgacagcaggtatctcgtaggagctgtccccgaagtagacggcaaagttatattctctaaggaatttcagattcccggaatgagtcaggcacaaatctatgacacggtcatgaagtggatgaccgaacgtctgaaagaaaaccaaaatgttgatagccgcgttgtctatgccgacgaagacaaaggaaccattgccggtatcggagaagagtggatcgtgttcagttccagcgctctttcattagaccgtacgctaatcaactaccagatcaccgttacctgcaaacccggcaactgtctggtggaactggaaaaaatccgtttcacataccgtgatacagaaaagtacaaagcggaagaatggattaccgacaaatacgcacttaataaaacaaagactaagttagtccgcggattggcaaaatggcgtagaaaaacggtagactttgccgatgatatatttatggatgtagctgtagccttcggagctccggatacccgtccgaaaatagagaaaaagaagaaagaagaagaacaaaaggctccgtcgatcgttacagccacaggcccgattgttattggcggggcagataagaaaactgacatcaaagtgacaaccggcgaacctgcccaaaatgcagttcctgccgccgatctgactcctgcaactcctgtcggcaaagcttcggcagatatgccgggttatgtagaaatcgacttgaaacagattccgggtgaagtatatgctttaatgggaagcggcaagttagtgatttctatcggaaaagacgaattcaatatgacaaatatgactgccaatgccggtggtgcactgggctatcagtccggtaaagccgttgcttactgcacgctttcccccgaccagtcttacgaagcaatggaaaaggcagacagctatgcactgaaactctacgctccgaaccaaacaacgccttcggctgttattgaatgtaagaaactggcctcacagactactccgcaagccggtcaaccccgtacttatgtcggtgagatcgtgaagctcttaatgaaaaaataaagtagatcacaacaatggaaataaaaagtagatttgaccattttaatatcaacgtcaccgatctggaacgaagtattgccttctacgggaaagcactcggattgaaagaacatcatcggaaagaagcttccgacggttcattcatcctcgtctacctgacagataacgagacgggatttcttctggaattaacatggttgaaagatcatacggctccttatgagttgggtgagaacgagagtcatctctgctttcgtgtagcaggtgattatgatgcagtccgtgcctatcacaaagaaatgggttgcgtgtgtttcgagaataccgccatgggactgtatttcattaatgacccggacgattattggattgagatacttccgcagaaataattcatatgataaaaaagcggggcaggatgattatcctgccccgcttttttatcattgtctacgaaaataaatagcatattcctaaaataactgttcctatataaaagcaaacaaaaataatacaaatatgattcttattttttatgtcgatttgctctttttttcctgatatcagctttcatcttcgctgcacccgaaccatgttgcccacgaatatatgttgccttcttagcctttgtcttcactttttcatcttcctgtggcttgtctttcttacctttaaagacaattccacccatgattgcttcttctatactcatatattaagttattagtatcatatttccggcagcaaagataacccttttctacggatttatttatctttgccaactaaaacaatcgtaacgaccaatatggcaacaacaattctcatcccagaaaaagacccaatgggggttgctatctccgattttttcaacctccacagagctgaccgcttgcgagttttttcttctcaattcgaagaagatgaaattcctgtcaaggagttgttccgttccatgccctccatgcccatgctggaacgtactgccctacaaatggccacaggacaaatactggacgtaggcgcaggaagcggatgtcacgccctggcacttcaggatatgggaaaagaggtttgtgccattgatatttctccgctatctgtcgaagtaatgaagcaacgaggagttaaggattcccgtcttatcaacctctttgatgaaacattcacagaaacattcgacaccattcttatgcttatgaacggctcgggaatcatcggcagactaagcaatatgcctgattttttccgacgaatgcaacgtatcctccgccccggcggatgtatattgatggattccagcgacttacgatatctgttcgaagaagaagacggcagcatagttatcgacttagccggagactattacggagaaattgatttccggatgcaatacaagagtataaaaggagacacattcgactggttatatatagattttcagacacttagcctatacgcttccgaatgtggctttaaagcagaacttgtgaaagaaggaaagcattatgattatctggctaagcttagcattgtttagaatgctctttataaaatagtgacgggatgctctttcgatagtatcgccatatcctaaaaatagtaacgctatcctgttgtgatagcgttactatttttattgtacacgaaagttttacgattcttcctgagatacacctgatgaaatgttctttatcctatttcagcatttcattaatcgtctgcaccagtgaagcaaattcttcctcattgtacaaacgggttagctttactatttttccttctttatctatcaaaacattccgcgttatgccggactcacgcaatgcatattttgcaaaaatatctgcaccgggatccaaacccaaaggataagtgactccggtagactttgcaaaggcgagcactttatcaagcggctcgtcacggtcaataccaatcagggcaaagtctgcattatctttatgcttcaaccaaatgtccttctctataaacggcatttccttccgacaaacaccacaccaacttgccgtgaactgcaacattaccactttaccacggagagaagataaagtcacctgcttaccgtcagtcagagttatggtaaagtctggtgctgcctcacctaccttcacgatatatcccgtgctatctgcttgagtagttatcacgtctccaactactttcgtactatccgatgccatttcagtggcagccattcctttcttctgaccggaacaagctaatagacttacagctacaaacgccacaccacacacattcataattttctttttcattgtcttataattattagtgagaatgcaaatataaaaaaagtatacgatgtatttgcatttttaaaagtatttcatacctttgcacccgcaaaagaaaataacgcctctttagctcagttggccagagcacgtgatttgtaatctcggggtcgttggttcgaatccgacaagaggctcaccaataaaaagctgtttatccgtatggtaaacagcttttttattgattatatcattcaggatttttgcctgcgaaacactactagttctgctagaatagaacaacatttttctggaagtattgactcttagtgaatatctaataacttccaattataataatatccgttgatattaagagaacatttattgattataagtcgattttttaaatggcattatgattaatagtaaaaaaagtgattaaaatattttttatattgaataagtttattacctttattatatgtttaaaaattacacaaacaatctctttttaaaaaaatatagacctctaatacataatgacttatgacaattgactatacataataatatatttcacataaataaatgtttaactattaaattacacaactatgaaaatgaacacaaagctagtgctagtcttaacatttatgttggtggtatcatcgtgtaatgactctgatatcatagtagaaaatgccaatagtggcatttcaattgacaaatctacacaattaaatcttactcctgacgaaaagctacataaggagcaatctagtttggaaaacatgctgatggatcagattatttatcgtgactctgcttatatacttaatatgagtaaagaagaagccattgatcttactatcccggatagcttgtatgtccattatctaaaaatagttgatgatctaaacactttacaatgaaaagtacaaagttaatgctaatcacaatactatgtttaatattatcgtcactcagtggctgtaaaaaagatatagtagaatcattattaaaaaataacagctatgttgaatgtattataaatggtaaatgtgctaggggagaaggactaagaacaatgtttgaagctccgacaagttttcatatgaactattcatattatgacgatggctcttttactttcaatatagctaaaggcattaatgataaggaaggtggaaattataggatatatatttctgtcactcaaaagggactaccgcaattgggagagaaatattatttcaaggaacatattgataacaacggtccatttgattttgaggatgaatgttatatagcgtccattgaagtaactccgtacctttatcaatgttcagatacaactcttatccctaaaagtatcagaaaaaagaagattattctaaagactgacattgtaaacaaagggtatattgagtttactaatattaatgtagataaaggtgaaatctttggtctatttaattttgaaactgaggttacgagtaaacgtgttccacaggcttcatataaggcatcagtaacagaagggaagtttgagggatataacattgaaaggaatagaactttctatacatcaggattatttgattatattttgtaaaaagtctactcattatgaaaaatataatttttctgttgtgctgcatattctacatgtcggcactagggcaatcacattttgttgaagatacccctgaagtcaggaactggcttgacaacatgttccagcaccttgacaagagtaagattcctcatggtcttcttcgtgactatgcctttgaattggctgatctggatatttataatggcaaggaattgaatgatagcaattatgtggatcgtgtcgccttcgagaatcttcttcgtaccgttcgctcctcctctgtgggtgccaagcctttcaatgcagaagaggttcttgccacccaacactccctttctggaagaggtaaggggattataggggtcgtgttgtaccagtattcatatattcgtgaagacgcattgagcagtcatcttatacgttacgagaatgagcaggttttcgacaacgaggtgaacggtgtttggcagaacccttattccatcgggtacacgctgggcttttccgcccaggacaccgttttttacggcagtaatatctcatattcttttcctgcatctatctggaaaagtaacgttactagcggaaaagttgagtttgacgcagatgacggaagaggctatgtctctgtatccagcggcagcagctatcagggcagttattcctctaccggtgtgaaacacttgaagatgcgtgtgagacttgccgacgggagctatttgtacagccacagtctggtgaaggtcatcacagataatgtgatcacccgtacagaggcggcgaagttcaagcctgaccgttgtgttgacattacggccagtttaccctataacggtgaaaaagcttccggtcgtatatcttatttgtattccacgggcagtcccggcaaactcaccaaaccttttattgtcatggaaggttttgaccccttggaatttgttgatgatgctaatccgtatatgggtgacgaaaaattcggtaacacgaaccttcatacctttgtgaatgggcttagccagagatatgcagcctttaataagcttcgcagcgagtacgatatcatctacatcgaccttttcgacagcaagctctctatccaggccaatgcccgacttttcgagagcgcaattgaattgatcaatcaagagaaggcttcctgcggctgcactgaaaagaatatcgttatggggcagagcatgggcggtctgatagcccggtatgggcttaaagaaatggaaaacctgtctcatattcacgatgtgtcactccttttttgtcaggatacgccccacttgggtgcccatgttcctctcggcattctccaggggatgaatggcatcttgcgtttctactacgacaaatggataataggacgtctcgcactcggcgatttcaagtccaagatatctcctgtgctttatagcaacgctgcccgtcagatgcttatcaactatgttgatgacaatgggaacgtagacaactcctatcatactgtttggcagcgtgaactcaccaagatgggctatccagagggtgataacggatacaagatgcgtgtcgtcagtataagtaacggccagacaccggttattgattgccgcaaaccttatatatatgtcgatggcagggcttcgaccaaaatcctttcggatatcttgatggagtttgtggcacccaacttctttgcttcggttcttggtatcgctcttcaggactggcaagtgttcctgcttggttttcttcccggcagctcaacattacttctacattttgaggcaaacccaataggttacgacggtcgttcagtatgcaacatgtatcttcgttatgtgaagaagttcctttggatgatcaagattcgccggactgttttttcttatcagcgggattaccctttatcaatgattaactatgacaagatgcccggttcctattatgaactgtccaatgccaatggtgctgccataagcagtgaccaggccgaaagatgggtccagctctttacccggtataatcttacaactaattttgagaataaactgatgtttatccctacagtcagctctctggatatcggtgagggtaaggttgaactgactcaaagtgattatgagaagaagtatttgatgaattttccacctgctagccccaaacataccccgttcgacgcattctatataaccgacgggtctacctaccatacttctttcgagcctactatgcttgactggatgctggagcagatgaaggttactgtggacggtccagaagttgccactgacggtagccgttacaccatacgtaataatacgatgaattacaatattacatggaatacatctgatgagtctgtagctactgtagacaataccggtacgctgtcgatgaagaagtacggtgttatcactattaccgccagttgtgttattaataatgttacaacgaagttccataagaagataatggttgggtttcccccattcgtccttgaatggcgtatggaagttagcgcttatatggtgtctgccagatgtatagactcaaaagcagaaacttttttgaaaaatattcagtatgaatggaaacttaaaagggatagtgaaagctcgacttcggattggtcacaaactattgatccttggtggggagttatgcctacacaaaaaactaataaagtgacagtctatatgagagtatttaatgctgagggtattaggtcaaatccagtttttctgaatatggatgccacagcccctttcgagtttgaaccacatactccaaattttgaagtaagtcaatatactaacccatttactgctagccttgatttctttcctaatccgcagtatgaagatcaagaagtgttagttaataatgacgaatttaagatacggagggtagaatcaagtggtggaaactatttgtatattgattttaatcttgtcacaagtggaacaatatttcttgaagattgctggtcgagaggtggctttcttacttggtttaatatggtaaagggaggaggagtaggttcaactcgtgaaattatggcaatattattatttaaaaataattatggtagaatagtatatagaaaagtgttacgagtcagatattttagactataatagatatccttgatataatgctgtaaggattttcggataactgataatagaggaaggtaggcgaagaacagcactttcaaaagcatgcgagaataataagcaggacaacaaccacctttataagtggataacaacagactgatgtcaaactcatcaacgagttggttggcaagcctgaccggagcatccgaagaaatattttcatcaagacgggaaggaaataaggaatccatgccttgagaatactccttaaattgtcgcaactatatactttattgtaccaacgattgtgtat

SEQ ID NO: 3043 - DNA, 1998 bp, Unknown
  gut microbiota DNA sequence
gaaatcataagctttctacatgcttatctttgcctaaattttcgtgcaggaacagaaccaaagccatcaattcctgccttatcctctaaagtttcatcaaaagtgcgaggccgcctttgactatccccgatgtgactgcaccactgaaccggaatgcttcggagcaacagcttccgagtgatgtctcgtcctggcacctagtgcctggattaagctaatctactgtgattcgattaagcagcaagagcgtaattagtttcgccagataaaattttgataactgagatttaagtggaaattaccgacccactgcatgcttacctaccatttctgcccgctgtcaaatccagtcaagcccaaattcttattcgtacagaatagcgattgttcagaacgctttccaagggtacaaagataggaaatgttttcggaattacgagaagacgttagcaaatattatatcaaagcactatctttacggggtaaatttattcttaacacaaaaagatatcatgaaaaaacttttaattaccagcttatttctaggaagttgtgtactcctcccggcacaaaaaacgactaaaatacctaatgtttataaacccgtccgttcggaaatgtataagaaaggatggatagacttcaataaaaatggtgttaaagatacctacgaagatccgacagcacctatcgatgcacgtatagaagacctgctcagtcagatgacactggaagaaaaaacttgccaaatggtgactctttacggttacaaacgggttttgaaagatgatttgcctacttctgaatggaaaaaccaactatggaaggacggtatcggagccattgacgaacacttgaacggtttccaacaatgggggcttccaccgtcggacaatgaatatgtatggccggcatccaaacatgcctgggcgctgaatgaagtgcaacgtttctttattgaagagacacgactcgggattcctaccgattttacaaacgaagggattcgcggagtggaaagttacaaggctaccaacttccctacccaactgggactgggacatacgtggaaccgtcaactaattcaccaggtaggactgataaccggacgggaagcgcgtatgttgggatacaccaatgtatatgccccgatactcgacgtcggacgtgaccaacgctggggacgctatgaagaagtgtatggagaatcaccatatctggtagcagaattaggtattgaaatggtgcagggtatgcaacacaatcatcaggttgcagctaccggaaaacactttatcgcttatagcaacaacaaaggtgcacgcgaaggaatggctcgtatcgacccgcagatgtcaccgcgtgaagtggagatgcttcatgcctatccttttaaaagagttatccgcgaagcgggattactcggcgtaatgagttcttataatgactatgacggttttcctattcaaagcagctattactggcagactacccgcctgcgcggagaaatgggattccgtggatatgtcgtttcggacagtgatgccgtagaatatctttataccaaacacgggaccgccaaagatatgaaagaagccgttcgccaaagcgtggaagccggattgaacgtgcgttgtacattccgttcaccggattcgtacgtattgcctttaagagagttggtaaaagaaggaggactaagcgaagaaataatcaatgaccgtgtacgtgatattctgagagtgaagttccttgtcggcttattcgatactccttaccagacagatttgaaaggagcggatgaggaagtagaaaagaaagagaacgaggaagtcgctttgcaagcctctcgtgaatccatcgtactcttgaaaaatgaaaagaatgtgttgcctctggatccttcaaagatccgaaaaatagcagtctgcggtccgaatgcagatgagcattcgtatgcgctaactcattacggacctttggcagtagaagttactt

SEQ ID NO: 3044 - DNA, 182 bp, Unknown
  gut microbiota DNA sequence
ttttccgtaccaaacttgttgcataatgcttcatagatagtattataagcctgcgcaaattcatccgccaactctccctgccaactgtaagaccatcctccgttgagacaacgcatagcattggcgttcggacctgccaacaatatcttcgttcccttacgtaaaggcaaaagttctccttc

SEQ ID NO: 3045 - DNA, 10893 bp, Unknown
  gut microbiota DNA sequence
agctatgaggattaaaatgctactctttttcatcattttgatttcttttctgcgaaagtacggtttttacggataaaaaaaaagaagaggctgtctcaaaatgcattgcaccccaaaagttagacaaaaaacttttggggtgcagcttttttattgctttttggaggatttttattttttcattttagcaaagagaacaacgttgttattgtcttcgtttaatgatttcactaacgcttgtgtacgttttcgtactgtgctggggagatcttttcttgccagttctttctctagtgtttcttttagttgtgacggttccatgttagagacgtaatatccgttgccgaaagacggccatatctgcatctcctttgttcctaaaaagtcattgtacaagtggaaatagttgccgtgcagtgtctttttgtctacaatatatttggcaggcttagtgcttccccatgtgtttttagacatttgtaccgggaaagaaacgtcgcctataaaatggcgcggatattcggaatagccatgccagggaattttatctttattggcatattcgacagtgaaacgggcttccagacggtttttggcattgttgtagtggtataggctgtctactcgcggggtaggcataatgaccattagcatgacatcataatcggaggtgttgttacccataaatacttcattactgaagtctcgtggaacggtcagatgtgcgggagcaacgaagtttttgcgtttgccgttaaaatcttgtgtccatactactgccggccaaccctgaaatggcagtaccgtcactgtgacttccgatttctctgtgtctactctgaattgtcctttaggaacgcgcaggcataatgggatgggggcttgtggatttcctttcaaatcgaatacaagtaatttgtcactttgccagggtaggatatagatacggttgtgggcctcgtctaactgttcagcgtatgtattaccgtattcgttcggtccctggccataggcgccaatgttggtgatatatttgccgtcacgggtgaaaagtttatagggagtctgtttgttattacttaccagaatgtaattgtcgctgacagtagtacgtacccaacctcctaccagtgcttcatcccgattgtctaactgtaccacttggagttcttctgtcagatagctcaggggaatgtctaccgtatctttcaggctttttaaattacaggaaattaatgttcccgtaggtgttgtgacgctcttggctacgacaggcgatagtgccagtgggtctttcgttgctttgctgttgtctgtaaaagcaaaaattgctaataaagaacaagtgcataaactgaaaataatacttctgtttttcatactgatatgtatttagttagtactgtttttctaattggcttcgggacaaaagtaggctgaaacaaatagaaaaacaaaaaaacaggcggacaagaatgctctcttggttgtcgcttatgtatctgattattagtatagtatacgctattttattattttgtaaggcggacaaaatataaatgaggttggactaattactaaaatgctttgagaaaactgtcaaggcttatgttttcatcagtgattcccagcttgtcggttttgattcgatattttcgtttggtgatagctgctttgctgatacagtagatgtctgataaatcctgtatattgacattgattttgacgaggcagcagaagccgatttctttttctcccaaagaaggataggcttgttgtaagcgaactacaaaattgtcgaaggcatcatttacgactgaaatgacttccgcccactctgtgtttgttaccactattttgctgttagcggcagattcatcctgcttgtcatcggtgtggagggaaggtagtttatgaaagaatgatattcttctgaaaagagcttcccgcaactccgcttctttgtttctctgtcggatttctttttcccgcaatccgcttagttccgcttccttgtgcaataatagattctcttgctgcaaccgctcttttttctctctttgataaaagaagaatgcgatgaaccctacgcttagtaaagctgtgatgattccaagcatccatagttcgtgcttctgttgctgaaaatgaagctggtatagctcgttttgcagtttgagctcgttgaattctcttctttgtatttctgaattgatgttgccaagtatattattttttattgtattttccttttgtttgctgtaaaacgcttgttcaggataatcttcttgatttatcagattgaataaaagagcatttgcttccatggcaataaattctgaagtggaggttgcagcttgctgatagtaatatttggcggaatctgtctggttcagggctgcgtatgtcctcccacggagcaataggtaatggggaatttcgtatcggctgcgacgttcattggataacagttggagatacttcagcgcttgccggtaatcttttctttccagactggtattcagcagattttcgaatgcataataaatgagggactggtggttgggagagtctctaagttcttctatcaactttttgtacccttgggtatatttttcatgttgctgcattgcttctataatttgaaggtatagttggcttgcagtgaagtaggcaagcgtatctttgcttttacgggttagctgtttgctgctatccgccattgcaagggcttgattgtagtcttgttttctgtaatatgccgctctccttagtccgtatatgcgtgtctttaatgtatcgttcagttggtactctttcagcaactttccggttgataataatgtggaatcgggtagattcttatataggtaggaagcgctttgctctatgtgtgcttgtagccatttggcttgtaggttgctttgtttgtagcacgtgagagcatttcggagcagtgagtcaccggggaggccggttttccatagcgttgctttataagagagcaaataatagtctccttgttcggatagggataattggcgggggtgtgctatttgttgcaaatagaagaatatactgtctgttgaaactttttccattttcatggcttctttcagtagtgatgaaggtttgggctggcaactgctcataataatgaggcagctgattaataaactgtaatagtatctactgtgctttttcatatattctattctatgattacgaatatactattttgccgacaataaagaacctttctttagggtattttattaattaaccgttttctccggataaaaaaaagaattgcccgtcatttatatgacaggcaattctcattatttaaaatagagtggtaattctattatttagcgatgctcatgaaatctgcattagtgaagtattttgcaaattccaggtcagtagctgccttcttagctaatgaaggatctttagcaactgcgctcttcaagctgcttgttaccatagaagaattgttagttctagcacctaaaacagccatcaggtagtcagtgtaagcatccggtctttctacgttagccaatgtgtttttagccttgttgtagtccttagcaaggatctgagccagagcagcactgttagtcttagagtcaccgaatgagttaactgctctttcatattgaccttgagcgatgtacaggttacccatagattcgccaagttctttagtgccggcagctttaccgaagtaagtttcagcagcagctttgtcacccttgatcaaagagatcaaacctaagttcatgttaacttcaggagaagcgttaacgctggcagctttcttgaaataagattctgctttgtcaacgttaccagcctgataagccaatttacccaagttgttgaaagcacggtaatcgttagggaattgttttgtagcctgagtatagatagcttcttgtttagcaggatcgttagtcagtgtagcagcatacagcaattcttcaacattcagttctgaaggattagaagaagccagcttagcgatttcttcgtcagacttaccgatgatttcgtagttcaaagtcaaacgagaacgacgcagctgaggaaggatttcatcagccaaagttttgtaaactgaagaaatgtttttgatttcttgttctctttgtgcaggatcttgatacattgacaatacgcggagaatcaactctttatcctggatgttagatttagaaaccagttcctggaagccttcccagtcctgtgcggtatatttagcatcgatcggagcgtcgattttagctttcttcaggtctttactcaacatcttagttgtgttgccttcacgattttcagccagtgtagtattcaagcttacaccaccatcaggagaagcgtatgcagaaacttcgatattgctgatcttcttgttagcagcttcgtttacgttagccacttctttattgaattctttagcagttttcaactcgcttgaacgaatgttagcttgttggatcaagaacatgatgttagcgtcatgtttttctttgatgatacgttggaaagcgtcttcgcccaatgccgggtttgcgttacctaatgtattgttaactaattcagaagtagaaatgacaccatcagctactttcacagcagggatagtaaccactttcttaccgatagtagctttaaattcgaggtacagttcagacttagccatttcaggaacatagtcgaaggaagttttcattgtgtagctaccgcccatcttgtaagagatagtctggtcgttaccttctactttttcaccttggaaagtcgctggttggcctttagcttcgccaccattccatttcaaaaccggagttacttctacaactgctttcttgttgaaatacttttccgggaattttccgttaatggttgcaggaactttaccacctactgcctccagcacctgcggagtaacagtgaagtaatcagctgataattcacccatttttttgctgcaagaagagaataatgcaacaaccattgccatgagtaaaggcaagtacaacttcttagtcattttaggtataaattaaatgtttgtaattgaaatatcgtcgtattcacatacacctttctgtctagtacagaaaaagtaacgcaaagatattaattcttaatataaatataaggataaggggttgattttatcataatttaatgaaattagcgctctttttctttccggtacttgatatttcggggatgatgttcaatgatctcactgcgaagcatattacggtcgatatgcgtgtagatttcggttgtagcaatagactcatgtccgagcatgcattgaatagcccgcaaattggctccgccttccagtaaatgagtggcaaaagagtggcggaaagtgtgcgggctgatatttttgatgatacctgccgtttgtgctaattctttaatcatgtggaagatcattattcgtgaaagtcctttgcctctccgctggctgacaaatacaaaatcttcatattctttttttacttcgatccggttacggtcggtgaagtagagttttatctcgttaatggcacggggggaaatgggcacaagtcgttgtttgctgccttttccttccactttgatgaagccctcgtcgaaataaagatcggacagcttgaggttgacaagttctgatacgcgaagtccgcagctatataaggtctctaatatagccctgtttcgttgcccttcggccttactgcggtcgacggcagagataatccgatcgatttcttccaccgtcagcacctcagggagtttgaagcctattttgggcccttccagcaattcgctgggatcagcctccaaataatcagccataagcaggaaacggaagaatgatttgatccctgataggatacgggcctgcgaacggggatggataccaatatcatgtagcccggctgtaaaacgttggagatcagacaggcacacttccagaacgttgatgccctccaaggtcaggaaactcatcaatttatccaggtctgtaagataggcttccagcgtgttgggagataaagacttttccagtttgagatactgctgatactttctgattatcagttcctgttgttccttcttcttctttttttcgttgatttccatttcttttttctacctttgctccgcgaagataggctgcacctcagcagaatacaaataaatttgtttctacattcggtttgcactatctttgtggcttgaaatattgttctttggatacaaaggtataaaaaaagaggattacgcgatgaagatacaaattattaatggcccgaatataaatctgttgggtaagcgtgaaccttccatatatggaagcgttacatttgaagattatttggctgaacttcgcaaaagatacactgacgtggagatcgactattttcaatcgaatattgagggagagatgattgactgcatacagcaggtaggatttgacgtggacgggattattctgaatgcgggtgcttatacgcatacttccattgctttgcaggatgctattcgctctgtgacgtctccggttatcgaggtgcatatctccaatgtacatagtcgtgagtctttccggcatgtgtcgatgattgcttgtgcctgcaaaggggtgatttgcggctttggactgaactcatataggttggcgctggaggcattgttagaaaataaataaggtataatatataataggtagaaagactatgttattgaaacagactaagattgtggcttctatttcggatagacgttgtgatgtggattttataaaacagctctttgaagctggaatgaatgtggtgcgtatgaatactgcgcacgccagccgtgaaggttttgaagctctgattgcaaatgtacgtaccgtgtccaatcgtattgcgattctaatggatacgaaaggaccggaagtccgtacgactgccaatgcagaaccgattccatataaaataggtgagaaagtaaagattgtaggtaatccggaacttgaaactacccgtgagtgtattgctgtttcatatcccaatttcgtacacgatttgaatatcggtggtacgattttgattgacgatggtgatctggaactggaagtcattgataaaaccgctgattatttgctttgtgaagtgaagaacgaagctactttgggaagccgtaagagcgtgaatgttccgggtgttcgtatcaatcttccttccttgacggaaaaagaccgtaacaatatcctttatgctatcgaaaaggatattgattttatcgctcactctttcgtgcgcaatcgtcaggatgtacttgatattcgtgcgattctggatgctcataatagtgacattaagattattgccaagattgaaaatcaggaaggcgtagataatattgatgagatactggaagtagccgacggcgttatggttgcccgtggtgatttaggtattgaggtccctcaggaacgcattccgggaatccagcgtgtgctgattcgtaaatgtatcctggcaaagaagccggtgatcgttgctacgcaaatgttgcatacgatgattaacaatcctcgtcctactcgtgcggaagttactgacattgccaatgcaatttattatcgtacggacgctttgatgttgagtggtgaaactgcttatggtaagtatccggtggatgcggtgaaaacaatgactaagattgcggctcaggctgaaaaagataaactggaagaaaatgatattcgtatcccgttggatgaaaacagtaatgatgttacggctttccttgccaagcaggctgtaaaagctacatctaagttaaagatacgtgcgatcattaccgacagttatagcggacgtacagcacgtaatctggctgctttccgtggcaagtatccggtattggctatttgttataaggaaaagacgatgcggcatctggctctttcttatggtgtggaagcgatctatatgccggaactcgcaaacgggcaggaatactattttgcagccctgcgccgcctgttgaaagaaggacgtttgcagccaacggatatggtaggctatttgagcagtggtaaagaaggtacgcaaacttccttcctcgaaataaatgtggtggaggatgcgttgaagcatgcggaagataccgtattgcctaataataaccgttatctgtaaaaagaacaggctgtatgcaagagactgaatctattgacgaatatattctgcaacatattgatcccgaaagcgattatttgaaagcgctgtatcgggatacgcacgtaaaattgcttcgtccccgtatggcttccgggcatttgcaggggcggatgttgaagatgtttgtgaagatgattcggcctcggcagatactggagatcgggacgtatagcggatattccgctctttgtctggcggaaggtttgtcggagggcggaatgttgcatacctttgaaataaatgatgaacaagaggactttacccgtccgtggcttgaaaaatcgccatttgcagataaaatccgtttctatataggtgatgccttggaacttgttcccgatttgggcgttacgtttgatctggcttttattgacggtgataaacgtaaatatattgagtattacgaaatgacgttggctcatctttccgaaggaggatatatgatagctgacaatacgttgtgggatggtcatgtgttggaacaaccccgtaatacggacgcccagaccatcggcattaaggcttttaatgatcttgtagccaaagatgaacgggtggagaaagtaatattacccttacgtgatgggttaacgattataagaaaaaagtaaaggagtagatttatggaaacaactagacagaataagatatcccgcttgttgcagaaagaactgagtgagatattcctgttgcagacaaaggcgatgcatgggacgttggtatcggttagcgctgtgcgcattagtccggatatgagtattgcccgtgtttatctcagtgtttttccttctgagaaagcagaagaaatggtgaagaatatcaatgataatatgaaatccattcgttatgaactgggtactcgtgttcgttatcagctacgtattatccctgaactgaagttctttgtggatgattcgttggattatatcgagaagattgactcattgctgaaatgaaataattcattgcagaggtgaatttccccttctatatagcccggcgttatcttttttcgaaaaagaaacataatgctattaatatcatatccggcatttctgtgtgcggagtggcccttgctacattggcgttggtctgtacactctctgtttttaacggctttcaggatatggtggccagctttttcaccgctttcgatccgcagttgaaaattgtggttcgtgaagggaaggtttttgacgggcaagatgaacggattcgcgctgtttgtgcgcttcccgaagtggctgtatctacagaaacgctcgaagagaatgcaatggtacagtataaagaccgtcagactatggctgttttgaagggtgtagaagataactttgaggaactgaccgagattgacagtatactttatggagccggtgagtttctcttgcatgattcgattgtgaattacgggattatgggagtggaactcgtggccactttaggtacaggattggagtttgtcgatccgctccaggtttatcttcccaaacggaatgccaaagtaaatatggcaaatcccggtgcttcctttaaacgtgactatctttattctcccggagtggtgtttgtcgtgaatcaacagcagtatgatggtaaatatattcttacctctcttgattttatccgacaactgctggattataccacggaggtttctgcgatagagctgaaattaaaatccggtgcaaacgtctcatctgtacaatctaagatcgaaaagatgttgggagatgattttgttgttcaggaccgttatcagcagcaggcggatgtgttccgtattatggaaattgagaaactgatctcctatctatttttgacttttatccttatgattgcctgttttaatgtgatcggttctctttctatgctgatactggataaaaaagatgatgttgtaacattacgcagtctgggggctaatgataaacttatttcccggatattcttatttgagggacgtcttatttctctttttggtgctatctccggtattattctcggattaattttatgttttatccagcagaaatttggcgtaatttcgctaggtggaggcggtggtacttttatcgtggacgcctaccctgtcagtgttcatgcgtgggatgttgtgcttgtcttcataaccgttctgactgtcggattcctttctgtgtggtatccggtacgctatttgagtaaaagacttttatagtcggatgcggaacttctcttgtggaaactttcctatatttgaaaacttttaaagccttattattttataattgatgatatacttgtatatttgactcgattttgttaattgaaaagtaatctgtacaataattcgtgagagtgaaaagtgaagacataagcaaaattgcagatggcgatgaaatggtttttacccgtttcatggagcattattctacgcgcttatattattatgcttatggcttgttgggacagaaagaaatggccgaggaagtagtgagtgatgtctttttcgaggtctggaagaacaggaaggggttggtgcagattgaatatatgaatgcctggctgcaaacaatcatctatcgcaaatcaatctcgtatttaagaaaagaaaccgggaagaatgaactttcatttgatgaaattagtgatttct

SEQ ID NO: 3046 - DNA, 13124 bp, Unknown
  gut microbiota DNA sequence
cccgatctggtttaattcggaatcgtacaaactttccgaacaggactataaagagatcatgaaatacgttgaagtcctgtataacatacctgatatcgacacgacgggcagggtgaaaggtacggaacttgcactacgctttattgatatccacacgatctggctaccggcctggcttaacacttaccgggaccagcggggcaaaccccgtaaggactttcgggatttcatggagttaagaagcaagaacgaagatttccgtaaccttatgacgcttgccatgcccgccaaattctggtattccaagtttaacgagaaatcccggcaatgggatcacaatatagacgcggactgccttcactactttttacgtcttaacggtttctattcgcttcatgatgaaaattccagttcaacgaaatacatccgtattaccggcaatatcgtaaaactgataaaggcaaaggatatccggaagtttatccgcggttgggcccaggatagttttttatcccgcgatataagaaaccttattctgaacagccccaaactgtcagatacggccctggacaatttgcaggaaatagaactggactttaccaattatacccataatacgcagatgttcttctttcccggttgcagcatggaggtaagcggtaccggtataaaagagcatccggccaacggcagcacattgtcccactacgtttgggaagaaaacgtactgaaacacaaagttcgtcttatggaagacatgtttaccatttcccgtaaaaaagacatagagggcaacgatgtttttgatatccggataaatgccgtcccgtctaactttttcggctatgtaatcaattcgagccgcgtttactggcgtaaggaactggaatataatttcgacgacaagagcgtgggggaagcggaatcctaccgggaaaaacataaattcgatatcgagggggaaggcctcacggcggaagaagttgccgaacagaaaagaaaccttatcaataagatatttactatcggttatatgctgcatcggtacaaatccccttcgcgtgcctgggcaccacaggccatggataacaagatcggtgaagacggtgaatgtaacggacgttcgggcaaatcattcatgttcaaggctctttcctactttatgaagaccgtcaagctttccggccgtaatcctaagctaatggataacccgcatgtgttcgaccaggtaaaccagcataccgattttattttggtggatgattgcgaccggtatcttaatacgggcctgttttacgatatcatcacgtcagatatgaccgtgaacccgaaaaataaccagtcatttactatacctttcgaggaatcggccaagctgggatttacaactaattacgtacctattgattttgatccgtctacggaagcccgtttgctgtatctggtattctctgactactaccaccaacgtacggaagataacgactaccgggaaacgcgttctatccgggacgacttcggtaaggatttgttttctaagacttacagcgaaagcgagtggaacgccgatataaatttcttcttgcagtgctgtcgtttttacctttccctttgcgaggaatctataaaattgcttccgcccatggaaaatattatcaggcgtaaatacaaggctgatatgggcaataatttcgaggattgggcgaactcttatttctctccggacagcgagcatctggactgctttatcgtccgtgaaaaggccttcgccgattacaaaagcttttccggtgtgaataaaatcacgatgcagcgttttacaaaggccctcaaaggttttgtggccctttgtccctacattgaggaactcaacccgaaggacctttgtaactcccaggggcgtattgtacgtaaggataacgacggaaaggccgctgacatgatctatctacgttcatgcggcacggcggaaacggctgccggtggtggaacggaaccggccgatccgacactcatgtttgtacctgatgaacgaccggatgaatgaataacgcgcatttgaaattaaacagcatgtccgagtttaccgtgctctggaacagcggcgagaggttccggaaattcgccgagcaggtttaccgctatctggagcgtatgaaacccggtaccgtcctgatgctggaacgctattcgggcgagcagctcgaatggatcatcaaaacggcctgtgtttttatcctggaaggagacaactccctggagtatgaatttaacgaggactatacggccgtcgtgcaccggtatgtggacccggacgtaaagaaatggattttaagcagatgcaaacatcgcgtataagacggattggagccggtataagatacgaaaagagggaccagatacgaaagtgtcggtccctcttttcgtatgaaaacagaggcgccctgcccgtcttacctccccataccccacctctatttcatacaaaattttagtaaccttgtaacctttgtttgcttgaaagaaaaaagtctgaaaatcaaataaataaataggaaataaaggttacgaagttgcagttacaaaacggttacgaatttttccggtttgtaacaccggcctttttatcttctaccggtaagcccggttacaaactgttttcctgccatttttttgtaacggaaattagtaacgttgctaagttgctaagatacaggattttatctttatcggttgcccggttacgaaattacagaaatttagtaccggattatatcagcacagcctggcggagaaaataccggccgtgtggcagcaggaaaaagtgcattataattattctcccggagtatatttatcaaaatggcggtcgaaagcctacattttcccgtaaatggcagaacaacagccgataaaggaatatctttgcccttaaaaaggaatattattgctatgattaccacccgaatacaaatcgaatcctacctggccgagtatgtccggggcaaatattacgacgaaacgatcggtaccgtccgttttccttcttcgtccgatatctatgtgactatttacgatctcatggagaaacggccggtgaattgtccggctgaccgcggcaacctggagtttatgctgcctgaccgccgggaggccaattttgccggcggcaagtctccggaacagttcaattatatttccgtacgtggtaccgctattcttgaaaagcgtttgcgtgccctgatgtgggccgagcttcacgaactcatggacgaaaacaagcatctgcacggtatcgaatttaaggaaaccgtttttaccttcctgaaaaagtataatatctcttccattcaggaagacgggctactgaaaaactaccagcggtggcgggatagtttcaggcgtaagaagaaaagggtctataatcgaaaaaaagtgtaaaaaagcaagttattttttacctaccaactgtatctgtttgtccttttttgtccggtttttggctgaaaaacgtccgaaaaatgctgaatatttgattatcaatactttatatctgtaattatgtcaagaaagttaatatccgccgcccatagtctgcaactggttcccgtttacaacattattcattttggcatcgtgcattcgaaagtcgttatccgctctatcggaaaacctgatattcttatgatcgtaccgggaaccttattaccgggtgacagcaaaaatgaagacgtctatactaaaaaacataccttcaagcttgccgacgtgtcgcaaaataagacgctttacctggaaaacctgaaagcgacgccctttgtcgccctctatactgacgaaacgggtaacacccgtgtttccggttctcctgattacccgcttaccttttcttttgagattggtgggggcctgtataactgcaccctgtccggtacgggtccgggcgttgatgcgttcctgtaggttcctttcagtccttctctacctatgatataggcgttttctttgtcgtaaaaaagagaacgtggacaaaatacaggagatttttacagcaccttgggcaatcgctgataatgattattaccggttgctttctttacttgtgccgtgtgttgcagccggcaacctggatgcgatcgaaaaacggctcgacaataataaaataaccgcctacgctactacgccttatcttgccaaccggtgggaactggacgatgagacgctaccggctgacagtgtggccgtcattatcctggaaggcaccttgtattcctgggagacttaccgcctggaaaagcagcttcgggatgttttcgataatcctaagatttgcggcgcggtcctgtggatcaacggtccgggcggcatggtcgcacatgtggacctggcggctaaaatgatcgccgaatcttccaaacctatagctacctacgtggccggtaccatgggtagtgcccatttctggctgggaaccgccgccggtagaacctttatcgcttcccctatgtgtgaagtcggttccgtcggtatcatgcttacttaccaatcctttaagaactatttcaagaaacagggcattgattaccgggaaatctatccggatagtgccgatctgaaaaactatgaaacccgcgcgattgaagatgacaacaacgaagagcctataaagcaacgtctggccgtcatgcaccgtattttctgcgatgcgatcagtcggaatctgggtattgcctacgatccggaacttccccttttccggggacagatattcaccggcgacgtagccgtggcaaacggctatatcgatcagttcggtacgctggaagacgcggtaaagtgggtactggcacaggctaccgtcagaaaagtaaatgagatgtataacatatagtattaacttcaaaattttgtatatatgaaatttaagagcttttccgctcacattctggccttgttgggcttgtcggaatggagcaaggtagaggataaaaactctatcacggtcgaggaagtggcaaaactgaaaaattacggttttactgaaaaattcctcacggactttaaagcgtccctcgaaaacgattttcaggacgaagccgaagacgggaaccagggagagaaaaccgaggagcctaaaacaaccgctttccttcgcggtttgttgggtgatactgcggcccgtttgacacaagcgcaggaacagcttgaagccttgcagacgcaacagcgtgacgaaaaccggaacaataccgcgttaattaccaagaaggatgccgaaataacgaagctttccggcattatcgcccaactttcggccgctgcggaagatgatccgggcaaagggaagcaacacaacgcccaggcggacggtaagggaaaattcaatctccaggatgaaaagcagctgggaggcttgcagggtgaaatgttctcactggaccgcccgtataaccttcgcgccaaagctgcgttaatggaggctgccggttttgaaatgattgctcttccgaaagcaagttccattgactacagccgtttgaaggaggacctcggggccttttaccgtattccctggcaacagcgtttgcagtcgtttttaatggaacttccttccattgaaagtattttcccgcttgaatccggttatcaggatttggctacgctggtaaacatttggctgggtgagttctcacaggccggtaatgaggaatccgacttcgacaaggtgactaaaggttcctacgagttcgacgatgaaaccctgcgcatgttcaacgtgatgtttgcacaccgtttcaaaaatttaaaagccttggagaaaacctggatcggcactttgaacaaggaaggttcaaaccctatcaagtggtcttttatcgagtacatcctggccgaaactgccaagaagttgcataacgagcgcgaacaacgccgtattaacggaatccgtaaggacccgaatctgaacgaaccgggcaaagcacttgctgcagctgacggtctgtatgagttcctgaacaagaaagtgaacggacataccgatatcaataacggaaagttcgtttaccagatcaagccgttcgagctgggagaacttaccgaagcaaacatcggtgaaaaggtgtacaagggtacttccatgatcccggcggttcttcgtgacagcggtaacctggcactttatatgccttcgcactttattgtattgtatcataaatacaatgaactgcattacggacagaaccaggattacaaggctaatatcatgtatgtgaaggaatatccggcggtaaagattatcccggttcccaatgctgacaaccaccaccgtatcttctggacgtttgaaggcaacattaaaacctacgaggacaagccgggtgaaatgacggctttcaacctggagcaggaagactggagcctgaaagtatggagtaactggcgtgaaagtatctgggctattgccgtgggattcaagtacaccaagaaagaagatatggactataaccgtcagatgatcttctgtaatgagtatgaccgcccggcgtcttactttgtggacgctgacaaggacaagaacccgtcggctaagcttcatacctccattgttaccgtagccaatacagccgaatttgctattaccgatattgaagatgcgccggtaggtacggttatttccctgaaatgcggaagcgtggataaaggcgttaagattgagaaaagcggaaactttgaacttatttccgacgcctggcagcccggtaaaggggatgttattaaactgatgaaacgtgccgacggtaaatttatcgagatcggccgcgaaaacgcttcttccgatgcgttgcagtttgcaccggatgaaacgacaccttccttgcttgacggtgaagtattcgttactggtgagaatacaaaggcaacggcaatcactaactttacagatgcggaagccggtgtcgtttacacgatctacggaagcggttctgaatatgcttccaccattgcagccggtggaaactttgttttaaccgaaactatgacactttccgaaggtaagtttatcaagctggcaaaagccgccgacggtaaattctacgaagtggcaagaggctaatttttagcggaaggggtactttatcccttccattttataaccttataaatcattaagttatgacatacgtaaaagcaagcgtaagaaggccgtccggcaatcccggtaacggtattcagcccaaggatcagctcgtaatttacgacgttgacgatattctttcctttccgcagagaaacgatgccggcgtggttatcgaggatgatatcgtaatgaaggcgggacgttacgcgatcggtatttacctgacacccggtaccgctgaaatcagttccaacagtgacggggaaacggacgccgaaggttatacgccttccgttaagttcaatcatcccggtaatgaacaggaaatccgcgagtttaagacaaactggctttccaaaaaatgtatcgttgtactccgttattgtagcggaaagcctgccgatctgatcggaacgccctgtaacccgtgtaagttatccgtttcttataccggttccaatgaatcgaatacgaacgaacttacttttacccagatcagcaagggggatgatatcgccatttaccggggtaccgacaccctggaagaaccggtggccgtagtggaagccgggactacagatatagattaccagacagacgggcagtaccagctttccgcaggtgcggccaaaatagccagtgttaccggtggaagtcatggatcggtaattacccttatgggatgttcgggcgttgcgccaacagtggaaaaaggcggtaatttccttctgaaaggcggtaagacgtttaccgcttccgaaggttcccaactgacattgcgggcgtttaacgacggttcggaggctatgaaatggattgaacaaagccgttatgaggcgtaagtaaacggctttcatgtaattcaaagggtgaccggcagcacatgcccggccaccctttgtcctttttggggtaattgcccccttttttctttgtatcatcaaatttttatatagtatgaaacaggaaattattacctatctggccggtccgcgtaattttatccagggcgtggaactatacgagaaatacggtatcaaccgtatgttaaagaagtcatttcgccggcagggagaaacggaaacgatgaaggccattcttttagaggaactacggaagctggccgggctttccgaacgtgaatttaagacaatccggcgcaactccaaacagccgaccgcggtaaaaatggaacccgccagggatgaaacatctaaaacatcggtaaaatacagcgatgatttgctgctggaacttgccgaatctttcggtgtcagcgtggaagaactcgtttcgtctgatttccgggataaggttctttccatggatgaaaatgccgaccgtgtggaagaactggaagaggaactggatcaggcggagaaacgatacaaggcagctccggaaaccgtaaccaaaatgatacgtttccgcgagaaatttaccttcctgaactctccggattgccccgacattctgaaagtacttgtttccgacatgttcaccgcatacgggaagtataaggaagctttcgcccgtctggaagctacgccggatgatgtcaattcactttctacagcacaggaagcgcaggcagttgtggaaaactttatcgctaaccgcgaaatgtgggacgaactggaatattaccgggagaacggaaagattctgggtaaatgtgagaaggtaaaaagtttgtccgtccgtaagggcgtcgagaacctttcagatatcgacatacaaaaggcactgaataacgcccgcgccaacctttcaaaaaataaggcgaaactggaacaggctggggatgatgagaagaaaaaagcgaatgcccttgcattgatccaaaagtgggaaactacacagaaggccatagaggaagaaatcgaggcgcgaaaaaaaaagtagtcgaacttattgccagtctgacagggaaacggcaacggatcacaaagaacctgggccgtttctctcacccttgcgaccgctcggagctggggcaccagctcaaaacattaaccctccggatagaaaaagaagaaagccggcttaaacaactttccgatgattacaaaccaaatatataacgaggattgcctggaggcgttgaaacgtgttccggacaattccgtagattgtataataaccgatccgccttatttcctgggaatgacacataacgggcagaaaggcagttttaaagatttgtctatctgtaaacccttttaccgggatttgttcctggaatttaaccgggtgaagaaacccggtgcttgcgtatatttttttacggactggcgcgggtatgctttttattatccgttgtttgacttgtatttaggcgcgtcaaacatgatcgtctggaacaaacagtcgggcccgggtaatcattacgcctttatacatgagcttattttgtttcattgcggaaagggtgtttctatcggtgccacaaacataatagataatatccggtcttttgcgtccggtgcgaaactggtagaaggtgaaaaggttcatcccacacagaaaccggtggcgttgatccgtaaactgattgaagacagtacaaagccgggtgacctgatcctggacactttcggcggttccggtactacggccgtggcagccattgaaagcggccgcaactttgtattaatggaacaggacgaaatttattatttcacggcacagaaacgaataaaagatgcgtatgaacgatttaacggtggtggatagtatttacctggatgcgcagcaaaaggaggatgtacggcgtttgtcttctttagggtattcgccgaaagacatagccgtttccctggggctttctttggaggatgccgggctttttgtcagggatgcggaaacggtaggaacttccgttaacttcctgatccgggaagggattctggtagcacgtgccgcccctgaaataaaactccatgaagcggcggaaggcggaaacgtggaagctataaaacagctggaggccgtacggaaaagacatactttcgaacgtttaatcgaacaaatggatgacgacgaatttaattaagccctcacgaatagactttgacaaagtggatatcaaccagattcaaaggattctttctaccggtacgctggaagccctcgcgcccgatgaaagggaatattacagccttatggaaatggtacggggacttcgtgcccgtatgcgtataaatggtaagttagtgacaaaggccggtatcatccgccttttgaagtcggaaccttacggcctttcggactggatggcccgccaggtgtacgccgacagtctcaatttcttttatacgcaggataacgtacgcccgcaggctttcgctaatctgtatgctgaaaaggccgaaaattgggcgaatactgtttttcttatgggaaatgtgaaggagggtaagaacctgctgaaactggcggcggaacttcgcggatgttataaggatcaacaggccgaaataccggaggaactgctttcacagaaaagcacggttatttatactaccagccgtaaggatttgggtgttcctgaaatcgaccgtaaggaactggaagagtttattgatgcgattccggaaattcctgttattgtacgtgataatataaaagaggatgcgcgtattaaagcttttgacctgaaaaaacgtatgttgtatgatatcaaagagttcggggaagacaacgaaggtgagtaacgccgatgatgtggagataaaatacggccatataatccaggttctgacagactggatcgatactactatccttgtatctgttgacgggcgcggtatggccaaatccaccgttatacaagccagacgttccgcccgttgtgtggaagaaatgcccggcggtgcgttcgcttttgttgccaatacctacagtaacctggaagataatataatgccggccgttcagaagggctggcagctcatgggcctgatcgaaggggtacactatgtaaaagatacccgcccgcctgaatcctggcggcgtaaatgttcggttatcgtggatgattacaagcatgtttatagcttctggaatggatgtgttattttcatgggatcactggataacccttcgctgcttgccggaaagtctgtaatacatctgttttatgatgaagcgaagtacgacaaggaaatgaaagtaaaccgcgctatgcctattcttcgcggtgatgcgatcacttatggacattcccatttgttccttgggataaccattactaccgacatgccggatatcgatgaaaacgagtacgactggtttttccggtatgtcaagcaaatggacccggaacggatcattaaaatagtacaggcggcaagcgtacgtaatgacttgataatttcccttttacgggaacaaagaaagaacaaaccttcccccttgaaactgaaacgtttgaaacgggatattgaatattacgaccgggctttgttgaagttgagaaaaggacaaacgttctttcttaacgcttcttcattcgctaatgttgagatacttacgattgattatttaaagcggttgtataatggtacgctggagcttcacgaatttaaaaagtcggtggtgggtatgcgtcccggtcttcgcagggatttacgtttctatgtgttgtttggtgaaggacataagtattataacggtaccgcgtctggggaagccgcttacagctcgcgggaactccggtacctgcaccatgataaaacgattgaaggcggtatggacttcggtaatatgctttctttggtgatcggtcaggcggacggtgcttattaccgggtacataagaacttttttgagataccgccgggctggttccgggagatcgccgaccagttcctcaccttcttccagaaccacgaatacaaagaactggatttgtactatgaccgtgcaggtaataactttgagaaacagaaggaggattacgcgggtaagatcaaagacgccatagaaaaagacggcagcgggaaccgtaccggctggatcgtaaacctaaagagccgtaaacaggcagttatccggcaggatgcggaatacgacttcatgcaggagattatgggcggtaccaacaataacctgcctatcctgttggttgatgcggtgaactgtaaagaaatggttagttccgtagaaaaggcaaaggctgaaatcaaataccggggtaactctaaagtagtgttcaaagtgaagaagtccgaaaagctggcaccgaaaaaactaccgatgttatccaccaatttctccgacgctttcaaatacttactgatgcgccccggctggatagctttagtacgaggtaagcggacgctgcaggccgactcgtttgtggatcaatggatagagaacaggcataaaaggtaattgccttgtaacgctggaaaatcggttttccggcgtttttttgtgttaccaggttacgggtacccctccccagaggtcatatttcaccttttagggggagggcaactgctttccgacttctgagcggctcggtcttcggaaggtgtcatttttttagtttttgaaattttctccggtttttgactgtttttcagtcgtttatctgcatttagaccaaaattttacgcgaaaaagcatgttttttatgcgtttttacttcattttttggggcgtttttcatgaattaccgtgtattttggggcggttgcctttcatttttggggatgatattctttataattgtacatattaagtatttttgcagccgtcaaaattacactgcatataaccgtcagaacttacgggtggtacagacgaaagtatacactaattttaagttactgatatgaagaaattattattaattaccgtgttggctattttagtagtagcagctacagcacaagaaactcgaaaaacgttttgtgaaattgttggtacagggaaagtcttaagttctaaagtcaaaatacaaatagacttcggg

SEQ ID NO: 3047 - DNA, 171 bp, Unknown
  gut microbiota DNA sequence
ttcagaggtgtatcaaagttttcccaaagataaactgaaaataaatcttatacaagtaattgttacatccctctcaataatataccattaattttcaggcacttataatcacagaaaagattagataaccctatattgtaacattacaaatatgcattaaatcaagaccta

SEQ ID NO: 3048 - DNA, 790 bp, Unknown
  gut microbiota DNA sequence
acctacgttgtcaccagcttcaccttgatccaacagtttacggaacatttcaacaccagttacaactgatttcttatcttcgcccaaaccaaggatttcaacttcatcacctacgtggataatacctgattcgatacgacctgtagcaacagtaccacgacctgtgatagagaacacgtcttcaaccggcatcaagaatggtttatcaacatcgcgcggaggcagtgggatccaagtatcaactgcatccatcagttccataactttattttcccatttttctacaccgttcaatgcgccaagagcagaaccctggatgataggagtattgtcaccatcaaaatcatagaaagaaagaagttctctcatttccatttcaacgagttccaacatttcagcatcgtctaccatatcgcacttattcaagaatacaaccagacgaggaacgtttacctgacgagccaacaagatatgttcgcgagtctgaggcatcggaccatcagttgcagcacaaacgatgatagcaccatccatctgagcagcaccagttaccatgttctttacgtagtcggcgtgtcccggacagtcaacgtgtgcgtagtgacggttagctgtttcatactcaacgtgtgaagtattgatagtaatacctctttctttttcttcaggagcgttgtcgatagaatcgaaagaacgcaattcagaaagacctttcttagccaacacagtagtgatagcagctgtcaacgttgtcttaccgtggtctacgtgaccgattgtaccaatgttt

SEQ ID NO: 3049 - DNA, 194 bp, Unknown
  gut microbiota DNA sequence
acaagaaaagatagaaccgtcaatacaatctgttatatatgttcatatatatgtaatagatactaggtattaaaatgaagtcaataaattgtacggcatcctgaacagagctataaccggcacatgccgattaaaaaatacttttacaatgaagagtttgatcctggctcaggatgaacgctagctacaggctt

SEQ ID NO: 3050 - DNA, 1792 bp, Unknown
  gut microbiota DNA sequence
ccatatccccatcccggattggggtattccatctgttcttctctcactgcccctttctgcagataaaacttcaccgtatttcccgatgcataaggaatatttcctctcacgatcgcccattcctgcaccaatgctgctgctcctgcaacaacagccgaagaaagactgctccccgaagcctttccaaacgcccctcccggcaatggaatgagcagatctactcccggtgctgccagatcaggtgtcacctggttatttggagtaaaccctctcccagcctgaaaatacagactgttatccagatactgataagctgttgccgtaatacctctggttgaatccccaggtgcagtaacagttatataaggtgtagactccagaaaataagtatccggcgaaatcagcccttgcaccggaagccacatgtgaaacctgcttcccgatattccttttttactgacatttaccttccagatacctgctgccggatgaaagaagcgaaaataaatcagctgtttcccggtcatccgctccatctttacgtaattgaccagcactttcgtctccacaaaaatgaaacttaattcctgagtacctgcaccaagagaactgctcacatacagcttttctcctgccggtgactgtaacgatatcccatagtcatccggcggatctccccaaaattccatggaaaatccttcttctttatccgcaatacgaagttcaacagtatcctgatttttcacatagtccaactctgctgtataatgatgctgtgctgcaccctcatttcctgctgccacagatactgatacctgagaatcttcattaatataatctacatatcgactcagctcactatcaccaacatgtgcgctctgattggtgccaagtcccagacaaacggaaaccggcattcccatctcttgtgccatcttcactgcaaaagaaatccccagcataatgtcgtcttcctgaaataccggtgcctgtggcggatactggtaaaattttctcagataggattttgctttctttaatttcaccacaatgatcgttgctttcggagctgctcctgagaaattttctgtgggtacaaaattgcctgctgccagccctgccatagctgtaccatgtccgttctcatccaatgagggtacaatttcctgtggattctccgacagcaatgcctgattaatttcctctccggtaaaaacctttccataaggaacctgttcatcctcatttcccggaattgtctgatcccagatatatgcaatacggcttacatctccgtttcgaaagattggattcagataatcaatcccggaatcaatcactgcgatcactgtgccctctccctgaagtttcagatagggatgattatgtaaccgcgtaatcccggatgaatttaatgcatccgcatccataaatgtataacacttcggcaaagatgcatacgtataggaattaatttccagcggaccaatctcattcagcggaatatatagaattccaaacaattcattcacaggaagaaattttccacccatattctgtccatgttttacaataaaatccccgtactcttcatcctgtgccggcggtattgacggctcagcatgaatgcccggggggttttcctgctgtatctgcacttcaaaatcgtcaggtccgaacattactgtcctccctggattttttatacatgatatgcacaatatatgctctttatgacaattctaacctttactgttcagactgatattcgcttcctgcttttgtttcttca

SEQ ID NO: 3051 - DNA, 19584 bp, Unknown
  gut microbiota DNA sequence
ttatagtttacagcagacggaaagaaaatttgccgttagaccggagaaaatttgtaaaggagggaaagaaatttatctataagtagattgcatggaagaacggtaacaaccagttcatattctacggttattctgtgcaagaggtgaaatagacgaacctcataaaagcacatattggaactaattatggcctaatcgcggctgaaaagcacctttcgtcctatttttatccttatatgtccaatctgtgctttcatcaaatcagcacctatcttatctttgccggtataaataacccgccaaatttgatagcatgaaaagacagtttattcttacctttatttgtctgttgtttaccttcaccggtatgcaggggaaagtaactacacctataatatatatagatggaaacggagtgatgcgctggagcgacacccacgaagaggcctctttcttcggagtaaactacaccctgccttttgcccatgcctaccgcgcactcggctatttgggactcgaccgcaaagctgccatagataaagatgtatatcatctctcccgcttgggactgaatgcttaccgtattcatctatgggacgtggagttgacagacgggcaaggtaatctccttgaaaacgagcatattgacctcatggattatctaattgccaaacttaaggagcgcaatatccatattgtcatcaccgcacagactaacttcggaaacggataccccgaacggaatatacaaaccggcggcttctcttataaatatgataaatgcgatatgcattctaatccagaagcgattgccgcacaggaaacttatcttcgcgacttggtgaaacatactaatccttatacaggactggcttataaagacgatccttctatcgtaggttttgagatcaataacgaaccctgccattccggtacgaaagaagaagtaaaagcctacatcaaccgtatgctgaaatcaatgagcaaggcgggaaaccgtaaaccagtattttataatgtaagtcacaacggatatgtggcagaagcctattatgaaacgactgttcagggaactacctatcaatggtatcctatcgggctcgtatccggacaaacacaacaagggaatttccttccttacgtagaccgttatgacattcctttcgccggaaaagtgaaagaattcaataagaaagcacggatgatttatgaattcgatccggcggatattatgtactcttatatgtatccggccatggtaaggactttccgcacggccggtttccaatggattacgcagtttgcttatgacccgatagaccttgcgttcgccaatacggagtatcagactcattttctgaatcttgcctataccccgaataaggctatcagcatgaaaattgccgccgaagctgcacggagtttgaaaagaggagaatcgtatgggagttatcctcaggataccatattcggtaatggctttcgcgtcagctatgcggaagatttaagcgagttgaataatggagagaagttttattactccaatcagacaaatacaccacccaaagatgcatcaaagctggtttcaatcgccggatgcggaagctcgccgatagtggactatgaaggtacgggagcttatttcattgattgccttgaatcaggagtatggcgactcgaagtaatgccggatgcggtagtagtcaatgacccttttgccaagccgtcactcaaaaaagaagtagtcagcattatctacggtacttgggatatggcattacgaattccggatttgggcaaagcgtttactctcacagctctcgacaagaagaacgaccggaaagaagaaacagtgacgaatggagtgatttgcgaccttcgtccgggggtttacctgttgaaacgaaacggttgtaccccgcaacagaactggaaagctgattcacgttggaattcgattcgtatcggagagtttgtagctcccactccccgtactatggattataaggtcactcatactccggcaagcattgccgaagcaggcaaagcattgactattaatgcgcaagtagcaggaagcgtttttccggattctgtcattatatacacggataaggtgtctttttggaacgagcataacccgtatataaagatgaaacgtacaagcggctatacatatcaggctatcctgcccgctgcagatataaaggaagattgtttcaagtataacatcatcgtctgccggggcgacagcacccatacttatcccgccggaaattccgtcaccggaagttcctcgggaatccaaggaagtccattggactggaactatacttccgatttctactggactacacgtgttgtcgcttctggtagtgcgatacaactactgaaagtaacggatacagatagccggatagaagcatatacacttcctgaatggaacgacctgcaacgtaccttacttgattcttctccgactgagaagccgttgctccggttctgtttcacaccgaaaggaaaaaatccgcaacacttcctccgcgcattcgtaaaagatgaaatcgaaggaagaaaagataaagtgaaaagttgcactacgctctgtattcgtgtaaatagaaacaaacctcttccgcaaggactcagcgcaggttttgtcacttcggacggatatacctacaaaagtctctgccctgctccgtcagcagaaggcattgtacggattcctctgaaagaactgcgtctaacggataccgcattgttacccatagcttatccgacattcctgaaacagtatttccacccggagacggtaattcctttccgaccggagaagatagagaaactggaactgtcaatgcctggaaccggcaaaccaaccgtagagattgaacttggagacgtgtggctggaatagccggatatgttcacccagcgtcccaaacaataataatacaataaatctattatcaataacacattaattatgaacaggaatatcttaaatctacgccaactgactgtactccttatattgtgtacagcctttttaggaggtatcattcctgcctttgcccaacagggcggcaagaaaatcaccggacaagtgattgatgagaacaaagaaccgatgatcggagtaagtatcctcatcgtgggcacttctaccggtacggttaccgactttgacggtaactacacattgaacgtaccgcagggcaacaaagagttgcaattctcttatgtgggatatgagactaaaatagttgcccttcctacaagcggctctgtactgaacgtacagatgaaaagtgattcacaggtattgagtgatgtagttgttatcggatatggaacgcaacgaaaaagcgacctgaccggttcggtaacaaacgtcagcagcaaagacttcaatatgggactggtcagctctcccgagcaactgattaacggaaaaatctccggcgtgcagattatgtccaatagtggttcgcctacggcgggaagtaccatccgtgtgcgtggcggtgcctcactgaatgccagcaacgacccgttgattgttttggacggtgttcctttggaacagggtggtatcagcgggaacgacggaaactttctgagcctcatcaacccgaacgacattgaaagtatgaccattctgaaagatgcttcttccaccgctatctacggttcgcgtgcatccaacggagtaatccttatcactaccaagaaagggacttcggacaaactgcaaatcacattcagcactaccaactccattcagacacgcaccaaactggcggatatgttaagctacgaccaatttgtcaacacgattcggacacaaggaacttctgcccagcaagctctgttgggaacagcccgcacgaactggaacgatgagatctatcagaatgctttcggtacggataataatctgagcgtctccggaaagattgccaagaactggccgttccgtgtgtcggtaggttattataaccaaagcggtctgctacgcactgataatgcggaacgctatacgggaagcattatgctgactccctctttcttcaaagaccacctgaagctgaatattaacgccaagggttctatcaacaacaatacattcggcaatacagacgctatctgggcagccgctaccatgaacccgaccattcccgtttattcaggactgaataccttcggcggatacacggaagcgacagacaacacaggcgcccctgtcaacggcgccgtaatgaatcccgtaggacttatcaagatgaatgattctcaaagtaacgtaaggcgttttatcggaaatgtcgatgcggattaccgtgttcacttcttccccgatctgaaactgcacgctacactgggctatgactacgcacaaggtaaaggtagcgtatatgttccggcagaagcggcacagaactacaatacttccggtctggattacagctacggccccgaaaagaaggagaaccgtctgcttaccttatatgccaattacaacaagctcgtcgaatctatcaagagtagctttgacgtgacagccggttacgactatcagtactggaaatcgactacaccgctttatagcgaaatgaacacgttgggagagatacaaaagacatccaaagcgaaagatgagcgccacgtgttgctctcctactacggccgtctgaattattctttcgattcacgctatatgctgactacgactatccgccgggacgccacttcccgtttcgccaaaaatgtacgttggggtactttcccttcggtagctttaggctggagagtgacagaagaatctttcctgaaagacaataaagtattgagtaacttgaagctccgtgccagctatggtgtgaccggacagcaggacggtatcggcaattataattacctgcctatttacactcaaagccaaaacggtgcggaagccagcatgggtaacggatacattcatacctaccgtcccagttcctatgtgcccgatttgaaatgggaaacaactacttcctggaacgtcggattcgacttcggcttcctgaaagaccgcattacaggtagcttcgactactacacccgccaaacaaaggacttgattgccacggttcccgccgcagccgggacgaccttcgatcgtaatatcactacaaacgtaggaaatgtagacagtcagggtatcgaattcagcataaacgcaacccctgttcaaactaaagactggaactgggatatcagtttcaatatgacatggcaaaagatgaaagtaaagaacctgtctctcgtagccggtgctgccgcaactaatacttcggtcggcccttatattgacagctatcaggtacagacgttgaccgaaggatatgccccctatatgttctacgtctatcaccagctctatgacgaaaaaaccgggaagcccgtagaaggcgcttatgtagaccttaacggagacggagaaatcaatacggaagatttataccgttaccactctcccgctcctgactatatcctcggtttcagcacttccctacgctggaagaaatggacgttgagcaccagcctgcgtgccaatatcggtaactatgtttacaatgctatggctatgaatgccggagcctgggaaacagtgagctacaactcttatcagttgaacaacctgtcgcgtagttatctgaaaaccggcttcaagtcccgccaatacttgtccgattactatgtggagaatgcttctttcctgaaaatggataatctgtcattgaactataacttcgggcagatttgtaaaggatgcagcttgaatgtcagtgcaatggttcagaatgtattctgtatcacgaaatacagtggtgtagacccggaagtccccaacggagtggataattccttctacccccgcccacgtacattctcacttaacgtaggtttcaacttctaattacttttaaaaacaagcgaatcatgaaaaagatattatatacagctttctatttttgcagcgcattgctgttgagttcctgtataggcgatttggaccaatatccgcatgaagacgaaacatcttccacgatctacacaagtgccgataactataaagccgttttagggaaaatatacgctgctatggtaaccaccggtcaggaaaagggcggtgatccggatttgagcagtaacagcggtcaggattatatgcgttgcttcttcaatctacaagaatgtggaacagatgaagtagcttctacctggctgtcgggtgataacgttaccggtctgacttacttgagctgggatgccaatgacccttgggtatcggatatgtactatcgtatttattacaacattgcattatgtaacgaatttcttcgtaatgctacggatgagagcattgcccggtttacggaacaggaacagactgaaattcgccattaccgtgccgaagcccgtttcatgcgtgccttgttctattatcatgcaatggatttgttccgcaacatcccgtttgtaacagagaacgacccgactgtcggctatctgccaccacgctacacggctgcacaagttttcagctatattgaatcggaactgacaagtatcacaagcgatatgctcgacagagccaactgtccttacggacgggcttcccggggagctgcttataccttattggccaagctgtatctgaacgcggaagtttacatcaatacaccgaaatataccgaatgtatcagtgcttgtaaagaggttatcaagcaagggtattcattggaagatgattacagcaagttattcaacgctgataacgataaacgtactgctaacgaaatcatcttcactttgccggtagacgctacgcataccgtttcgtggggctcttccacttatattgtctgtggtgcggttagtaatacttcggatttgcagaagccggaagattacggagtgaaaagcggttggggtatgttccgtgtacgcggagaaatcccctccctgtttaccggagaagaagataaacgggccatgtttttcactgatgggcaaacactgaacctggataagattgacgaccaaagtaacggttactttgtagagaaatggacgaacctgacggatgcaggagaaacagcttccaataccgcagacggtggcgtaaacacggattatcctttgttccgcctggcagatgtatatctgatgatagcagaagcctttgtacgaggtggaagcggaacaacagcaacggaagttgtcggttatatcaaccaaatccaagaaagagcatacggtgacgacagcaataataaaaacgcaagccaaatcaatctatcgtttattttggacgaacgcgcccgcgaactttattgggaaggacatcgccgtaccgatttaatccgctacggagtattcactaccaatggttacttatggcaatggaaaggcggagtaaaagaaggaacagcggtaaacagccggtacaatatttacccgataccgactaccgagttaaccgccaacccgaacctatacaatgaaaactattaatcacgcttattcgatacaacaatatgaaaaaaataaataccctgttggctttactctccgcactccttttattaggagcgtgtgagaaagacggagagaaattctatctctccagcccggtggagagtgacttaatcgcttctaccaatgccgttgtactgacggaagctactgccaagctttacgcattatcccttgcctggagcgaccagacattgcaaatcagcgacccgagatatcaagcgaccagcggcattcaaactaccgtacaagtatcccggtctgaagatttttcaggcagcattatcgaatctacggaaaacggagtatccaaaagttatacagtcgccgctctgaacatcattgcttacaaactaaatgcaccggctgaagaagccgctcctctttatttccgactggcaggaagcaatggcagcaacatcgctcctgtatatagcaatacagtggcagtcacagtgactccttatcctattgatatgcattacgccagcattatcaacaagggtagcggtcaagattccggtcaggatttctattcggcaaatgctgacggacaatatagcggattcttcggggcagcggcttgggaaggcatttacgtacaggaagcagacggaacaacctggcatacagcccaatccggtggagtaggaactccattcttgttgacaacagacgcagcggaaggaacatgggatatgtggttccccggtcagtcgggatgttatttcgtgaatgtaaataccgctcagaaacaatggaacgccttactgatacccgaactgaatgtaagcggcatagaaggtatcaatatgcaatacagccgtacagataaccaatggaaaggtgtatttacgggtacggaaggtacgaatatcaacattcaacttcaaggaacaggtaagttttacaacaataccagtgtcagcggttccgataatgccattgacgatacaaaagccaaagataccccatttgctttcggtggaactgccggacaactgacattcagtacaggtgagactgcaacagccggaaatataacggtaagtgttccggctacgggagaatgtacgctggttattgaccttaataatcccgaacaatggactgttagcgttacggaaggtggaagtagtgaacctacttatccttcttatctggaaatgcagggtgtaggaaacatggatggaaagggttggttagctacattaaaccctgtttacgacaatagcggcgaacatcacggaagttatcaaggtgtttaccaaatgactaatggttgggataattttaagattgtagaccaaacagccggtatctggtatggatgcgactccaacgatgaatacaaactggcggacggcggacagaatatctggttccaccaggaagaatgtcgtactttcattgtcacagccagtctggccgacatgacttggggagcaacagaaataacccaaatcaatgtctgtggtgagtttaacaattgggatttaaacaaagatttgatgacatacgatgaaacaaacaaagtttggaaagccaccgttatcattgataatctgggcaataactacggtttctacttcctgcttaataatgcagaaaacggtttagtatggaactgggcattaaagggaaataaagaaaaactatacttgaccgacagtaatggaagcggaagtattgttcctgctgaaaccggtacttatgcaattacccttgacattgcttccctaacatttactatggataaacaataatcaacagaacattatgaaacgatttaaacagattctattcatagcttccgccctacttggcggaagccttttcaccgcttgcagcgatgacaatgacacaccggtcttcccggaaaaggaagaagtaacttatgatatgtcaggtttcgccagaggagccgatgtcagctggttaacggaaatggaaagttccggatataagttctatactgccgaagaaaaagaacaggaatgtatgtccctattgcgtgatttaggtatgaatgccattcgcctgcgtgtatgggtaaatccggagaatgacactgatgatgtgagaggttggtgtaacaaaggagatgtattgctcaaagcatggagagcccataacttgggctaccgtatcatgattgactttcattacagcgaccgttgggctgatccttcacagcaagctaaaccccaagcatgggcagattactccgtagagcaattgaagcaagctatcgccgaccatacgaaagatgtactcagtgcattgaaagagaaaggtattgacgtggaatgggtacaagtgggtaacgaaacacatcaaggaatgttgttccctaccggacaaactacaagtgaagaaggaagggttaatttcgcatcatttgtcacagcgggttacgatgctgtaaaagaagtctatccagaagccaaagttattgttcatcttgaccaaggaaataatgccagcctgtacaataggatcttcggctacttacacgaaaacaatgccaaatgggacatcatcggtatgtcactttatccggacatatcaaccgaagacgcacacacaccggacgactgggaagcgatgaataatgattgtatcgccaatatgaaagcgttaatagccaaatacaatactccggtaatgatgtgtgaaatcggtattagttgggattacgaagaagcggaagccttctatacagacttcgttaccaaagccaaacaagtagaccaatgtctgggagtatttacctgggaacctcaatgttacggtaactggaaaggttatagtaaagggatgttcgatgacagtggcaaacccaccaattcatttaatgcttttaagagataaatgaacatgaaacaccaaaaacagttagcaactgcacttttgttggcagctgcttgcagcctgcaagcacagcgtagcgagacattgctcgaaaagaactggaaattcagcaaaggagatatcaaagaggccagtcagccggagtttaatgacacccaatgggaatcagtcgtccttccacatgactgggctatctttggtcctttcgatatgaacaatgatcttcagaatgtggccatcacacaaaattttgaggaaaaggcgtctttgaaaacaggacgcacagggggactgccttatgtaggttccggctggtaccgtactagttttgatactcccgccgacaaagaagtgactctgctctttgacggtgctatgagtgaagcccgcgtttatgtgaatggtaaggaggcttgtttctggcccttcggttacaattctttccattgcaatgtcactcctttcctgaacaaaaacggaaagagtaatacactggccgtacggctggaaaaccgtccgcaatcttcacgctggtatccgggagcgggcttgtaccgcaatgtacacctaattgttactgataaaatccacgtgcctgtatggggaacacagattacgactcctcatgtcagtaaagaatttgcagccgtacgcctgcaaacgaggatagacaatgccggtgaaaaaacacaaatccacatggagacggaaattctttccccagacggaaaggtggttacccgcaaagaaaataccggccgtatcaatcacggacagccgtttgaacagaacttcatcgtaaatgcacctgaactctggtcaccggaaagcccgtcgctctacaaagcggtttctaaaatctatgcagataataagttggtagatacctatacgactcgcttcggtatccgcagcattgaatttatcgccgataaaggtttctacctgaacggagaacaccggaaattccagggtgtatgtaatcatcatgatttaggtccgttgggagcagctatcaatgtagcggcactccgccatcaacttactcttttgaaggatatgggttgtgatgctatccgtacatcgcataatatgccggctccggaactcgttgaattatgtgatgaaatgggatttatgatgatgattgaaccgtttgacgaatgggatattgccaaatgcgacaacggttatcaccgttatttcaacgaatgggcagaacgcgatatgataaatatgcttcataattaccgcaacaatccttgtgtagtgatgtggagtatcggtaatgaagtacctactcaatgcagtcctgtcggttataaagtggccaagttcttgcaggatatctgccaccgtgaagaccctacccgtcccgtgacttgcggtatggatcaagtatcttgtgtgcttgccaacggctttgcagccatgattgacattccgggacttaattatcgcacacagcgttataaagaatcttacgaccagcttccgcagaacttgattcttggtagcgagacggcttccactgtcagttcacggggagtctacaaatttccggtagaagaaaagaaaggtgccaaatatgaagaccaccaatgttcttcgtatgacgtggaagcatgtccgtggtcgaatatcccagatgaagatttcgccttagccgatgataaccactggactatcggacaattcgtatggacaggattcgattatttgggcgaaccttcaccatatgatgtcaattcatggccgaatcatagttctatgtttggtattatcgaccttgccagtatccctaaggaccgctattatctctaccgtagcgtatggaacaaaaatgcagaaacgctacatatccttcctcattggacttggccgggacgcgaaggtgaagtgaccccggtattcgtatataccaactatcctactgccgaactgtttatcaacggaaaaagctacggtaaacaaagcaagaataacagttctttaaagagccgttaccgcttaatgtggatggatgccgtatacgaaccgggcgaagtaaaagttgtagcctacaataaggacggaaaagcagtagcggaaaagacagtacgcactgccggaaagcctcatcatatcgaactggtcagcaaccgcaacgaactgacagccgatggaaaagacctcgcctacgtcactgtgaaagtggtagacaaagatggtaacctctgtcctaccgatagccgcctgattcacttctccgtaaaaggagccggtaagttccgggctgttgctaacggcgaccctaccaatctggaacaattccaccttccgaagatgcacgctttccatggaatgttgacagcgattgtacaggcaggagagattgccggagatcttgtactgactgccaaggcaagtggagtgaaaaccggaacagtccatcttcaggcaaaataaaagggtagaattataagaaatagagaaatccatcctaccctatactattatttaggcacagattaccctgttgctttatgcaatcatagttctaaaaccgtgtaatctgtgcctaaaatattaaagtcgattatttacagataaatgtcactagcaatcccttatggtctgtcggccacacatcaagcggtactatgaattcatcttttgatgtttcctctacacgttgagagcggacaatagattctttcggaccaaacaaaacggctttctttgctttcaatccttttcctttatagaagataaaatcaatacgatcccgttcgtccgctttaggagcccatgttatcttttccggagtttttgccaggttatccgaaggataggtaaatcccggatgcgtcagaggattgggataaatcttacggtagctgtcaataaagccagcttcttccaacaaagtggtaactgtccagggtacaacaaagccgttgtggtcgtacaagttcttatttttctcaatccaatcgcgatgggaaggttcgttgaagtcccctcccacgatcacccgatagccgtttgcaaggtctttctcagcctgggcgataaacatacgaatcgcatcatcccgctgagaggctacattgactttcataatttcatctactgacgccggcagtggaatttctttccaggtagagccgtcatagccacgggcgttataatatgcacagtccagataatccaggtgggcagtataaaccgctaccttctttccgttcacggaacttgttagacgataaatacttccatggtcattcttttccggaaaaaccgtcaaagagtccgtgataggatacttgcttagtaaaccggtatcataagtataaaaagaataatacttcagccccttttcctgaagtgaagcgcacacacgtgccgtgaaattcgttttattgtaattcctcacctcactgaaagtcacaaagtcaggcttcagacggactatctcattgataatagcatcatatccgcctggtatcatggtaccttcctgccatacattccattgcaacactgtaaattcattactcttttgtgccttcacaaaaacagaaaccagcaacaaaatagccggtaatagtagtctttttaatcgcatttttttatatttaaagatgaataataatcaaatagctttccaaaaggattggaagtcacgatatttaccgtagcacaccaattcatccccttcttctactttctcgtcccccggaagttcattcttcacatgaagctccattaaagaaatacccagacaattagttactttatccgcccgcttcaatccgattagttttaagtgaaattcttcgtccagattcaactcattgacaaagtatcctacaaactttttcgggactgtaaacttgacgacataatattccgaatcgacacggaaagcttccacgcttgttccaaaatccagcagttgcaccagactgcgggccgcatcttcttccggtgtcaatatcttctccaagctgaatgcttcaagcacggctttatgcaccatatcaatggcacgggcataaatatgagcaaccttcttttgtttcagcaaagcaaccacacgcaccgatgcgccgaaattctcacctatggcgacaatcactatatcgacactgttcagaggaagcacggacaaagcctgttcatccgttgcatcaatcacaaatgcagtagcaaccttatcttttatactatctacgcggctttcactaatatccgcaccaataatctcgtgtcccagtgccgataactcttcagccaacacacgaccgtagtttcctaaaccgataataatgtacttcatatctttagtttatgataatgttatcactcggataacggtattttgtattctttttctgtttgataattcccagcattaacgttatcaagcccacacgcccgataaacatcaacaacgccactaacaatttacttgcatcacataaattaggtgtcagattcagactggaacctaccgtactaagcgccgacacacattcgaaagtcaatgccattagagaggcttgcggttccagtatacttaatataaagataaaaagaaacagtacgcccaacgacataaccactgtcgcattagaacgacggatagaatcatgagaaagttcccttccgaatacctccacccgttccgagccacgcaacacggccacaagattcaggacaaccactgcaaaagcattcactttcaccccaccggcagtagattgagcaccaccaccaatccacatcagcactaaatagaccaacaaagtctgtacactcaaagaagctaaatcaacactgctgaaaccagccgtcctcggacaagtagcattgaagaaagcctgcgtccacttatctgcaacaggcataccggcaaacgaagcattccactcaaaagcggcaatcgccaatgtaccggttaccaaaagcagaaatgtcataatcaacacaatcctcgtattcagattatacaaatgcgacaccttatgcctttctaacttgcgcgtacgtacaaacttccagaaatgacgcaaatgatacagtacaatatctttgaaattaaccagaataggaaaaccgatacctcccagaataatcagaaaagagacggaaataaacagccagttatggttggtcattaccatagagtttcccaaattaccggaaagtgtagagaaacctgcattacaaaaagcggaaatagaatggaaagcagcaaaagccagttcgccttccaaagtcattccaagtgttccgtggatgctgaaccagatagaaatcatgccgataccttcaatcaccaatgtaaatcccaagatatataataacgtggacaataaggagccaagcgaattggagctaaccatatcacgtaccactaactgattgtaaagagaagtatttcccataaagaacatagcgaagaaactggtcaatgtcattacacctaatcctcctacctggatcagcaggatgataacaacaagtccgccggtagtaaatgtagtcgatacgtcaacgggcaccagccccgtcacacataccgcactggtagccgtaaacaatgaatccacccaggtaatgccattcaccgtgcatcgtggcaacatcaataaccccgtaccaatcagaatgatagccaaaaagctgactgccaatatcagagaaggattagtgcgacgccccaacaaacggaccagtccgttggacaaattcagaaaagaaaaaattagtaataagacaagatgataaaacttcccgtccagaaattcccaaaattgcaggattgccccttcttcttccggacgatggaaaatgaccggtatcaaagtcagatacagcaaaccgctcaaaatccaggccaaccgccggtattgtttctttgtacttctatattcaagtgagatatgaagagtcacatcaaccagaaaaataatccatacagccttatacaggacctgaattttcgccacttcatcaaccgatagcggaaagccatgttcgtaaatcactccgacgatcaacaacaaagacgccagataagtaagtgcttctactaaacccaataagatacgtacataaggtttcagtagtttgttctgatacaacaaaaacttatgataaatcttcatatcgcattttttatataatgccgtgcaaacttaactaaaataacaatcgaatccgattctttgttgacaaaaacatccgaatattaaaaattttgtctacatttggcagcggaaaactaaaaaaccacaatattatgagtgacaaaagaaaacggtatatcctgccggaagaagaaatcccacactactggtacaatattcaggctgacatggtcaataagccaatgcctcctttgcacccaggaacaaaacagccgctgaaagcggaagacctgtatcctattttcgctaaagaactgtgtcatcaggaacttaaccagaccgatgcatggattgaaatcccggaagaagtccgtgaaatgtacaaatactaccgcagtactccgcttgttcgtgcttacggactggaaaaagcgctcggtactccggcacacatttattttaagaatgaaagtgtaagccctatcggctctcataagttgaactccgctttggcacaggcttattactgtaaagaagaaggcgttaccaacgtgactaccgaaaccggtgccggacaatggggggccgctctttcttatgcagccaaagttttcggactcgaagctgccgtttatcaggtgaaaatcagctacgaacagaagccttaccgccgtagtatcatgcagactttcggagcacaggttactccttctccgtccatgtctacccgcgccggaaaagatatcctgactgcacaccctacttatcagggttcactcggaacagctatttccgaagctatcgaacttgctcaaatgactcctaactgcaaatatacacttggttccgtacttagtcatgttacccttcatcagacaattatcggtctggaagcggaaaaacagatggaaatggccggtgaatacccagatgtagtaatcggatgtttcggaggcggttccaactttggtggtatttccttccctttcatgcgtcataacatactggaaggcaagaaaacccgtttcgttgccgccgagcccgcttcttgcccgaaattgacacgcggcaagttccagtatgattttggtgatgaagccggatacaccccattactcccgatgtttacattaggacacaactttgctccggctcatatccatgcaggcggccttcgttatcatggtgcaggtgtcatcgtttcacaattactcaaagataatctcatggaagcggtagatatccagcaactggaatcgttcgaagccggttgcctgtttgcacaaatggaaggtattatccctgctccggagtcctgccatgctatcgcagcagccgttcgcgaagccaataagtgcaaagaaacaggagaagaaaaagtaatcctgttcaacctttccgggcatgggttgattgacatggcttcttacgacaaatatctggcaggtgatttggtgaactactcattaaccgacgaagatattcaaaagaacttggatgagataggcgatttagctaaatagtcttctgatttcaacatccgaacaataaaataagcccggtatcttatgccgggcttatttacttttcattaccatatctctgaaaaagaaagttgtccaaataagatttcatgctaaaaaatgatttatcggctaaaagatgtcctttcctaaagattttcgccaatatcggaaggatttcatctgaattaatttcctattcttaacagaaatccgtacttttgcgcagcattcaatcaaacaaaagccatacaaatatgacacgctacttaaaaaacatggaaaaagaaattatcattgataatcagttggatgaagttgcaagaattgctctatttatcgaagaattaggaatgtcattacaattaccggcaggtatcacaatgagcctcaacctcgctattgaagaagcggttaccaatattatccgttacggctacccttccaataaagaaagtgaaatcatccttcgaacatctgttgctcccggaatgctggttacacaaattatagacgacggaatttcctttgatcctactgccaaagaaacatctgacaatgtacaatctctcgaccaacaactgacacaaggcctgggacttttcctgatccggcgtacaatggacaaagtagaatatcattccacagataatcataacgaattaattcttaccaagaatatagatatggacttcaagcctgaagctactttgaaaaccaatctatgccaaatagaagaagtgacgattctcactattgaagggcgtttggatacagcaaatgccaatacattcaatacagtattacaacctcttttagctagtaaaactccaaatataattgtgaattgcgaaggcttatcatacattagcagttccggtttgcgaagcctgattacactgcaaaagagtgtcatgcaacatggaggtcaacttgtcctggaggcgatgaaaccagaaatacgtaaaatattcgatatgaccggatgctccggactttttacagtacgctaactcatactgtatgaaagtaatccgcatcatagcctgcatcctgctactatctgtattttcattaataaacgtagttcatgcacagtctgttacacttatcccaaaatggacggcacaggcacaatttgcaggttactatgtagcggagaaaatgggcttctacaaagaagaaggacttgatgtacacgtgaaacatccgtctcattcggaaaactcattccagtatcttaaagaaggagagccgcaggcagttatcaccaatctatcacaagcgttaatggaatactttgcaggaaaacgaattgtaaacatcctgcaaacttcacaggaaaacagtttgatgctagtcagccactcaccattaaaaggaattccgtcattacaacacagagaaattgcagtatggaatcatataagtctttgatttcatcattcgagcggactagg

SEQ ID NO: 3052 - DNA, 14130 bp, Unknown
  gut microbiota DNA sequence
ggtagtgtcacgtcaaaccgccctgtggcaatttcacgagcggattccgagaatttctctaatggacggactaaacgccggataatactgtatacaataagtagtaatatcagtataccgaccagaaaagtataaatgatttttcgggaagtactgtccagctcctgaagaataatacggctcggacataccgtgcatactgaccaaccgatttggggaatagtagtatagaatgcgtatgaatcatttccttggttgtcgaagcgtatagtacctgtatgaccggccagcatttcacgtcctatctgttcctgtgaatggttttctgtggcaaaggcttcggaaaatatggtctcattcattattttatcccggtctgcatgagtcagaaaacttccgttgcggctgattaagtaagtataactggagggatatggtttcaggagactgatcgtatcggtgaattgcgtcagggatatactggcgataaagacagcgaacagttcgccacggttgtcatacaaaggctttgagtaagtactcataatgatatttccgcctccgtcgtcataataaggttcactccagtaggcttgtttctgcattttagggataagataccagtccatacaaggataatcataattctgactgcctaatacctgataggttacatgatttgttttgttatcgagcgaagcataaggcataaaatacttgcctttttctttatagtagtttggggtgaaagctatgccgcttttgacaataagtggattattctttacgactgattcgatgataagatgcaatgaatccggcaggtttatgtttctttccaatacccatgtagattgattgatagttgtttctaccgacattagctggctgctgatttctgttgctatgttactcaataatccgtgagtacgttcaatggcgtaactcgttaccttttcatggttataattgtagaacaatgccatgatagtagcaaagacgatcaacgtgaatgagaaaacgtagatacttaaccgggttgcaaaagaatgggaaaatgtgtgtttcatgtcgtgaattggttattttacaaagtcttcgtaacgaatactttttttctttgagatgtctggtggcagtaaaatatcaattgccagatcgaaaccttcacgactcagccgataagggcgttgccctgttttgtctgtttgcaatcgcagtatttcttccagcattttacgctggtgatatcggttggttcctatattgtaatgatgtacctgctccattacaatgtcaagagtctcttccgggtgctcgttcgcccagttccagccacggatacaggctctgactagtttctgtatcgtttcgggatgcttttgataaaattcttcagtaacgtaaagtccatcttcgggcaagttatatccataatcggcaaaacgcatgatatgagtagaatctatctgcattccacattcggcaagttgtggaaactcgttataacttcccaccatacaaatatctactgcttttgatagaaatagattgataccactgttaaaccgtatccattctacttcaatttggtatttgttcgcgattcggtcgagtagttcctgagtaatatgattcattagtctacatgcaaaaatcattgtcgacttacgtgaatgaactgaaagagactactgcaagcaaagaacgtattgaaagcgagctttccatagcacgggaaatacaaatgggcatgctccctaaaatatttcctccttatccggatcgtaatgatgtggatttgcatgccatactgcatcccgccaaagaggtgggtggcgacctttatgatttctatatggacggcaatcatctctatttcctgattggggatgtatcgggaaagggagtacccgcctcactatttatggctatcacccgtagcttattccggacgttatcccagcatgtactttcacctgccaaaatagttacggaaatgaacaattctatttccgacaataatgaatccaatatgtttgtcaccctcattgtcggcatactcgatctggaaacaggcatactgaaactttgcaatgccggtcacaatcctcccatactcatttatcctgatggacaggtttcatatttggaattcaaaactcaaatatttgtaggagtcgtcgaagattttaaatacagtgatgaagaagttgtattggaaaaagaaagcaaattgttcctttataccgacggagtgacagaagctgaaaatataaataaagaactatatggagaagaaaagttattgggaatgttatcagataatgcctcgtcggatgtgcgtactacagtcaacgttgttgtagactccattgcaagccatgtcaaagaagccgaagcaagtgatgacctcaccatcttactaattcaatatgaacccggaacagcaaacagttaagttattatcagtatggaaaaagaaattagaatctcaaacaatttgaacgagatagtagttttagccagttttatagaagaactgggcgaggaactttccctgccggcagaaacggttatgaatatcaatttggcactggaagaagctgtagccaatattatcatgtacgcttaccctcccaaagagcaacatattatcttactgaaagttacttcaaccgaaaaacaactgattttccttctcacagataaaggagcttctttcgatcccacgcaagtagaggaagtagatatcacacttccgattgaggaacgtcctatcggtgggcttggcattttcctgattcgcagcatcatgaatgaaatatcctatcaacgcatcgataacgaaaatcgactaataatgaaaaaagacatttaacataaggacgagaagatattccaaacgtgggaactccggttccaaggctggaaactggagtttctaactaaggaaacctcaagaaactcatggcttgcttttgaagaagaacaatcttaattgttcattcaaacatccgttcctctaaaaatgttatatttgcagattataatcaaaaaagaacaaaatatgaaatatatcggagcacacgtaagtgcatccggcggcgtagaattcgcccccataaatgcgcatgaaataggagcaaatgcttttgcactgttcactaaaaatcaacgccaatggattagcaaaccattgagcgaagaaagtatccggcttttcaaagagaattgtgataagtacggttttcagcctgagtatatcctacctcacgatagttatcttattaatttagggcatcctgaggaagaaggactgaataaaagccgtgccgctttcttggacgaaatgcaacgctgcgagcaactgggcttgagacttctgaattttcaccccggcagctctcttaataaaatagcaacagaagattgcctgtcacttattgcagaaagcattaatatcactctggaaaagacaaaaggagtaacagccgttattgaaaatactgccggacaaggcagtaatctgggaagcgagttttggcaattaaaatatattattgaccgggtagatgataaaagccgggtaggtgtttgccttgatacttgccatacatatacagcaggttacgatattgtgaacgattacgataaagtatttgaagaattcgacaaggaagtaggattcaattatctgcgtggtatgcacttgaatgattcgaagaaagcactgggtacccacgtcgaccgtcacgacagtatcggcgagggactaattggaaaagcattctttgaaagattaatgcaagattcaagatttgataatatacctttggtactcgaaactcctgatgaaagtaagtgggcagaggaaatagcctggttaagaagtgttgagtaaaagacagataacaaaagacattgatatacaaaaatagctggcagacaggatctatcagctatttatatataacggacagctaataaatattcgccatactgactaaaggttcatacagtttttctatatcctgtgaatccatttcgatttgtacctgatcgccgggcattagtttctgccctttaggagtccagtccttccggtcgcgatgaacattaataataatacaacgctccggcagacgaagctcatccacaatctttccgtccagataagaaccgctcatgacctcaaccgataatgtgtagcgtgcttcttctttgaatgcaggtgaatgaatcatgtcttcgtataaagtcacattaagaggttttatttgaagcatttcagtgaaataataagttaatcccccaactacgatcgaaggatagaatacttctaaatgtcccgttatctcggttatcagcacgatagccgttaatggagtgcgaactactgccacaagaaaagcggacatacaaatcaacatgatataactgatattctcgtatgcgataagtccctgttgcaccataatcaatgctacgatttgtccgagaagtcctcctgtcaccaatgtaggaataaaatttccacccggcaagcccgaggaaaaagaaaatatgctaaaaaccaaatgtaatagcatcataccgacaatccaaagaatatgtgtatccggatgcatggcctgggaaagcaagaattgctctcctccaccggtcaaattgaactccgccatagagataagaaaagcaataaagagcaggtacagcattttcacgtattccggatgtttaatggcaggatagatacgtttgacctgaagtgtggtgatagaaaagagttttccgaaaatggaaattacggcggccaatagaagaaacagtttcacctgccccccaaaagtcattcccggcacaatggcatctatatgaaaataaggattcatagggaaaatccaactggcgaccccaccggcaaccactcctgccagcagcgtagtaatagccgttttaggcgcatcgaaccgttcaatggattctataaccagcaacgacgaagccaatggcgcagcaaaagcagccgctaatccggcacctgcaccggcagctaataactgcttccgttcgccgctaagcacccgcccccatttggataccaagtatcccacatatgaacctatctgtacggaaggtccttcacgtcccaaagacagtccggtacttaatgcgagtattccacctacaaacttagccatcaattcccgaaaaggatgtttgtaatcaacccgtccgttaatgactccacgtgtctgtggaatccctccacccgtaatgagaggcattttttttacgagccaggaaacaaatagaagaattccccacatcagcaggaaaagaggaatataccaataccattttaaatgggcatcaaagaaatcgtgacgaagattgaagaaaaactgcaatagataatggtagggcactgcaacaagccccgtcagcagccccacaaagatactaacaaagtaaagccgcgcgtcaatcaacttcagtttaaagattcgccaacggcccttatccttcaatttattgacaaaatcaaacattcggcaaggttttcattgttttcacgtacgacaacaacaatcaaaaccctgctgtggttttcggataaatagaaatttaattctcaattatcgccccatcatattcaaacgaagaatagcatgcaccatgaaataggaacccagcgcattgtaatcagtatcacgaatagcagtggcagtaatcgtacgtatcatcgaaacgtcctgatgaagaatatcatatattttgaaacggagcagtagttgtttccgtttcagaaaggctttcgacaactgacaattccacatcaggttttcgcgggcattgccactatatccatagccggaacgttgaaaacaggtaaggtcgctgaacagttctatcccccatgggaaataatattgtacttccgtgccaaagcggtaatcgtaagtttcggtacgtgtctctttcacattattatgggaattgttgtacagcaattctgcacgggcactgatttccatttgcttcgtgcggtatgttaattgcaagcgttggcgggctgtgagatgtttcactgtactttttacaggagcttctttatttatagtgctatacccgttctggtttctgtattgcagatatgaatatgtacggaatcgccaactacgattcttgaaaggagtattgagagaaaaagagcccatagcacgccagttaccgttcagattaagaggagtggtagttcgcacaccggattcgctatcataggtcacttggttggttatactattaatggtattctccgccaagacggaagcaaccatattccgttggtgtttggcattataggagttgaaatttaatgtgaaagtattcgtatacgaaggcttcagcgaaggattaccgacacggatattcaacgggttggtgcggtccgtcaccggttgaaggtcgcgtatattcggctgacggctttttccccgatatacaatctgcaaacgggtacgtttggagaacttataacggaaattgacggtaggagaaatattaaaaacagactttcgcaacggttcttctgccggagttgccttttccagaagagaacggctgacagacttttgaggttcaaagtcagcaccgatattataattatatttcttacgagaagtacggaccgcaagattaaacaggtgattactatactgattctcaaaacaattgcttgcgtcctcgtcataatcaggagcaaattcttccagttccttgttccagttgtagacaaaacggtcggagttgttcacccgatactggtaactgtaacggaactgaagaaaatgaaaccagggcaaaggttctacataaactaattgtaaccggtagttatacccctccattctatcttcaatcttttgattctttacattcttagcattgtttttgaagtaatgggtagtggaaaggctggttctgtcggtggaagattcatttgtaccataatcaactttcaaggctatatttcttcccattcggctaagtttccgactaagttgcagcatcatggtcagattataggatgaactatgagttgttcctgatgattcccgctcattcagtagcacatcattgccccacccttgctgaaaaccgttactacttctatcattggcagccgtacggtattgagggcgaaaaatcaatgttgtaacagaatccattttccactccaagaaagcattcgctaccaagttatcgtttccctgtcgattgtgtccggtactttcggtgatagatttgtctttacgaagataattgtctaccgtagtacgactgtcctccagacggtcagtgcccatatattgaatgttcgaccgaaatttgacgcgcttccagtcatgagtggcattcactcccaaagaacgggaagtagtcagccctttttgagtacgaagattaccggaagaactggcagactccccctgcatttcagaaaagccttggttgttggtgttattcagattcccgataacagtcaattgggagttatcccggaaacggtttaaagtattggccagttcataacggtctttacttccataaccacccataaaattttccatccaccctcgtttcatattcttcttgaccgacaggtcgagaatcatttcttcttcaccatcgtcaataccggtaagacgggcaagatcggactggcgttcgtatgctttcagcttttctatcatctctaccggaagatttttaagagctgctttcgggtcgtcggaaaagaattcttttccgtccaccaaaatctttttcacttcctttccatgaatcagcagtttgccgtcctcatctatttctccaccgggaagttgtttcaccagttcttccagcatggagccttcgggagtacgataagccgaagcgttaaagacggtagtgtctccttcggtcaccgccataggtgcttgtcccacaacaacggtttcgtttaatgaaatactctccggactcaaagatatattacccaaagtgggtgtcttattatttgctgaaacagatatagtccgataaacagaggtatatccgatataagagatatgcaatagaatagacttgcttttcggaatagtaacagctaactgaaatttaccttgtatatccgtagctcctcccactaataagatgctatccggtaaagccaaaagccggaccgtagcaaacggtaccggctgattggtttcagtatcaacaacacgcccgacaaaacgctctttgccggactgtgcataaacagccaaacttatcagtaacaggacataacaactgatcaaacggtactgaaaagaataaatacgtctgtctatgctcaagttgtgttgatttagtaaaacagaaacttataatataacctaatccctattgttatccttggcgcggagcacgaggtctttgtccctgatgatgtccctgtcccggtttctgaccttttctgcggtcaaactctttcctgaatttattcatattactcttttcctgctgatagattttcataatttgcttttgagaaagtatcttgctgaattcattataatacttctcacgaatatcaagcatcttacggctttgagcaaactggtttctcaacatggtagcaatctgttcgtcagtcattaccggtcgcggagcatcctttttatcggtagccgatgttccttgagctttttcggctcttggtttatggttcatcatgcggcactcgcgcagttctttcagatatttctcgtaaaccggtgtaaacttggcggctgtcgcatcatccagcatcaaggttttaacaatctgattcgtctgcatctgcatcatctgctcttgtgtgggacgttgtttcttctccttattatctctattttgagctgaaagggtcatctggcttcccaacaagagagcagccaaaactacataaataaatttcatcttcataatctttacatttttaatcattgattgagttacttaattcaaaaatatatcgttttcagagaagctgacgagctcttccaactcctcatccgacaattctttaatccatttgtctaccggatccgtaccattacttctgtcgacagccaatgtgttcgaagaagacgatttgacctcatccatttgacgcaaggacggaacgaataaaattccagctaatactgccgctatggcaactaccgtagaaataatcagcttcatgtgagacttccgctgttgtttcaccccggtacgttccattacctttcgttgcacatcctcgaagaatccgtcgggggtagtgtaaggggtccgtttaccaatatcgtcaaaatcaaaatcctttttcatcgttctacctatttagtatatattcctttattttttcttttgcatagtggtaattcactttcagcgtatccaccttactatccagcacccgcgcaatttcgtcatactcaagttcatcgtaataacgtaagttgaatacaagccgttgcttctccggcaaactcaaaatggcttcttgaaacttcaccgccagttcgttctcataatctatataatcagaagccttcagtttgctcatcaattcttcctgtacatcctccgctgatatgactccttcctctttacgactattcaataagcgtaaactttcattcgtcgcaatccggtaaatccaggttgacagtgaactttcttcgcgaaattgatcgatatgtcggaatatccggataaagacctcctgaagcacatcttccgcatcttcgtgagacacgaccagcctacggatataattatatatcggtacctgaaaagagttcatcagcatcttgaatccccgttcacgatccgaggaacaagcttcacgaattttattctcgtttatcatcaattctatatctgagctttattagttagaacgcagaagggtgtggaagttaaatacaagaattcgtattttgcttttattaacaagaaagaggagaaaaagaagtaggatacaaggaaaagaaattgcctccaagacctttacagaggctttagaggcaattcgaatactttatctataaattgtaaataagaagtctgttaccaaaacttattgtgttccgcactatattcaaaaccgacagctttcaactgattcactaattcatccttatttacgtccatatcttcacaaagttcgtcaagtgaagaatagcaatcgcgcaacttcatattgataacgctaaacagcatcatcgggtctttgggtaattccataacatacaatctttttaaaccggacgcaaagttacagcaatctcattgaatggcaaaacaaatcaatcttaaaggaagcagaaattcgggtatatcttttataatatccatttgaaaacaaggaaaattgtaaaataataaataaacagttatccaaccaagtgcttttctacatttctcatactgatgctttttaaaggttaataaattacatttctactaataagagtgctcagacagaaaaatgactgtccattcatccacatacgccattcatttaggatttaaaagatgaataagaagcaatgtactaacgggataacatatactccaatgagatttatgagagtaaatgtagaaaacagttcccgacagccgtagatataattgttaattatacttgtgaatatgtatttcatataaaaatagtttctacatttgtggccgttatgatgaagtacatattctgtatattattaggtatatttttaagttggggattccagttgatttccgacgaaaggcaagaagcatatcggccagaaaccggtagtacctatatacaaacttgtgttaatgcttttcatcccgaaactaaaactatgataaaacaactagggaaagaaaagaaactcgtcaaagcaaaagaaaatacaggaaagcaggactacaatgacagtgacggtgtcttaaatccatcctccttccgttatttctctccttcaaagttacttagattcaatattcattccgttactatccggatattaagttctttaaagattcaacttcctaagaatcaatggacaggtttctcattctatactaattttatcaaatattccgatagatatcacatctatacattaggtcatatactcatttagccattttataccttttatagacatagaaaattcatattttttatgccttatttgttgttcctatcttttccttttaataacaatcaaagtatataaaatggattttttactcaattttatactccatattgaccaatatatggtcatgattgtgcgtgattatcatgcatggacctatgctatcttattcatcataatcttctgtgaaaccggattagtagtcactcctttcctcccgggtgactctttacttttcgttgccggagcgatctctgcgttacccgatatgcctatcagcatacacatactcgttatcatattatttgctgctgccatattaggtgattcatgcaattatatgattgggcatttctttggtcgaaggctattcaacaatcctaaatccaagatattcaagcaaagtcacttggagaaaacgcacgaattttataagaagtatggtggcaaaaccattatcctggcacgctttatccccatagtacgtacatttgcccccttcgttgcaggaatggggaaaatgaattactactattttatggtatataatttggttggtggagctgtctgggtaactatattctgttatgcaggatatttcttcggcgatctcccgtttgtgcaggaaaacctaaaactactcattgtagccattatattcatatccatattgcctgccgtaattgaggtcatacgcaccaagttgaaattttaaactgcccaaaccatagtctgtattcatttgttactaatataaataaagtagaaaaaacaatttaaagtttttacacttatgaaaaattctttttttagtcggtttaccccaaaggaaccgaagtttttcccgttactgaaacaattatcagaagtactttctgcctcatctgttgctttagtagaaagtctgcaacatgaccaaccggcagaacgctcggagtactacaaaaaaatcaaagacctcgaacgggaaggagacagactgacacatctgatttttgatgaattaggaactacattcatcactccctttgaccgtgaagatattcatgacttagcttcttgtatggatgatgtcatcgacggaataaacagttgtgccaaaaggatttccatttataatcctcgtcctatttctgaaagcggaaaagaactgagccgtttgatccaagaagaagctatatatatttgtaaagctatggatgaactcgaaacattccgcaaaaagccgacactcctccgagaatattgctccaaactgcatgaaatcgaaaaccaagcggatgatgtatatgagttcttcatcaccaaactctttgaagaagaaaaagattgtatcgaacttatcaagattaaagaaatcatgcacgaactggaaaagacaaccgatgctgcagagcatgtaggtaaaattctgaaaagcctgattgtaaagtacgcataaaagaagcctgaacacatggaattattagtgactatcattatcctagctctgatattcgactatatcaacggctttcacgatgctgcaaactccattgccactatcgtatctacgagagttcttacccccttccaagctgtattatgggctgccttctttaatttcgttgctttctttatcgctaaatatataataggcggattcggaattgccaacactgtatccaaaaccgtagtagagcaatatattactttaccgattatattagcaggagttattgccgctatcacttggaatctgattacttggtggaaaggtatcccctcctcttcttctcatacccttatcggaggatttgcaggagcagctatcatggcaaacggatttgaagctattcaacttaatatcatcctaaaaattgcagcatttatttttttggctccttttattggcatggtcattgcattcggattcactttgttcgtactttatatctgccggcgagctcatcctcataccgcagagcaatggttcaagagattacaacttgtatcctccgcccttttcagtgtcggacatggtctgaatgactctcagaaagtaatgggtatcatagctgccgccatgatagccgcacattccatgggattggggatgggcataaatagtatcaatgatctgcccgactgggttgccttctcctgttttacggccatttcactcggaaccatgtccggaggttggaagatagtaaaaacaatgggaaccagaatcaccaaagtaactccactggaaggagtgattgccgaaacagcaggtgctttcactctctacatcacggaaatgttgaaaattcctgtaagtacgacacatactatcacaggagcaatcatcggagtaggcgcaacaaaacgcctttctgctgttcgttggggagttaccaaaagcctgatgacggcttggattcttacaattccggtcagcggacttttagcagccggtgtttattttattgtttctttatttatataataaaacatattccagccatataaaatagcgtttagaaacacttgattcccaaacgctgttttatatctatttttagtcctaaatatttatataaatcgctttaagaaaaaacatctattcttctaaccttcctaatcagtaagtacatcataacaagcatatatctctcaaatagaaaaagagctgaaagtcaatgatcttcagctctttttctatatattaagcgtttagcaaattcttatttgacttcctcaaaatcaacagtatctctgtatgagcaacttgcgtacacgtgttgcaattatatcgcaaatccgaaaataagcatccataagcaaccacagctcttgactgcaaaaatataaaattttccaataaatatcgtgatataaacgcataataatcaaaagtatggcacgaatttaacagaatctccac

SEQ ID NO: 3053 - DNA, 12602 bp, Unknown
  gut microbiota DNA sequence
cacttgattcttactttttacacaacctccccgaaggaggagagttgtgaatagtatagacttatatcgaactcacattattttaattttaggaaatcagctctatcctcttagactgatttcttaaaatggattcattttttctttttgcttcccggagggcccggcatgaacggacttctttctccgccttcctgacctgtcggggcttccatgctttcgcccggcatgccacctatggtagcttctgtcactactcttgttccttcggcgacaccgctgatgatctctgtggagattccgtttgtaattcctatttctaccggatgagcagtgaatgtggtgccttcgcgtgtccagactttatgttcgctttcgcaatccttcacaatatcgtttttaccgatcagaggttcttccggtgtaaagcgcaaagccttgttaggaacagacagtacatctttcttgtcgagaatatagattgtgatattggcagtcagacgtggtttcagtttcaggtccggattatgggcggagattaccacctcataagtaaccaccgtgctggtgctggaacttgtactgctggtactgctcgcatctcccaggcgaatctgtgtcactactccttcgaatgtgtcgttcggataagcgtctaccgtgaagctggcacgttgaccttcttcgataccgcctatatcagcttcgtccacgtcggccactacctgcatctttgtcaagtccgcagcaatggtgaacaaggtcggagtttcgaatccggaagcaacagtctgtccggcttccacatcacggctgataactacaccgtcaatcggtgaggtaatcgtggcgtaggacaggttacgctctgcttttgccagagaggctttgctgctgtcgtagttacttttggctttctggtagttatagagggcctgttcgtagtccgtatcactgattaatgatttctcgtgcagacctttgctgcgttggaagttcttttcctgatattcgtattcggctttcgcaccgtcataggttgctttctgtgaagctagttcgctttgcagggtgatgcggtccatttcggctatcaactgtcctttggttactaccgagttatagtccacatagattttgtcgatgataccggatacctgtgtaccgacttctacttccgttaccggttcgatcgttccggtagcagtcaccgaatttgaaatatcgcctttgctgacagtagtggtggcatacgtaaccttgtgtttggcgggtgaacctgcaaagaaccagattcctgctcccacaaccacaacgactgccacagcgattagaataatctttttcgttttcattcgtttattatgcttttacttatttataatgctgatattcgattccttacaaagctagtttgtcgccttgatagaacttcaacaactgtgtattcagtattgccatatatttggcttgaagctgttcttgctgtgcttgtagcaagttgttcttttcagtgagaagttctactgtatttttcattcccagattgaattgctcgctaatcaggttgtagctgatttgcgtacttttcagtttctcgttggctgctgcatagcgttgctgtgcactgttggcgtcgagccaaagtccttcaatcgttttgtataaggctttctgttcgtcgagcaatgacagcatactcgtttcatattgtaacttggctttctgtacggcactctttgtctgtcgattattgaaaataggcacgctgacagacaatccgatggaattgttccagccattttttacttgttcgccgaaagtgaaatcactaccactggtatgattcgttccgattcccgcgctgaggctgacggtaggaaggtagccggacttagcaatgtcgattcccaattcggaagcgttcacattgagtttgctcgcttcgatttcgggacgaagggcaagggcactcacatacacatctcttttggcgggcaacggagacagtacattctcgtcggacagagcggggagatagatgttcatttcattctccccgtcgagttcgagtagttgtttcagttgtaatttgtaatcttgcagagtggcttgcgctgtgacaagttggtaacggtcggtactgacctgcgcttccaattgtgcgaaatcgcttttggcaatgcttccggcattcagaagttcctgaccgcggtcgcgctgtgcaatggagacttgcagcgtattttcatttactctgacagactctgctgcataaagtatctgaatatatatttgtgcaatagactcctgaatactgttctccgaagtcgctacatccagttcggctacctgattgttcagtttctcctgttggattgtcttcagccgtttgctaccattataaagagtccacgaggcatttagtccgtagtttccattgtaactggttttactgttggtactgataatctcactgccactgactctgctacttgattcctgatacggtcggttcacaacctgctggctggtagagaaagagaggctggggaacaaggcagccttggctgtcttcacatcaatctgcgtgcttgccgcagtaacccgatttttacgaatcgtaatattctgctcaagggcatagtcgatacacgattgcaagtcccattgagcgggaagctttgtttcgttcagtgtatcgacttgcagagaagaattttgggcagatatgccgggcagcatacctgcacccaaaaatgctatcactgtcaatcttcttacgtttatcatattcattcttctattaattaaccggaaacgaaggtacgtacatattataatagcagcaaaagtgatagacggattgcggaatttcgccgttaaatgatttttttctgtcgataggcaggtttttttagaaaaacacgacaaattctgcaacaattcaagggatttgtttgttttaattataaaaattgtatatttgtactcattacaaatcttgacgtagaaatatgaagaatacactactttccgtctggaacttctacctggaaggctttcgaagtatgactttggggcgtactctgtggattattatccttttgaaattattcatcatgttctttattctgaagttgttcttcttccccgactttcttggcgaccaccctacggatgccgacaagggaacgtatgtgggaaatgaactgatacaacgtgctcttcccgagaaatctactgatttttaacttttaaactacataagattatgattgaaagtattgacacctcgctgatcgattggtcgagagcccaatttgcgatgacagctatgtaccactggatttttgttccccttacgctcggactggcggtggtaatgggaataatggagacgctgtattataaaacaggcaatgaattctggaaacggacagccaaattttggatgaaacttttcggtattaactttgccattggtgtggcaaccggtttgattctggaatttgaatttggtacgaattggagtaattattcgtggttcgtaggcgatatcttcggtgcgccgttggctattgaagggattttggccttcttcatggaagctacgtttatagcggtgatgttcttcggctgggagaaagtgagcaagcgttttcatttggcttctacctggctgacaggtctgggagctacaatttccgcctggtggattcttgttgccaatgcttggatgcaacatccggtgggcatggagttcaatcctgatacggttcgtaatgaaatggtggacttttgggcggtggctacttcgcctgtggccgtcaataaattctttcatacggtgttgtccggctgggtgctgggtggcgtgtttgtagtaggcattggttgctggtatttgttgaagaagcgcaatcgtgagtttgcacttgccagcataaagattggtgctatcttcggattggtggcatcactgctttccgtttggacaggcgacggctccggttatcagattgcgcagacgcagccgatgaaacttgccgctgtggaaggattgtatgagggtggtacgaatgtgggtttggtgggaatcggcatgctgaatcccgaaaagaagacttataatgacggaaaagaacctttcctgttccgtattgagataccgagtatgctttctttccttgccgagcgtgacgccaatgcttatgttccgggaattacgaatattatcgaaggtggctatcaacagaaagacggtacgattgctctttcggctgccgaaaagattgaacggggtaaaacggctatcggtgcgctggctgcttaccgtgctgcgaagagtgccgggaacgaggaggatgcgcaagtggcatacaaagtgttgcaggagaatattccttatttcggatacggatatattaaggatgtgaatcagttggttccgaatgttcctctgaacttttatgccttccgtgtcatggtgattctgggtggatatttcattctgttctttattgttgtactgttctttatctataaaaaggatttaagcaaaatgcgctggatgcattgggtggctttactgacgattcctctggcttacattgccggacaagccggttgggtggttgccgaatgtggccgtcaaccgtgggctatccgggatctgcttcctacatcggcggctatctccaagttggatgtcggctctgttcagactactttctttatcttcctgtttttatttaccgtaatgctgattgcggaaataggaatcatgataagggctatcaagaaggggccggaggtttaatacctggaatctgatatcagagcgtcatacataatacttaaaacttaatacttaaaatatatgtatatatttctacaacaatattggtggctgatcgtttccttgctgggagccatacttgtgttcttattgtttgtgcaaggaggtaattcgttattgttctgtctgggcaagacggaagaacatcgcaagatgttggtaaattctaccggtcgcaaatgggaatttacgtttactacattggtaacgttcggaggtgctttctttgcttcatttcctttattttatagtaccagtttcggcggagcttattggctttggatgattattcttttcagttttgtgttgcaggctgtcagctatgaatttcagagtaaggcaggcaatctgttaggtaaaaagacataccggacgtttttggtgattaacggggtagtggggcctttgttgcttggcggggcagttgctacctttttcaccggttctgatttttatatcaataaggcgaatatgacggataccattatgccggttatcagtcattggggcaatgggtggcatggacttgatgcattgaccaatatctggaatgtgattctggggctggctgtatttttcctcgctcgtgtgttgggcgcactttatttcattaataatatagatgataaagaattgaccgataaatgccgtcgtgccgtactgaataatacggttttattcttattattctttctggctttcgtcatccgtacattggtatccgacggttttgccgtaaatcctgatacgcaggaggtttatatgcagccattcaagtactttactaactttatcgaaatgccggttgtattaatccttttccttatcggagtggtattggttctctttggaatcggaaagacggttcttaaaaagacttttgataagggaatctggtttacgggcattggcactgtgctgacggttttatccctgttattggtagccggatacaacaatactgcttattatccgtcttatacggatttgcaaagttcattgactctggccaatagctgttccagcgaatttacgcttaaaacaatggcgtatgtttctattcttgttccgttcgttcttgcctatatattctatgcatggcgcagcatcgaccgtcataagattacagagaaagaaatggatgagggagggcattcttactaaacgatacgggtcggacgttgataatgaatcaggaacgataattttgattaaaacgataaacggtgaacaagcttgcgatagatgcgcaacttgttcaccgttcatttttatcgttctccgtcgttttatttattcacaacgttttccggtgttccggcaatgtatgcttggaggttactgatcgccatattcatcaggcgttcgcgagcttcggttgtagcccatgcgatatgcggggtgatgtagcagttctttgcagtcagtaacggattgtcggcacgaggaggttcggtagaaagcacgtctactccggcagcataaatcttcccgctgttcagtgcgtctgccaagtcttgttcgttgatgagcggaccacggcctgtattgataagaatagcgttcggcttcatcatagcgagacggcgggcgttcaccagttcgtgagtttccggggtaagcgggcagtgaaggctgacaatatcacattcgctgaacagttggtctaagtccattttcttgatttccggcggcaactggaagtgtgacttggaagtcagtgcataaacctgcataccgaaaccgatagcaacacgagcagttgtgtaacctgtatttcccagtccgaccaaaccgattttcttgtctctcagttccattaaaggagtatcccaaaaacagaaatccttgttgtttgtccaacgacctttgtggacttcttccgaatggcgctgtacttgttgggagatattcaggatatgtgcaaataccatttgagctacggaagcggtgctgtatgcgggaatattggtaacaatgataccgcgttctttggcagcagccgtatcgacaacgttgtatccggtagccaatacaccgatatatttcagttcgggcaaggcagccatgtggtctgcattgatgattaccttgttagtcagaattacttctgcaccggctgaacgttctaatacttcttcgggggcggtacggtcgtaaatcgtacattctccgagagcctttaaaccttcccaggatatatctccgggattggcggcaaagccgtctaaaataacaattttcattttctattttagtattaataatatgttatacgtttcttgttgttttattttgtttctgccattagcctacttcttgaatttgtctccccagagctgtatcatccgttcggcatgtttctgttcggcaggattgttctgcggttgccatatccgtttgtctttcagttcatccggcaggaattgctgtttgacgaaattgccttcgtagctgtgggcatatttatattcctgtccgtaccctaattgcttcatcagctttgtcggtgcattgcgcaagtgcagggggacaggcagattacccgtagaacggactaattccaatgcgtcattaatagcgctataagcagaattacttttgggactggtggccagataaatggtcgtttcggccagaggaattcttccttcgggccaaccgattttcatcaatgtctcaaaacaggcgttggcaagaagtaatgcattcggattagccaaaccgatgtcttcggcagcagaaataacaagtctgcgggcaatgaaagcaggatcttcacctccttcaaccatacgggcgagccagtagatagcaccgtcgggatcgctgccgcggatagacttgatgaaagcggagatgatgtcataatgcatttccccgtctttgtcataagcaagcggattctgttgcagtcgttctgtcaccatatcgtcagtgatgacaacagtatcgtcagtgtccgactctacaacgagttccagtatattaagcaacttgcgtgcgtctccaccggagaagcgcaacatagctgtggtttctttcagttcaatcttacgttctttcagtaccgtgtctgtactaatggcacgttccagaagttccagcagatcttctttctccagagatttcagcacataaagctggcagcgggacaagagaggacgaatcacttcgaacgacgggttctccgtggtggcaccgataagtgtcaccgtaccgttttccactgctcccaacaaagagtcctgctgcgacttgctaaaccgatgaatttcatcgataaacagaatcgggctggattgggagaaaaatcggttgctcttggcacggtctatcacttcgcggacatctttcacgccggaagtcactgcacttaaagtataaaacggagtttccagtttgttggcgataatctgtgccagtgtcgtttttcccactccgggaggtccccagagaataaacgaagaaatgcgtcctgcgtcaatcatcttccgcaggatagcgcctggtcccactaagtgtttctgaccgatatattcatccagagtttttggccgtaaccgttctgctaaaggttgcataagtttagaataccattaataccatgaaacgaataccgtttttgttgatacccggattatcacggtaagtgaaacgatgtacatattcaacgtgcagcaacttgaaaatgttgtaaatgccgacgcttgcttctacgtaaggtactttcgggtccattacgaaactggtgaatttaccgtcgcgcgtcgggaaacggaacaagtcgggattgctgcttttaaacggattgttcttgtctgtcaacgtaccccacaatgcgcggacacggaacatttctctccatttcaagtttttgagtaaaggaatgcggttgaacaactttccattcatatcgtaggatatggacatggaagcgaagcggtcgttcaggaattccatattgttaatcaaacagaacgtttcgcgctgggtgatatatgacaagttggcttccggcaaaatcaacagtgggaaaggaacggtattccactctgcgcctgccttcacgctgcaatcaatcttgccccatgaggcgggaagccagaaacgtttccagatacttgcttccgtacggttgaaattatattctcctcccagcactcctttgaatcccatggcatgagtcagcgtaaagaccggagcgtctaaagatacggggacacggcgttgttttgagttgacgaacgactctcccggtgcataacgcaatgtcatgctggcttcggaggttgtgacgtcgtgtacgcgtgtctgcgcagcgtcattccgcagatattccagtttcccggtcggctcgtcgttacggtgacggagcatggcttttacaccgaatccggtaggcgtttccagttcataattgatagtcgcgtcgcgcatgtatgacatctggtctacggtggtcgttttcagtgacaggaagatattatccttgtcagtaaacagaaacttgtccattggagacattacatcataactataagtggcggagatgtaatgtttgggaaattcccataccacataatcacgtttgttgaacgaataagtcagcgttccgctatatttccagcgcttgtctttcagaccgtatgctccgtaaccgctaaggaaccagtgcggattgaggtttgcggtcgtcataccactcaaccggaaacgggttccgtcgatgtagttgctcgaaatcatggtgttgatagggccgatgtcgaacttgttcggacggcctttgccggatgtttccacaaagttctcaatcagggcttttgcaccgaagatgatgtatttgaatcccggaatctgttcgagacgattaacgaaaaggtccatagtgctttcttttttagtcagcggcacctggcgcacgcttgcccagtattcgtcacttttcgaaagcatatccgcctcttttatcacctctcctttcaatcggaagagtcgcggctctatcgggtcgaactgataattcgtatatttcgtggtacgttctacttgtagtcctcctgccgttttgttggaactccatgaaaggtctacggtcatgttgtcatccgacaatacccagtttccgttggggagttgttcgtattgttgcacgatatccatgcggttgacgaagttgactccggtcttttttggcaggttcatggtacatttctgaacggcatatgtagaatcgttcagcacgtatagatgtccggtaaaaccgaaatcctgtgagttttgcggaacgaaagtcagatgtacacattcgcgtttgtcaaccattaatgtatccattaggtagtatttataaaatgaaatggcactgctgccgatagggctgacaaaacgttgttgcaacaaacggatatcgtcctcgtagatgttaatatcggcaaaaacatcctttaatacggtgccgagcatatctccggtgttgaagaactcttcgataccgttagagttttttcctttaataatggtctttttgttctgagggtctttgcggaagatagtttgcgaagctgtttcttgcacggagataggaagaatcagtttgttggtagtttccgaaacttccacctgatctttcaggaaagaatatttcttataaatccctttttccagtttttccggtgtgagatcgttgatcgacattttcatcttctcgtacttgtcgtactggtagtaatcgttcacttcgaggacttgtgcctttttgtgttcgatgactttcttcataaattcgactgccgggttattcttgcgggagtacttttcctttttgggctttactactacttcgttcaatacgacattgtccggggccagttgtatgttgattgtctggttgcctgaaccgactttcaccgttttactgatataccccactgcggagaacacgagtgtccccccgtttctgcgggtttcaagcttatattctccgtcgatattggtgatagttcccatgtctcttttttcctggtagtagacagagatatacatcaatggctcatgggttacggaatctgtaaccacccctttaatttgctgcgcaaaagcatttgaacctgccaatacgagtaagaacagtataagtattttgctatatcgttgtttcataacgttcgtagtagggctgcaaagttaacaaataactcggatgttaacagaatatataactttttttacccatagttttttgttatttgcaagctgttatcgtttgacaatgaaaggaattagtgggtgattcgcctttctataaatgagtatcccgcttgttacatttggtttcccggcttgaaacactttgttccctcatgagaaatctttggtttcgctatatgaaacccaaagtttcaagcgtctgaaactaaagtttctccgtgatgaaactaaagtttcccattgatgaaactatggtttctcataaggaaacttttagtttcccggcacgaaactaaaattggtatgccgggaaatgataaaaggtatatagggcgatattatttgccggtaaggatctgtacaatgcgttcggctgtacgtccgtcccagcgttcgggaagctcacctcgtttccattcacctttcatcagtgtatccattgccttggcaagttcggcagggtcttcaccgactaattcgttagtccccattcgccaagtttccgggtgttcggcatacgtattcagcgtgatgcagggaatgcccaggaaagtagcttcttcggccacgttgccggaatctgtgatgattccttttgctttgttgatgagatatccgaagaagaggtagttctgcggtggcatgatatgaagattcggggcttcgatgcctaactctttgattgcgttgcgtacataagtatgtaaaggtgcaacgataggcgttcctgctgatttttcaatgattgtattcaaaagctggcgcaggttctctttgtcgttgaggagtacgcggcggttgagagtgagcaggagatagttaccttctttcagtcccaatacggaaaaccaaatcggtttgagtaaccggttccggttatagcgaatcgtatcaatcaagatattaccgacataatatacattttcgctttctgttcctgtttggttcaggttacggttggcaaccattccggctgtgaacagatagtcggacaatccgtccgtaatcatgcggttcacttctttcggcattttcatatcgaaagaacgggtaccggctacgaggtgggcaactttgattccttgtttcttggcaacgatagcgcagctcatggtggcagtgaggtcgtctaccacgagaacaacgtgtgccgggttttcagtcaattcctgctcgaaggctaccatgattccggctgtcaaacttgttggattactgctttccactcccaaatacacatcgggagccttcatgtcgaggtctgaaaacagtgaagcatccaaactggtatcatcttttctacctgtatataccaggcggtaagagatacttttacccagcgcccgtgcggcttcaatagcccgtgtaatgggtgctatcttcatgaaattggggcgtgccccggcaacaattgttattttcatactgtttctatcaaattcagtttaattcttgaagcaaaagtacattttcttacggaatttatttgttactttgcaaacagaagttacgaaaagagtgtaattta

SEQ ID NO: 3054 - DNA, 15390 bp, Unknown
  gut microbiota DNA sequence
aaagaaaatgaaccgatttttatagtcaatgaaaaaaaagaaggcgcatcgtgtattacgacacaccttctctatttttctaccggtcagtatcttctatttcccgtttgcggtatagcgtaagctgcttacggagtgagtccatttcgcgtttcatctcctccattctttccaacaagtgatgaatggcatcaatgccttccatattaatggacaagtcataatacatcctgctataacgttccacgtccggaagttcggacacgagcagataatgttcactaccttcagtgtgtacgttaattaaaccgccttcttccaacaattcaatgaatgaaggctcaatatgacatttgtgacagtattcactgacaataattaattcggtctgcatggtactcattcattttagttcatactctgtaattgacggaacaattccttctgtgcatccgtcaaattcgtaggaatcttaacggaataggtcacaatcaggtcaccgaattgtccttccttcttataaaccgggaatccttttcctttcaagcgtactttcgtaccgttctgtgtttccggctttatcttcagtttcactttactgtccaaagtgtcgactatcttctcacctcccaatacggcagtgtagagatctatttccacatcaacatacaggtcgtcgcccaagcgtttgaaaacaggatcttcggcaatgacaaatgtaatgtacaagtcgcctgcaggtcccccgttgataccttcggctccgtagcccttcagcttaatcacctgaccgtcggctacaccggcaggaatagtgatacgtacctgtttaccgttgacggtcaatatctgtttatgcgtctgagcagcatcacgaagcgacagatgaagctccgcattaaagtcctgtccacggaatcccgcagcaccttgtcccttgcctcccctgtggccgaacatcgactcgaagaagtcagagaagccactggcgttacctccggaaaagccttctccatcggagctataccaatatgttccgttaccatcggagaaaccttgtcctcctccaccgaatccgccaaagccgcccgcaccaccaaagcctccggcctgttgctgcgctcgtttctgtgcttcgaattcatcagcatgcttccaatgttctccgtactcatcatactttttacgtttctcagggtcactcagtacctcattggcttcattgatttcctgaaacttatcctttgcactagggtcgttaggattcaagtcaggatgatacttccgggccaacttacgaaaagcctttttgatatcatcttgtgaagcactcttgtcaactccaagaatcttgtaataatctatataggccatgttttatgaatttaatcgttcatacatcatattgcaaataacacgccaatctgtcttttggatgaaaattttagcaagtattaagtttaggtgttgatttcctgtttttccaacatatggaagtcctgtttcttcatccctaaatcatccaacggacgaggttcgttatggtcgttcagatagactctcggcctcattttataaagaggggttgccacagattgcgaatcatcccggtaaggagtttttattcctcccaagtccagcatcgtcggaaagaaggaactgctggaggaaatattcttttctttattagccgtcacagcttcccagtgttcgggataggcttcccgataactgtcggacatccagataagaaacggaatatgaagctgataataggacggtacaggtgaggcatgaaggaaaagatgacgggggtcgtcaaaaatatcttctccgtgatcggatgtataaatcaaggctgcatctgtaccttgattctccaacataccgataaggcgtgccaataagctgtccgtgtaacggacagagttatcgtatgcatttaccagattatcccgaaatttcctttccgcctcaaccggatagtccggtgtaaagaaagcgtctcccgacggataacgttcccgatagttgaaatgagaaccataggtgtgaaggacgataaattgtttttttgcacctttggccagttcctgctctaccaatttcaagagttcattgtcagaaggattataggaaaaatccaacgaatcctcttttataaaatcaaaggtatcggcttcccttccgaaaaagtcgatgaaagaatgattaaaacgttggttagagaaaaaagctgtccggaagcccgcttctttaaaggcagtaatgattcctttccgatggtaaatagagtcataactgcaagcagtaacgtcagacaataacataggcacacttttatgcgtggtattcgattctgtcagcactttcgggaaagcaaccaatcccgactgctggacaagcaacggattcgtttcccgttcatagccatacagttgccagtttaatgcacgggaggtttcgcccactaccatcacgtacacctcttgtttctcctccggatgtgtagcttgggcatggaaggtaaagtctttggaagtgtggtgatagttctgcgtcaaggcagtccgctgaaaagcaagccctacgttataacagacattcaaagggtataagtccgatttcagttcatagccgggatcctgtacgtatgccccggcaaggctgagaagggagactccgaagacgacgaaagcccttttacgttctctgcggataaacgctgccgataacattcgttttcggacgattgaaatggtagccaacaccaaagccggtatatacagtatcaccacaacgacaatggcaggcgtcagattgccaagcagttccatagcttcgctcgaattggtggtcaccaggttcagaaacatatcgacagcaataatggactgcccgaacagatagagcaacacaatctggaacgctccaaaaaagagaaacaggaacaaaatccaaagcattttaccgcaatttctcgatagtgtcattagcaggtaataacatccaaaaggtaacaggacattgcagacctttgctataaacgacagcggctccgtaaaacagagcacaatattaggtactatcaggatgaacagaaacaagtaaaacagatgttcctgatcctccaaccatttctttatgttcttaaaaagcttcatttatattaaaaataaatccggtctggtgtttaccaaaacctaaatccaaacgtacatttactctctttttaaattcccaacgataaccaaaaccataattaggaagaatatgtttcggagtaaacgcagaaaattccgggaagattgttcctgcccctgcccatacagctaccccatttcgcttccagacatgctggcgaagttctatttgtgcatccatagcacacttgtcacgataacgtccttcataatatccgcgcatcgaataagaacttcccaatgttgccattaatccccaaggggtatctccataagtcagcagagtgtgaaactgtccggccaatatccctcccttccatatagggtgataataactggtggtcagttccgtactgctgaaagcatatttattaccaaaaaaggcggggctgaaccgttggtctatcctcagataatatccacgataagcattggtcaggaaatcacgtgaatcataaagaagggaaaggccgagactcgtattcgttgtccgtgccgccattccttcccaaagctccggtttttctaaatcccgtccgtcaatatagtcgaatacggccattggaccgatataaaagttctttgccattcggaacataaaatcgacttttacctgtgcctgaaaacgtttatagtcactttcgttatcggagtttgccccattgtcgtatcctctcccccaataaaggctggggaaagaataaaaataaaggttataattcaaccgatatttatcctgcggaaacaaatgatttccacgaactcccaacaaatagaagccgacagtcgacacatctccataaagagaaacatttgagggaggaagaatcgtatcagcagaatcggtacgatacaagcctgccgccaccagcccgagcccaaacttggtatcactggagtagtgaggaccacctatcacactgaaatcaaactttttattctttttctccttgttggcgtcattgaagtagtcaaggaatttcttgaagaagctgcgctttgccggaacagaatcgttaacggccgcaacagatatagagtcttccggcagttctattttagtagaatgcgtctgcgcactaataaaggtttgtgtcaataataatagtgcgaataagattagcttgttctgtctagtattcatatataataagaagttgaaaactctagagacaaagttagtttcaaacttcttattacaacagcgttatgtgggcttttgttgtcccctttttcccttttaacgttttaaaagtcgaatgaattcatcaacatcttcttccgttgtatcaaaagaagttaccagacgaatttcatccttatcttcattccaaaaataaaagaaataagattccaacattctatcaataataggacggggcattgtaaggaacaactggttactttctaccttttgagtaaaagttacttccgggagtttctttaactctttgtaaagcttagctgccattacgttggcatgtgtggcattcttcaaccaaagttcatccgtcagataagcggtgaactggcaagagagatagcgcatcttcgaagccagttgggcagactgcttacggacaaaacgggcttctttctgcaagtccttattgaatacaataacacactcccccatcatcagtccgttcttcgttccgccgaaactaaggacatccactccgcaatccacagtcaacgccttaaaagaaagccggagggcggcacaggcattggcaattctagctccgtccatgtggacatacataccgttcaaatgagcaaagtccgtcagacgtttcagttcctcgggcgtatagatagttcccatttccgtacattgggagatgtagagggctttcggttgagaatgatgctggtcaccgaaaccatgcaagtaaggtcgcatcagctcgggagtcagtttaccatcgggagtagcaatcggacgaatctgacaacctgtcatcttcacgggagagccgcattcgtcaacataaatatgggctgtttcggcacagaaaatagaatgatacggacgcgtcattaactgcaacgccaccacattgctacccgttccgttgaatacaaacaacggcacacagtcttgtgtaaaagtctcttttatttttgcaacggcttcttccgtccatttatcgtctccataacctaatgcatggtctgtgtttgcccggttcaacgctgccattaccaatggatgcacaccggaattattatcagaggcaaaacttctcattgtttccttacattttaaattggatggcaaagtaacagatttattttcaaaaatcaagtagcacgaagatatatctaaaaacaaaaatccccgaaacactaactacacgttaccactccgggaatttctttgttttcagcaagtaccaaactcctttagccgatgtaaacatttacacagagatatacatagagttcttcatcacattggtcaaactctatcttattctctcttgataaccagcctaaagcggcacccagctctttatctttcagcccggatttccttttcagagttccgtagccccatttctcattattgctaagcagctgccaaactttaccggcattcaaaccgatttcatttctgtccatttttctagagttatttagaggtttaaaacattaggttaagattttacctagaaagataacaaaaggacattacatttgtttatgctactttaccaaaaacctgttactaatttatttttaacataaaagccgcgatgtgtaccgacacaataccggtattagcgtatgttaaaatagaacttttctttgcagacatctgttattatcagagaatcaatcctaaacctattacagatatggcaaagaaaatagcagaacaactaatagacactctggcagaatcgggagtggaacgtatttacgccgtgacaggcgatagtctgaatgaagtaaacgaagctgtcaggaagaataataaaataaaatggatacacgtgcggcacgaagaaacgggagcgtatgccgccgcagcagaagcgcaactgacaggacgtccgggatgttgtgccggtagcagcggtccgggacacgtgcatcttatcaacggtttgtatgacgcacaacggtcgggtgcaccggtgatagctattgcctccactatcccaagcagagaattcggtactgaatattttcaggagaccaatacaatcaagcttttcaatgattgcagttattataatgaagtagccactactcccaagcaatttccgcgtatgctccagtcggccattcagacagctattactcgtaaaggagtagccgtagtcggcttaccgggagatctggcaaaggcatcggccgtttctgtcgattcgtcagtccggaactatttcacccggccggaagtctgtccttcggaagaggaccttatactgttggccgatttattgaacagtcatgaacgtatcaccttattctgtggcatcggttgccgtggggcgcacgaagaagtgattgccctttccgagaaactgaatgccccggtagcatatacttttaaaggaaaaatggaagtgcaatacgaaaatccgtacgaggtaggaatgaccggattattgggaatgccttcaggatattacagtatgcacgaagcggaagtacttctcatgctcggcacggattttccttactctgctttcctgcccgatgatatcaaaatagcccagatagatataaagcccgaacgcctgggacgccgcgccaaagtagacatcggactttgtggagatgtgaaaatgactattcaggcattattacgtatgctgaccccgaaaacaaatgatactttcctgttgaaacagctcaaaagatacgaagaggtaaagaaagatttagctgcctacacgaaagataaaggagaagtgaataagattcatcccgaatacgtgatgtcggagattgacaaactttcttcagatgacgctgtatttacagtagatacggggatgacttgcgtatggggagcgcggtatctgcaagcgacaggtaatcgccacatgctgggttctttcaatcacggttctatggcaaatgctttgccgcaggctattggtgctgccttggcttaccccgaacgccaggtagtcgcattatgcggtgacggaggtttgtctatgactttaggagatctggcaacggtggttcagtacaaactgccgattaaaattatcgtattcaacaatcgttcgctgggaatggtgaaactggaaatggaagttgacgggctaccggactggcagacaaatatgttgaatcccgacttcgctcaagtagcggaagcgatgggaataacaggtttcaatgtcagtgacccggaggaggtattaacgaccctatacaatgcctttgaaatggacggtccggtacttgttaatattatgaccgacccgaacgcactcgccatgcctccccaaattgagttcggacaaatggtaggctttgcccagtcgatgtataagttattaatcaacgggcgttcgcaagaagttattgacacaatcaattctaactataaacatatacgggaggtattttagattatcggataaggtgattatcattttattttcttatgtttgtaatcatcaaaaagtataaagcacatggaaaagtcagacttttcacctttgccccggcaagctctctatgcgaataaaagacaatggaatcaatttctttccattttcttgttagcggcaggcattggttttacagtagcaggcattatcttcttctttgcctacaattgggatgaactccccaaattcgccaaactgggaatggtagaagttttactggcaacctctgtcctgctcgccgtattcacccggtggagtacgctcgtcaaacaggttctccttaccggagcaacctttctgacaggtacgctttttgccgtattcgggcaaatctatcagaccggagccgatgcataccacctattcctcgggtggacactttttacctttctttgggcagtagctatccgtttcgccccgttgtggctgacatttatcggactactcagtataacaatatggctgtatgtaatacaaatagtacccggtcattcgtggaccagcgctttgctcaccagcgcagtaacctggatatgcgccacatcaacgatcgttgcggagcgaatgaacataaaagggcagttgaataaacgaaaccattggctgatcagcctcctgtcgttggctacaattatacataccagttatcttacaatggcagctatctgtgaagataataccattctatccgtcccattagcaagtaccattcttttgttttcggtaggattgtggttcggtcggaaacaaaagaatctgtattatctcgctaccattccttttgcaactctaatgatcctgctgactacctttatatcacacagtaatctcagaaatgtcaatctatttctctttgcaggaattatcgttatcacaggaacgaccttgattatatattctattctccacctaaaaaggcaatggtatggcacagaagaataacctgacaatccaagtagtgtcaattatcggaggaatcctgactactatcttctttttgggatttctggtagttgcctcgattatccgcactgaaacatccagtctgataatcggatgtttattcatcattactaccctgacaataagtcgccggctcacagttccttttctggatgcaatgaatatcactctgtacatcgccggatgtgcactgattgcttatggactaaacaaaagtacaaatgctctctttattgcacttgcgataaccggcattttcactttcttcttatcgaaaggtttcatcttacctttcctttctgtcattctatttattatttcttttctcggagagttagcttatttatcttcgtcaatacaacttttgcaaatagcagtagtcccggttttagcagttttcctgttcaccaatctatacgaaaggaatatcctgaccggattaaagaaaaacttagtttccaaatacacacctttccattccggcttattcgtttcctgtatctgcttattagccggattgtctgttaattatggaatacccgcaccctattggttactatctatctttatctggatcgggattcttcttattattcaacgtatcatgccggtaatggaagtaacgaacccggtaagtcagatcggaatatgcattctctgtatccttatctgcctgccgacaatgttcgccccatatctgtcgggtagtctcttactgatactgatatgttttcattatggctataaagcagaatgtgccgccgcactcctactctttatctatgccgtttccaaatactactatgatttgaacctaagcctgcttgtgaagtcaatcacgcttttcttcacaggaatcatattcatgatcgcttggtattatttcactcaaaaaagaacgaaacatgaaaaaacagagtcggatactgattatcactaacctgttacttttgttaggatacctcaactggtccatttaccagaaagaacaaacactgagagacggtcaactcgtattgtttgaactggctcccgtcgaccctcgttcacttatgcaaggtgattacatgagcctccgttatagagaagctacatcggacttactcggcgatacacaagtagctacacatggatatgccgtattaaatatcgacagtaaccgggtagcccgtattgtccgacttaaggatgcattggaacctttgaacgataacgaactgatcatcaactataaaattgtaaatgatcgtttatttcttggtgccgaatctttcttctttgaagaaggtcaagacaccctttatcaaaaggcaacatacggaggcctgaaagtgaacgccaaaggagaaagtttacttgtgggattgtatgataaagactttctgctgattaagcctgatagatgaatatcgaaaagcccggactttcacaagcccgggctctttgtattcttaaaacatctccttatctatagggaaaaagggactagcaaattgcttctagcgtaataagtgagatgccttaagagctataaagggatgtccgtgggaaataagggaggcatcccttccaaggaacagtgatttgaatggtacactttcacaagcatctccattcagctgtttccttttatagtatttcattctgtaatacaaatacttacacgattttctttcggagtagaataaggttgtactgtatctcctttgaagtcaacttttattctgtctgccgcaatgcctttagatttcaatgtttcagcaacattcttggcacgagcctcggacaacttaaagtttattgttgcattacctgtatttacatctgcataacctgttatgcaaatctttgccgcaggatttttctccagatactcaaccaaagagctaattttttgctgttgctcatcctgaatacgagcagagttcaaagcgaagaaaatattctgcttcataggttctacaactattttgtcttccttcggcttcgattgctccactaccggaatcggttcaggacgctgctccactgtcgtaacagaaacaggttgttcgggttcataagaaacaggagccaccttcctggagctttttcctaatgtgaaagagagcccaaccaatccattgaattgccaatcagcattcacacctttcttagagttaaacttgtcagacaacatatttgtattcaactcaaagttgatagccacatgatcattcagacgaagatttgtccccagcccgatacgtcctgaagcatacagtttcttacctgtccacaaacgttgcaaattgtacccgcttgcgttcaaagctacagcctcatcattgtcaaaagcgccattcaagcctatacccagaaaaagatatgcattgaatatacgttttgaatggaaaccataacacaagttacttagatcaaacatagcatctaggccaccctgcaaatatttatatttataagtaattgccggatttacccaacctcctttagcctgccagccacttgcttctgcccgaactgcaaacaacggagtaaacttatatcccaaagctaccgctacggacggagataccaaatctccgaaaatcgcttcacctaaagtataggcacctcctccttgcagagacagaaaccaatgtggattgaactcagtttttccttcctcttttccggaaaactgttcttttgtgtaaccagactgccaagcaaaggcaacattaacgtacgtcaggaatagaaccaacagaatgtgatatttaatcttcatatttattatataattcaactcaaaacagaggacgccccgtttgtttactggaacgtcctccgtaatttatctacaaatcaagtttctttataagagaatcatgactttgttatttaattgctttttctgtcaatgttacaggaatctcacattttacaactgacaaatctttgaatgtcacagttgcaattaccgtaaggttgtaatctctagtcaaagtagaaccttcgtttttccaagtaactacacctgtagtagcattaacctttaactctgaatttgcagacatattcttgtcaagtatagcccaatcaccttcttcaacgaaagcatattcaacacttaccatgtcagcattcagtttataagtatttgtagctttatcactcaacactaatacagtagcagtagagctataagagtaaatagcgcttccttcgttatccttcacaagaacttcagacatagtggctccggtgtttacaccaattccattaccaaagatctttatgccggtagcttttgtagcaacaaacggattaatgaatacgatgttatatgcaaaatcacatgtttcaccattttccaaagttacctgataagtcatgttcttaacatcatcacgttcggtcatcggctcagtcaacttaactgtctgatctgttgagaatgaagccagaggagacggagatacacctgttacaccagaagcccattggaactgaagtgcttttacattattaactttattatagtatgtgaagatattctcacctgcttcattattttcaaaatgctcgctcactacagaagacatttcccaaccggagttttcctgtcctttgactacaatacaatccttataagtctttccatcagcaagagacttatatgtctcgttataatacaaaggattataagtataagcaacacattcttccttcacatagaatacttgttgaagtacaatatcaccatgagatgtatcattagaaggaataataatcttaactgagtatttagcacccttaccgtctacgtctttgtaagtattctgagtcttgatcagattattgatacccactttgatagcagaggtcttggttgcatcatcgttcaatttaatattcagaagaagacctgattcatcatttatcactacatctgtactctgttctgcctcttgatcaataatagtcagttcctgaccatttttgtcagttacagtaaccaatacattatatttatgatcatcaccaccataataattccagaatgtagtagaagtcaattttgcagtaccgtaaatcttattgttgatagcctgatagtccatgctgacattatcaagattatagtcattagtgaatgctttttcatcaccttctaacttatgataatcagctgctttatcagcagacatatcaataattccataatcaggtttttcgtccggagcctgagatgtttctgtaatctccaatttgatataagatgaagctacgagtttcttttcacctgcattgctagttaagaaagcgtctactctaacaacaggagtacgtccgatagccggagttccgtttttcacttcaggattaactttaataacaccgttaccggcaatgttttctccttcttttacgataaaccattgttgatttgtcttttcgtcatcttcagccaaatagttctcaggtattgagaattcataactcatgcctttgaatcccaatgctgccaaccaattatctttatcattagaatacaatcctacataatctttcaaattaatagtagcatcatatttaaatgtagcgtttgcagcagcgtccaatgcaacaaactgtttgatgaaatcatctgattcaccatctttattgatagattttgtacgctcatagaaagtaatagcaccatcgtcaccttccttagtttttacgctatcagcaagtaccaagtcaatctcgctagatgtagcatatacataatcagatgtcattgttttttgaccataccatgcctgtaaagcagcaatattatattcagcattttgagccaatgcattcggattaattgttgttccgatagttacaacaccatccgccaccttcgtctcgtcaacattcagcaacactttcttgtcaccaactgcacgggttttcactttacgatcgataaagccgaatacagtttttccgtcaacatttgcatcttccggattcaagcgataattcaatgccacaacatttgatttaccccaatctttctgtgcaatgaattcgccactagtagtattaaacttagcttcatttaaataactctcgatatgatagaaaggcttactagtagttgcataaggaacatctgtacttactacatcaggaatgaatgcgatagaagataaagcaatgcctgaagtgatgtctattgctataccatccggtgctccttcaactccttgaagtgtcaatacattaccattaagaacagcagtaactccaccttcagatgctgcggttttccaactaatatctgttgcttctaccaatttaccatcctgataaatatcaaaacagccagtttctttgttaggtacatagtacttaccgttttcaccgggtgtaccttctccaccagccggtccggcagcaccgggtgctccatctactccgacagctttatattcggttttcacaccatttttgtaccaatagccatctttctcaccaatcgtccaaacatcagcatccgcaccatttttaccattagtcagttcatagcttttgccgtcactaagcgtcacagtaattccgttctctcctttcacaacatttgttataacggaaccgctgttaacctttgtctgcaactcctcgagtgacacctttacagcgtcaatctgtgtttgcagattgtcgatgtcatcatcgtagtccttacaacctacataggtgacagtagaaagtgccaacgccccgaagaacatcacttttacaaattttcttttcataactacttaaaaattacattaataatatattattaaacactaagtttcaataatagacagcccgttacttcataggtaacagggaaacctttgttcctgctcttttagagtagtcaatactgaaaaatgatacgatagattatgaaagttctttacccctgcttctgataagcggcagaggggagggaaatcttgtgcaatatttagaagttaacaaagccctaatacaaagaatccacgtgttttatctgttttagttccgcttttgagtagtttattaaaaaaatgtgtgatttcgtttggttgttttaagaaatatgctcatatttgcaccgatatttattcccgttacctatgaagtaacaggctatttatcaatacattaatccaccggcagatcgtcggacaaagtcaacaacctgtctattagcttcatcaattttcttactcctgaaaggtttcaaataagtctcggttacagtgatagacgaatgtcccatagcttcggagataatacccggatgaatttcgcaataataagccgtcgtagcccaagtgtgacgggcggtgtacgagcttaatttatcgcctagtcctaataactctcccagcaacattagttgttgattaaagctgcgtaacgccaactgatattcccgatacgcctctttcgttccttcacggctttccaaaaaaggaaagagataaggagaagaagaatcacggttcatgtatttctttaccagaatcattgcttccggagttaacgtcaccgacaggggacggcctgtttta

SEQ ID NO: 3055 - DNA, 439 bp, Unknown
  gut microbiota DNA sequence
caacgccaactgatattcccgatacgcttcttttgttccttcacggctttccaaaaaaggaaagagataaggagaaaaagaatcgcggttcatgtatttctttaccagaatcattgcttccggagttaacgtcaccgacaggggacggcctgttttacgccgacgatacgtgatcacattatcacgcaaatcactcttgcgcagataaacaagatcaacaaacggtataccacggagcgagaacataagaataaacagttcctgtgcacggcgcatattcggagatacacccgaagactgcgacaatttacaaaacactttcttcatatcgtcgtcgcatagggcacgtttatgatcggcacgagtgcccgtatacaccgaacggaacagatgcggaacgtatggtgcccgacgaagatcgacggcacgattgtaaacg

SEQ ID NO: 3056 - DNA, 897 bp, Unknown
  gut microbiota DNA sequence
taaatcactcttacgtagataagcaagatcaacaaacggtataccacgaagaagaaacattaaaataaaaaactcctgcgcccgtcgtaatcttaaagacactccggacgaacgggacaagtccgcaaaaactttcttcatatcttcgtcacttaatgcccgcttatggtcggcacgagtacccgtatacaccgaacggaacagatgcggaacgtatggtgcccgatgaagatcgacggcacgattgtaaacggcacgaaaggtacgaagataggtagaaaccgtattccagctacacccacgactacgaagataaacttcgaacccttttaaccactctgaagttacctcattgaaggcaaaatcatctttcccacgataagcaataatggcattgagactgctgcgatagacatgagcagttccaaagtttccctccacttgtaacccacgggccacttgcttcataaatcctaatacttttgacatctcacgattgttttgattaatttgataataaagatacaagtattctcataaaaagaatacctcatacaaacaaaacgagatataaagatgttttggaatgcaccataacgatgaaaagcccgaactttcacaagctcgagccttttgtattcttaaaacatctccttatctataggaaataagggactagcaaattgcttctagcgtaataagtaagatgtcttaagagagagataaaaagggatgtccgtgggaaataagggaggcatcccttctagagataaacatttgagaatatactttcacaagcataattttcagtctatccctgaatatatttcttctcaaaagatttgattatatattatagaaatcttttaaatccggtttacttcaacactttaacat

SEQ ID NO: 3057 - DNA, 2548 bp, Unknown
  gut microbiota DNA sequence
acagtttcagtagtctgtctgccccatttatcagtaatgataacgtttacttcacataccggaggagtaacgataggtgtttgagaagctttcttagagattacaactttgtcagttttcgtaaagtcagtagcacttaatgttacataatctttagcatcctgatttgccaattcaagtacaacagatttaattctcttgtcatcaaagtcatagccaacaccataagcatctgttttttcgaaatctttagctaacagatcttgtgtatgtcctccatctacttcaaatggcttagcttcagtacctgatttgccaatatacttaaatgtaccttcgaagatttccgatttcacagtcaaattaaacttatcagtgataacattcagacggtcatttccaaacggagcataagctactgtaatgttacgaccttcataagcaccaccccaagcatcataaggcgcaactgtgatctcatcgctactcttatttgaggacaaccatgcatcagcatagactttcgtatcatctaccattttggacggtatttcctcatcaaatgaaataagtgctttctctttagcagaaatagaaccttcctggtacagtttgtaaagattgtaagtaatcttacctactgcatcttcatcatttacattaccataagcagtagcgttatcaccactaaagtaagcacctgcacgtttgaattcaaacaacttactatcctgctggtctacagtaatcttaaatgtcgtttcatacagaacatcattatccaatcccggagtcggagttgcatttttgaatttaactgttgcagtatgaggaacagcagcaacttcagcaggatcaaatgtagcttcgattacaaatttagtaatatcagctacacctgtagacatatcagctacgggttctccgtctttgtccaaacctaccagtttcaaagtaataccaccttcatattccaaatccttcactccgttaatttcaactttaccatcagtataagcgatttccgtatctataccagctgttatatttgctttgattacatctactgaaggaccaacaatttcagaagtagctgttactttttcgccatctacgacccaagtcatatctttaatctctgctttttcagctgcatacttgaatgtcaaattcaacttagcttctttttcatttccagcagtagtaaaataggcaatagtaacagtcaatttgccttccttattagcaataattgttttattttccttgctaaatgtagcctcaattttcttagcatcggcttcgacaactgaataagtataatctactacatcattcaattgatcaccaaccaattcatccagattatgagtaactttgaaatctacatccttatttacatctacaagtgtcttttcttcttctttagctgtaactttcacatcatatccggagatgatttcattcccccacgcatctttcgttgtaagtgcataagcgatattttcattcaaattatccggatctataccttcagcaaatttaagagtcaagtcatagatacctttatttgctgtattttcagcacgagttaaagcagtttcactaacattagctgcaatactagctacaacaaagtttgtatttcctttagaatcagtcaagccgatttcataagattgaatatctttaacctccaagttcaccggattaatcaatgcatgaatcatgctacctctagcagacaggaacgttccttttggataagattttccgttaaatttaacatcttttcctactactccataatacaaggtagcgtttgcctcagtagaagaaaaatcgatacttccaccttgttcgccaagtgcacgcatactagtgatacgagcagccttaggcatagaaacagtttcccattctcccgtttccttattgagtatattcaaaacccaaaccaatggattattagcatcagcagttacatagatatctgtagcagctttaacatctgtttttttaggttctccggcttctgcatcccaaaccatccaatatccgtcttctgaaatttgcggtgcatatccatcttcacctttgtcacctttatcgccttggtcaccttgatctcccttatcacctttctttccttcagaacaaataccggtgtcttttccatcaataatccagttctttgttgccgaatcaatctcaatctttgtacctgctgcgccatcggcaccacttacgatagaatagcttttaccatcgttaaaagtaattttaaatccatcagtaattgtctctacagcggttacccatttgccttctttcacaaaattctgtaactcggcaatgctagctttgtttgcgtcaatctgtgtttgcagattgtcgatgtcatcatcgtagtccttacaacctacataggtgacagtagaaagtgccaacgccccgaagaacatcacttttacaaattttcttttcataactacttaaaaattacattaataatatattattaaacactaagtttcaataatagaca

SEQ ID NO: 3058 - DNA, 16570 bp, Unknown
  gut microbiota DNA sequence
gtcaaagaacacttgatgcttactttttacacaacctccccgaaggaggggaatggagataccaccgactgggtaaattaccaccaaatttgaagaagaacctaaaaacttttttgtagcagaacttattatttcaattttcggaaaaaaggattcttgctaatctttatatccgacgatttcatcctgtcgaatttaacggttctccctagcacatccccttcgatcttattattagagatgactaccgatttgcaggcttccagcgtgataccttccttgcggtaatgataaggttggtaagtcgtgtcacgtatcagcgtgttgtcggagaaagtcagtccgtctaccgagcgggcaaagaggatcgggtagtcgaaaagatgaaaggtgttatccacaatacggatattgcggtggtagggatatttctgttccggtgtcggtatttccgggtcgatactaatcacagcctcgcagaattggtaaattgaagagttgcaaggataacgaaaatcattattacggataagtacatcttttacggcccctgattcataccaggcattggcgtctccggcaattaaaatagcggaaccgcttgattcgaatatgttattctcgataacgacctttcccggagttgatactagtaagccgcgtgcacggcaacttccgaaatgacagttgcgtatttccgcatccggtgtgcaagtcaggttttctatcacgtatccggcctctactccggcagggagcggggcggatagctcaatgataaattcggccttgttgagcgcttcaaacttattcatttttccggttgctacggtgcgcattgtattgtgttcaatgaatccgatcatttcgtccgggcgtccccattccataccttcgctcatgtcctgcatgaatttacatttgatacgggtgggggagagaacttccatgatgcgtgagcaagttccgtggatattgatcgggtcatccattaatccggcccagctgcaattttctattttgagcagcccgctgcatcccataaaatggaagccgtcgtcgtgtccgcttaatacacgtccttttgcggcattggggatgatgtggacatcgttgaatgcgatatttttgctgtattgtgacaggattcctaatccgcaggtatggaataacttcagattctccagtttggtgtccgtgctgtggtagatgaagataccggcatggtcacgggtactatgtctcaacacgaggatagtgcccggtgcggggaaacgtttgttggcttcccttttcggatcggcgaggcgtaccagtccgggttttacctctgtcgcatcataagggcgccatcccaggttgtcgccagtattgggcaggacgaagtgggtttcagggtcaaactgcatgatagaccacagcccgcttttccaaccttcgccgacaaaggtgagccgtttgttttctatgatgtaaggatattggcgggtgtcgatttccacttctatatagtcgggggtggattgagtgacggtgccttgggcggttagagggatttcccagtcaacggagaagtttttcagggtgatgttttggcagcggtccaaggtgaagggttgcatacggccgtgcatgataaactccgagccgttgccgtcaatagtcaggttgttgacttgatccagcagtacggcaaggattttaggattgacatcgtaagtattcgtttcgtgataatctctttcaatggcgtgctgtgcccaaaagtcatatctccccttgggaaagacaagcgtggagccgggatgttgtttgcaggcattgattgctttttgtacaaacggtacggcattgatacggctgtcgggctttaaaccgaaatcagaaaccgagataattttatttgcagaaatgttggtagaacaaaccaataatgcaaatgataagagtgatttcaatggcaagaggtttttcatgcgttttgtagtttattagatgtttatttcttacataaatactactaattaaccagtatccctatctattctctgaaaaaaaaagattttttagtatttgcgttctttttggcggattattatacggatgagtgagaatatgccttagaatatactggagggcttaccatagttctatatgaactaaagcaaatcggagataaaagaaggagaagaaagggaaaaacaggaaaatcttatcttttttcaaataaaatcgttttttcttgtagggataagccgggctgcggtgtatttatatatgtaacaccaattattgaagaacagaattgaaatggaaacaaatacagataaaagaaaaacattaataagaagacttctggttgaacagttattgccggaagaaaaacagaatctactgaaaagaaattcggtagaaaacgagatgaaaaagcaatggaaacagtttgaagatgacccaataaagtcggaagttaaaaaaaggatatggaagaatgtccaacgtagatgtgaaggcaaatccgatactttagttcatatagaactatggcactcactggctgctgctgtcgtaatcctcttagtaataggcggtttactgtttttatccggaaacgatgatatgggagtagaaaaaacgattaaaataatcgcagaaaagaatcaattatatgtgttgcctgatagcacaaaagtgtggatgcagccgggtagttcgattcggtatgcaaaaacattcgcccgggacaggaaagtgtggctggaaggaaattccttatttgaagtacgcaaacatcagggaaatacgtttcaggtatatataaatgatgcatttattgaggtgaagggaacttgttttttggtaaagcaagaggacgcacaccgtagcgagataactctgtttgaaggtaagattgaatttaatgttccgtctacccggcaaaaaacggtgatgcgccccttgcagaaactcatttacaactcggttgattcacaaacgcaaattgacaatatcgctaatatcagttgggaaaacgggagatataatttcaaggatgtcccgttggctcaattgattcagatcgtaagccagatgtaccatactgatattctcttacagggagtacgtaaggatgaatcctcattcagcggcagtattcattataatgagcctctggacaaggtactgaataagatttgtttcagcctgaatctaaatatccggcagacggatgaccggatcgttttatactagtccatttttattaaccatatgtctaatcaaattaattaaagcatgagaaaatcactcagttttcacagtagcgtgcgatatttcaagtatatcgtgctggttttgcttttttatccgttgacggtccttggagctcaggggcatatcacggtgaaagggcagtctattacaatcaaagaagctattatgctcattgaaaaaaacagtaattatgtcttcttttacaatgcggcggatttgaaaaacattcgattgaaaaatatcaattgttcgggtccgattgataaggtattgaacgaagtatttgctaatacgggaatcacttatctgattcaaggcaatgatgttgttctgaaagtgagtaaaacggaatcggcccaacaagctaagaaaacggaaattgtgggtgtcgtgacggatgcacgcacgggcgaggctgtcattggggcgagtgtcgctattgtaggtaccacaacgggagttatcactgacatcgacggtaagtttgtgattcaggcaggtccgcaggatgttctgaaaatttcgtatgtgggatacacagctaaggaagtgaaagtaggcaaccgcaaagtacttgctattgatttgtcggaagatgcacaggcgcttgaagaggttgtggtgacagcttacggaacaggacagaagaaggcgagtatggtaggctcggtgcaggctatccgtccggcggaattgaaagtcccttcaacgaatctttccaattcatttgccggacgtttatccggtgtggttgctgttcagcgtacaggtcgtcccggtgcagacgggtcggatttctggattcgaggaatctcaaccttgagtgaggctacgtctcctctgattatcatcgacggtgtacaggtatcttcggctgatttgaatgctttggatcccgaggttattgacggattctccattttgaaggatgctaccgctacggcaatgtacggaacccgtggtgcaaacggtgttatgattgttactacgaagtccggacaaaacctggataaaccgattataaatttccgcgtagagggacaaatcagccaaccgaccaagacgcctaagttcgtggacggagctacgtatatggaactgttcaacgaggctgtaaagaacgacggcagtccggacgttttgtatagtcaggacaagattaacggtacacgtatgaaactcaatccgtatgttttccccgatgtgaattggtatgatgagatgtttaacgatgtagctttcaatgagaaagttaactttaacatccgtggcggtggaaagaagattgattatttctcaagtatttcggtcaaccacgaatcgggtatgttgaagaaccgttctaaggactttttctcttataacaataatattgatgtgatgcgctatgccttccagaataatatcaacgcatatctcagcaaatcatcaaagttatccgtaagattgaacgtccaacttcgtgatttgcgcgagcctaaccgcggaattgatgatatttttgcagatgcaatgaattcaagcccggttgaagcacctgttttctatgaaccggacggaacaaccaatcacgtgaaatggggtactacggaccgtttgattacggcttatcagggtaacccggttgctcagttgactacgggatataatgatacgtttgaaagtacggttatcgccgctcttgaatttgaacagaaattggatttcctgactaaagggcttcgtttcaaagcgttgggtacgttcaaaaactggtcgaagtctattaataaatatagcgccggctggaataaatatctgttgggatcgtatgaacagaatgaagatggttcatatagctatactacaaacagagtcggtaatgaagtgtcgactgacttgaatagtactaacgagacggcaggagatcgccggatttatctggaagcaatggtagattataaccgcacgttcggaagacatgatgtaaatgccatgttgctttataatcaggatgaactcgtgaataatgtaccgggtaacaatcttatcaattctctgcctaaacgtaaacaaggtcttgcaggccgcctttcgtatgcatacgatggaaaatatatggcggaagtcaatatgggatataacggttcggagaatttcgcgaaagaacatcgctggggatttttcccttccatagcactgggatataatatcagtgaagaaagtttctttgaacctttgcgtaaagtcatcaccagcatgaagttgcgtggttcatggggattggtcggtaatgaccagatcggtggcgaaagatttatttatatgcctacaattaacttgtccggcaagggatttactaccggtatcgaccaaaactatggattgagcggacctgtttacacccgctatgaaaacaatagcatcacttgggaggtaggagaaaagatcaatctgggtattgacttgcaattattgaacagcctgaacattgttgttgacattttccgtgagacccgtagagatatattccagaaaaaaggaactattcctacatatttgggaaccggaaatactgatgtgttcggtaatcttgccgagatgaaaaaccagggactcgacctttcgattgattacaacaaggcgttcagcaaggatttctatatgaactttaaaggaacgtttacttatgcgcacaatgagattactaaatatgacgaagctcctaaatatgcttttcagtcaaaagtgggtcagagtgctaatgtgagccagggatatttgtcaaatggattgttcttggatgaggctgaaatagaccgttacaatcaacaaatgggatctacattgggagccggtgatattaaatatctcaatgtctcaaatatgcatggttatggagatgatatcgtggatgtggacgactggacgtggattggaaatccgactgttcctgaaatcgtatatggtttcggaccttcgttcaaatataagaactgggacttctctttcttcttccagggagtagcgaaaacttctttgtttatgagtggattccatcctttcggagacaattcactgcgtaatgtgttgcagtttgtggcaaacgacagatggtcaccgactaatcagaatgtggatgcaaaatatccgcgtttgacccgtaagacaagtttgaataatacgaatcccggtaactctggccgtacttccgattattggatgcgtgacggttcgttcttgaaactgaaaaatatggagctcgggtatacatttaagagaatgcgtttctatatcagcggttctaacctgttgacattctccaagtttgatttatgggatccggaacaaggcggtggtagtggtttgaaatacccgacacaacgcgtctttaatgttggtttccaaatgactttcaataattaaatttacatagtatgaaaaaaataataaaatatctgtttttagcattgtttgcaggatttacaatggtttcctgtgatttcttggatgtggtaccggcggagaaagcaagcgataaggatgccttctccagtcctaaagcagcagaaagattcctgtattcatgttatggatatataccgcagattaatatggtacagacttgtctggacttcagtggagatgaaataatagccccttttactcaagagtcttacgtaaggtttgctgaaggtgtgtatacctcgggaaacttaattatcagttactggaacgatttgttcctgggtattcgccagtgttatctgttaaagaagaatattacgtctgtcccccgcatcgaccaggcaaccatagacagctatgtggctcaggctgatttcctgattgcttattttcacatgttgttgattaaatgctatggtcctgtcgttttggtgaaagaattgccggttttggatactcccaaagataatttattgggacgtacctcttatgatgagtgtgtacagtggacttgtgatatgtttgatgatgctgccagaaggttgcctgcaacccggaccggttcggaatatggacttgcaaccagtgtggctgcaaaagctcttaaagccagattattgctttatgcagcttctcctttgtttaatggtaatacagaatactatagtgacttcgttaatacggatggtagttcgttgatgcctctttcttatgatgaaaataagtggaaaaatgctgctgatgctgcacttgaggctattaatctggctgagtccaacggatatagtttatatgagatgagagaaggggacttgagcggttatcccgaacctcaagatctaacacagcgtacgttgcgttttacatttatggataaagacaattccaaagaagtattgtttgcagagacccgtaaagcaggtgcgtatggtttgcagcctaaatccttgccttatttaagtgacggttcgtggaatggagttgcaccgactttgactatggtggaacgtttttatacgaaaaacggactcccgattgacgaagatcctgagtttgattatcaaaatcggttctcggtagttccgttccccgatggtgctacttatggggaaggacaaactataaaactgaatgttgaccgtgaacctcgtttttatgcatggattgcatttcagaatggctattatgaatgccagacggagtctaaagagaacgcttatgtagcgaaagccgagcgggcagaaggaaagaaatggttgacagattttacagaacaaggtaattgtggcaagcaaggtagaaacaataactactcaaaaaccggatacctgaataaaaaaggtgttcatccgggagtagctgcttccaagtcgcaaaaagaaccttctaaagattacccatggccggttattcgtctggcggaattgtatttgagttatgcggaggcatgtatcgcttataataaagatgggtatcttgaaaaaggtatggtaaaactggatagaatacgtgaacgtgccggacttctttctgtcaaggattcttggaagaatgcaaaaaatccgattgtcagttatgagggaaatggtggcctgaacggtaaactgacagagattgtgagacaggaaagaatgatcgaactttatctggaacagcagaacttctgggacattcgtcgttggaaactgggagataaatactttaatgtaccggtgaagggtatgaatattgatgctactgatattaatgggtttgccactgtgaaaactcttcctgatgtgcgcaattttgatactccgcggcagtatttgttacctattccggcagcagaagtgagcaagaatcctaatatggtacagaatcctaattattaattaaattttagcatgactattatgaagaaaaacatatttctattggctgtcactctacttttgataggattcgctagttgtagtgacgaagatacaaagcctattatcccttctgatgtgatcgacttgagtgctgacactcaagacaagcccggttacattgtgcttcgttgggcaacacctgatgataatacaatcagatatataaaagtatcttattatgattatttgctggaacaggatgtggtaagattggccagtgtttatgcggatagtgtgttgattccggatacacgtaaaaagtttggagaatatgaatttaaagtccagtcttatagcgaaaccggtgatacgggaaatgttcagacaatcaaggctgtttcggaaccggctccggtacaagtggtctttggtgagtccaaacaaatagcgttgacggtggaccagttgtcgacgaatgctcaggaaaaatcggaaggtcctatcgcaaaccttattgacggaaataccgcttcttacttccatacgagctggagtgggactgttcctccggctccccactggttccagatagatacgaagaaagagattacttatttcaagtatgagtcggtagcgcgtaacggcaataatattcctgatgatgtggatattatgggtagtaatgacggagtcaacttcgaactaattgagaatcttacaaaggctaagaatggcatgttgatgagtacatcgccctacacatcgcctgtcatgggaaataattcaaaaccttatcgttatatacgttattcggtgaatcatacgaatacaggttctgtcttttttagtatggcggaatttaaactgtttgaggttgatgcaagcgttgtcgatcctgaagctgattagtaaggagcgtagaatgcagacattgaaataattggggagattttgtctttttgacaactaaggcggaaatatgaatatttctttttaagaataatattagatttccgccttttttatttggatgttttgaataatagatgttacataataatatatctgataaatggtaaattgtcatataaaaaaatacttgattatcttcttcgtacttatacagggggctgtcgctttttcttgtgccagtgatgatgaagtactggaagtggtcgatttgtccgttaataaggaagtggtggatttcaaaagtgaagccggaacgcaaaatataacggtttcaacgaatgctccgacttgggaggctaaagcggataaaaactggtgtacgctttctgtggcaggaaagatcttgaaagtttccgtagacgaaagtgaagaaagattggtacgtgaagctaccattacgataacggcggaagggcagaagaagacggttaaagttcggcaactgggctatgaagctgctatcctgattgatacgaacgtgtttgaagtggaagtcattggtaaagagattacttttaatgtcacgaccaatgtggaagtgagtgccgggtttcctgattggattactgaaaaggcaaaatcccgcgcgccggaaatggtgacgtctacccacacttatatagtgaaaagtagtacgttggatgaaaagagagagggagccatagtctttactgaggttttaccggaaggtgcttcggaagaaaactccccggtttctgcttcggtcttggtttcacaacatggcctgaatgaatataatggaggtgcgggagaagacatcgaaggtgacatcaaagtgaaagtggtgagtgggcacgatacttctcatcagggagaagatgctattgaaaagtcttttgacggtgactatacaacgttgtatcattcgagctggtcgaatggcggagcgaattatttccctattacgctgacctataattttgcggaagcgtctgatgtggattatctgatttattatccccgttccacaggatataacggtcattttaaagaagtggaaatacagtattcggaagacgggagtgtatttacgaagttgctggataaggattttgagggttcggcaacagctaccagagtaacctttgataatacggtccgggctaagtctttccgttttgtcgtgaaaagcggagcaggagacgggcaaggatttgcttcttgtgccgaaatggagttctatgccaagaatctgaatgcatttgattattctactctttttgaagatgaaacgtgtagtaacttgaaagcgggaatcacggaagcggatattgagaactgcaagtatcctttctttaagaatctggcttattatatgttcaaggataagtatgacagaaacttccgtgtggaggactataaggcgttcccgaatccggatattcagtcggaaacccacaaaacaaacccgtacagccttcttgacaatccgacaggtatctcggtgaaagaaggggagacgctggttgtaatggtgggcgacacacatggacagaacatcggaatgaaagtacaaaacctggacgtaccgggaggtgacggtttcggaggagttacgtatccgttatatcgcggtattaataaactgacgatgacagggaaaggactcgtatatgtgatgtatcataccaaaacattggaggatgcggaaacagcgcagcctgttaagattcattttgcttcgggtacagtgaatggctattttgattcgcagaaagaagaacatcagggacgttggagcgaattgttggggaaagctacggacaaatattttgatgtggtaggcaagtatgcacacttgacatttgaaactaacgattttaggaaatatgtttccacaaacggtaatgaattgattgatctttatgataagattgctcacagtgaaatgcaacttctcggattggagaaatatgacaagatgttcaagaacaggatatatctgaatgtcatgtatcactcttttatgtacgctactgcatatcatacggcttacaatcagtcaaccatgggggatgtgtgtgatcctaatgtcttgaaaaccaccggttgctggggacctgctcacgaaatcgggcattgcaaccagacccgcccgggcgttaagtggataggactgacggaggtgaccaataatatcatgtccgagtatgtgcagactacaattttcgggcaaccctcccggatacaaaccgaggatatgggagcggtttaccgtaacagatattcaaaggcatggaatggtattattgttccgaaagcttctcatgctgattttaaaaatctcgatgattcggatgatgtgttttgcaagttggttcctttctggcaactggagctttacttcggtaaagtgcttgggcggactcctcttcagcagtcggaccgtggcggtttctatccggatgttttcgagtatgctcgtacaaaagattatggtggcatgagtgagggacagattcaaatggatttcgtttataattgttgtgtggcggcgcaggtgaatttacttgatttcttcgagaaatggggattcctgacacctgtggacaggtcgattgaagattatgatacgaaaactttgaaagttaccgaagaaatggttgatgaactgaaaaagaaagtagagaatctgggatataacaaattgcagaatattgctttggaatatatttcggacaatacatgggaattgtataagaacaagcctgaagtaatatccggaacaaatgcaacacgaagcggtaataccattacaatcaagaattggcagaatgtagtggcttatgaggtgaaggatcagactggtaaacttgtctttgtttctagtggtgaaacaacctcttctactaccgatatgttcactctttccggcaactgggatagtagctataaactttatgctgtatcggcagcagggaaacgcacggagattccggtaggaaattaactgctgttctgaatattgccatagattagtacaaaactgttatagttatcagttatatctgataactataacagactgtgttaatctatggcatttttcatgtattttatagatgtaattcgcggtaaaaatattacttttgtctatcacaagattttatacaatatgaaggaagaagagttgatagaacaaatgaaaaatggcaataatatagcctttgctgcattgtatgattattattgtcagaaggtctacaattttaccaaactttatgtaacttcttctgatactgttgctgaaatcgtgcaggatgtttttgtgaaattctgggaagcacgccacttattggataacaacaagaaggtggagggctttttgtttgttattacccggaatatcatttttaataaagcacgcagcaggatgcgcgaagatatgttcaaaatgacgatactacgttccatagagaacgaagaaccgtataatcaggaagaccaaatggtggctgaggatttaaaagaatatatcgatcggttaattgccgtgttacctaaaaggcaacgtgagatattcttgatgagcagggaggagaacatgacttatcgggagattgccgctcgatgcggtatcggtgaaaaagccgtagaacggcatattcaccttaccttgaaattcttgaaaaagaatcttcttttattcatcttgttttccatgctccccgagtgaaatccggtatctctaccggtatgcttccattcaataccgacttctcgcttaattctgtgatgcaggaccattcggcggcatcgtatacatccatgtcaagaggaagaccgttgcgtagacagtatatcagtcggtaatccatcacgtagttcatttcgtttggcaaacctctacgatgtgcttcttcgccgatagtggcgctgaaaggatgtttatagcgggataatacttcttccagtgcttttccttcaagaggagtgtctccgttgggctccagtgcgatgcaaggcacggggtatttttgtgcaaaaccaagagtaccgcatacggtttgcaggcggctgtaaggccggggcgtgcatacatcatattgcagcatgattgtttttcccttcgcggtatggatcagggtcgtgttgacatctcccaatttatattcctgtctggcttccggtgagtctttgccgaactttttccgggcgtattcgctcatgcctgcttggtgggtggacattgaaacgaggtattccattttatcgccccggtgaatgtcaagtatctggcaggcaggtcccagaccgtgagtgggatagggattacccgtatgttcgatgctatatctttttccccagtggttgtggtaacctccttcgctttcttcggcaaaatacatggaacgcaggtcgtgtatataagctccctccacgtgcatgatagttccgagtattccttggcgggccatattgagagttgttagtgcaaatggatcgtagcaacagttttccagcatgatacagtgtcgtcttgtcttttcggcggtatcaaccagttgccagcattcttccacgctcatggctgccgggacctcaatggctacgtgtttgttgcattccatggcaaaggttgccatagctgtatgcattagccagtcggtgcagataaaaacaatatccagttcatcatgctcgcacatctttttccagccttccggtccggtgtatccggtggctccgggacgattgttttcctttagtagttgttgggctttggccaggtttccttctctgatttcacaaagagcgttgatttctattccttcaatttgcagataacgttgcagggtgagcaatccgcgattgcccaatcctatgattccgatacggacaacaggaataggagggtgcgatagttgaagcacgtgtgattgtgtcggagaatctttcataatcttaaaggtctaaagtaatagaaaaaaagagaatctaatttctcagattctctttagagagcggaagacggggctcaaacccgcgaccctcagcttggaaggctaatgctctatcaactgagctacttccgcaatttttgtgggcaaagatggattcgaaccaccgaagtcgaaagacagcagatttacagtctgccccatttggccactctggtatttgccctttttgcttttgaggaggtttgtttctcaattgcggtgcaaagatacaactatttatttaaactccaaacaaaatcaatcatttttattgcagtaattgcacattcgtctcctttgttacctagtttgccaccggcgcgatcctctgcttgctccattgtatttgtagtaattaatccgtaaataactggtatatcgccagttgcgtttaattcggtaattccttgagtggctcccatgcaaacataatcaaaatgtggagtatctcctttaattacgcaaccaattgcaataattgcatcaacatcgcaattttccatcatttggttggcgccgaaagttagttcgaaacttcccggtacggtttttaccagaatattttcatcttttgctccatgtttttttaatgtatcaactgcgcctttcagtaaagcacccgtaatgttgaagttccattcggatacaacgattccgaatttcatgccttcggcgtttggaactgaattgaaatcgtattcggatagattatggtaagctgttgccatagtaaattataaattgagaattaaaaattgaaaatcaagaatccggagaggtcaagaaaaaaggcacggattacatggatttcacggttctgaaataatccgcaatccggtgtaatccgtgtctcaatctcttatatatatataagatctattatttcttcatcaacttagcctgttcgatgtatttgtcgatgtccatggcttggtaagattggaagtatttatccttaatcttagtgtaagcgtcaacagcgtcatcatacttgccttgtttcaccagaatctctccggcttgcatcaggaagatcggactcagtgtattgttgtcggctttgtcagcagcagacatcaatgtagaggctgctttgtccaattgaccgagttgtgcgtagcagtttcctgcagcacccaaaattgccggagcaaccatttgatcttttccgttaaagctatccagcattttaacagcttcttcatatttgccaagttgtgcgtagcaaatacctgcataagctttggccaagttagcggctttagttccgctgaaatcgtctgctactttcaggaaaccgacaaaaccaatgctgtcaccgttcagtgcttgttcgtaagcatcctgttcaaagtattcctgtcctttgaaaagagccgcttgcgctttttcttcacgaggttcagcatagaggttcttgtacatgataaaacctgctacaatgataatcacagcaacaacaccgccgatgattgcgtttttgtacttgataagaaatgcttccgattgtgtcagtgcatcttctacgttcagatgttcgttctgattcttttgttctgccatttttatatgattctttttgttattattcgctatttgatatttcgactcgcaaaagtagtttttttatatctacaaacgaaatttagaggcatctttttttgttttacacccgaaaaccacgaaaatcttgctacttttgtgaacaaattaaggtgtacacaatgatactgaaacggatatccatattaaattataagaatctggaagaggtggagattgatttttccgccaaactgaattgttttttcggccaaaacggtatggggaaaacgaacctgttggatgcggtgtatttcttgtctttctgcaaaagttccggcaatccgattgattctcagaatattcgtcacgaacaggacttctttgtcattcagggcttttatgaagcagaggacggaactcccgaggagatttattgcgggatgaagcgccgttcgaaaaagcagttcaagcgaaataagaaagagtacggtcgtttttcggaccatatcggtt

SEQ ID NO: 3059 - DNA, 42357 bp, Unknown
  gut microbiota DNA sequence
tcgcccgccgattccgaactgattgcaggggggagtgaggaacgccgccgttttatggatgtggtgatttctcagtatgataaagaatatctggatgcgctgatacgatataataaagcgttggcacaacgtaatacgttgttgaaaagtgagtttccggtcgaggaggagttgtttttggtttgggaggagatgatggcgcaggctggggaagtggtgttccggaagcgggaagcgtttatcaaagagttcattcctattttccagtcgttctattcctttatttctcaggataaggagtcggtgggattgtcttatgaatctcatgcgagggatacttctttgctggatgtgctgaagcagagccgggagcgggataagattatgggattttctttgcgcggtattcataaggatgaactgaatatgctgctgggtgagtttcctattaaaaaggagggttcgcaggggcagaataaaacatatctggttgcgttaaagttggcacagttcgattttctgaaacgtacgggtagaacggttcctttattgttgttagacgatatctttgataaattggatgcctcgcgcgtggaacagattgtcaaactggtggcgggagacagtttcggacaaatatttattacggatacgaaccgggagcatctggaccgcatcttgcataaggtgggcagtgattacaagattttccgtgtggaacaggggggggtccgtgaaatggaggcagaacaatgaaacgtaatgatgcggaaccaataggtaaattgatacagcagtttcttcgacaggagagtctggaatctccattgaacgaacaaagattactggatgcatggccgcagatattggggccggctgccaattataccagcaatctttatattcgtaaccagaccttatatgtgcatcttacttctgccgctcttcgtcaggagttgatgatggggcgtgagaagttggtgcgtgccttgaaccagaaagtcggtgctactgtaataactaatatcatttttcgctgaggaaggggattctgtctattacctttatccccagtgcccggagtctttcgtttgcacggtcgtaataaaacggggtttccagatattgattattgtgggcatctactccgatgatagcggtacatccttcggctgctgctatcttccaaaaatccggatggggaatggtcgtaatcttgtgcgcgtcgttataatcttcgtagccgatgttgtattccaaagggaggtttaaccgtgcggcagtccggcaaatatgtctgctgattaatttgcagtgacggtcgaattccggataagaacgcataaataagtccggatgagcaaagtaggcaaacagtccgctttccattccttcaatggcgctctcctcatagagttcgagcatatctaccgttttggtatttctgccgaaataaggaaacttctcgtctgtatggaagtgatggtttccgaagatgatgtaatccagtttaaattctcgaatgacttctttcagccaatgaaggtagtcgggaaagtattcgcattccaatcctattttcaggctgatccggtctttatacttttcttgtaacgagcggaggctttctacgtaatccggcagctcctccggagtcatgcggatatcagaaatgtagttagtatgatatttccagggagtatggtctgaaaaacccagttcctgatagccgcctttaatggcgcttaaaacaaattcttcgtcactccctgtcgcatgaaggcagcgggtggtatgggtgtgataattcgttctcatttgtcgttataattatgtccatgcggatatcgaatgattctgccgggacttcttctactaattgaaaaggaaagcagataccagctttgcaggctgaggggatacgtggcaaaaggcggtcataatagccttttccgcgtccgaggcgattacctttccggtcgaaagctactcccgggacggcgataaagtctatggctgcatagtcggtaaacacctctccggtcggttcttctattccgtagctaccggttgtcatgtcgtccgggtcggtgtatatacgcagttccagatcatcgcctacgacaaccggaagcaatattcgtttttcactgctccattttttgataaatgtatgtgtatccacttcgtctccgagagagtggtagagcaatatggtatttgccgccctgaaagccgggtgggcttcgagggcggcaagtattttagctgattgaagcttccgcatagtcgaagtacagagttgggtcttcaacgatgcgatatgcttgcgcagttctttttttcttttcattctttttgtccttagtatcttcttcttccactgctaccggagctttcgggaatgcttctcctttctcgagtatctcgatacccttattgacagtagcgtctgtcttgttaaaatattggaggtaggcttccagccccaacatattgtagatgatgttgccatagatgtttttctccaataacttgtaggacttttggatgaggatatttcttcttttcaatcctttactttcagcaaagcggacaaactgttctaccagaccctggtggcggagataatttagtagttcttcttccgtttcatactggctgagttttttccggttgttgtcggtgtattggaatgtgaactgaatggttaatccacgattgatagccgtagaaagatatgaggtgacacctgtggtatcctgcggcacgaatatatccggcataatgccaccgccaccatacacaggacgtccgaggctggtgtaataaagttcgttttcattttgcttgatactgtcgcgtgagaagaattcaccgtgttcgtaacggttgaataaatccagttcgtaattacggtcttttccgctttcgtaggggcgttggatacaacgtcctgcgggggtataataacgggcgatagtcaggcggatagctgaaccgtcgctgaagtcgataggctgttgcacgagacccttaccgaaggaacggcgtcctactaccgtaccacggtcgttgtcctgaatagctccggtaaagatttcgctggcagaagccgaaccttcatcgatcaatacgacaagcggcatcttttgacagcttcctgtaccgttggcaaattcttctgcacgaggatatttgcgtccctgagtatatacaatcagttttccttccggcaggaattcgttaaccatgcggatagctgcttccatgtatccgcctgtattaccgcgaaggtcgataatcaggcctttacattttttgtggttcagttgcgctaaagcattgagaagttccacatggctggtacgtccgaacttacttactttgacataaccgatttcgtcatttaacatataagcagcgtcgacagtgttttgaggaatgtctccgcgtgtgattgtaaaacttaataagtctttttctcccatgcgtttcactcctaacttcacttgagaacctttcggtccctttagtgtgcgcatagcccgttcgttggttacttttttaccgacaaacaagctgtcgtctacggtgacgatgcggtcacctgccattagtcctactttctcggaaggaccgccctgaatgacggcattgacgtgtattgtatcgttctgtatcgtaaactggataccgattccgctaaaactgccttccaactccgaatttacttcttcgaggttctgggcggggatataagttgaatgcggatctagttcggccagaatctgaggcatggctttttccacaagatcggtcatgtttacggtgtctacgtattggtcgtctacgattcgcagcaatgcattcagcttgttagaggaaccgttaatgatacccaaacgattgccggcaaaatgcttggcataaaatgtgccgataagaatcccgattaccacgctgatagctatgatgacaggtgtaaaacgtgaagagttttttgtactcatgtctattcctttttttaaaagttcgtcttattatttatttggagcggtttcatccagttctgtatagatgacttcaactccagcccgttttagtagttctattccatcttcgaggcggtaatgttcggagtaaacgactcgtttgattcccgcctgtatgattaattttgcacattcaatgcaaggggaagctgtgacatacatggtagcaccgtcgctgctgttgtttgaacgggctattttggtaatggcatttgcttctgcgtgcaatacatacggttttgtcagattattctcatcttcgcatacattttcgaaaccggaaggggttccgttgtatccatcggaaataatcatcttgtccttaacgattaaggcgcctactttacgacgttggcaataggaattctctgcccatatgctcgccatacgtatgtaacgtttgtcaagttctgattgtttcttttcagtgtccatgtttcttaactaattaccactaactacacggaaaaccatacggaatgtctgagtgttagattgaggtttatataaaaggtataagttgttctcatctccttcgtaagatgttgcgttgttcaggccttcaagaaagttcttggcgagtgcatctccaccattgtttccttctacagttgcttcgaatttattattcttaccattggcactccatgtaccttcaaagttgccggtggtagtaattactgttccctttatatttccttttatgatatcgccttcaaccgtaccctcaaatatgacgttgtatgtaccattcttgttaagttcttcataaatctttgttttttgagcttcattttcccaaaaaggaaacatatcatgtccgccatccacagtgatgtaatttagtttccaagttttcccggtaaagatagcagccacatcatccgaatcattacatccggtgaatagagggagcaatagcaacagcccaagtattttacttatatttctcatcatcaatctctttaatacttattattaattttttatcccgtttctgattaataaagcgtcaatggtcggttcttgtccacggaagcgtttgtaaagtaccattggatgttctgtccctcctttcgacaaaatattattgcggaatgattcggcgacgtcctgattgaatatccctttttgtttgaaaagcgagaaagcgtctgcatccagtacctctgcccatttataactataatatccggctgaatatccgcctgcaaagatatgagaaaactgtgtactcatacaggtttctttcactaccggcaatatttgtgcctttttccatgcctcttgttcgtagaccttcacgtctccttcgaaaggtacgttacgtgtgtaccacgccatatcaagtaagccgaaactgatttggcggaggcaggcgtaggctacattgaagtttgaagcatccacaagacgttgaattaattcatccggcagtacttctccggtctgataatgacgggcaaaggtgttgagaaaatctttctctatggcgaagttttccataatctgtgaaggaagttccacaaagtcccaatatacattagtcccgcttaaactcttatatgtagagttagcaaacataccatgcaggctgtgaccgaattcatgcaagaatgtctctacttcattgaaagtcaacaaagccggcttgttctcggtcggcttggtgaaattcatgacgacggatatatgtggacggctgttttcaccagtctttttatctatccattgttctttgtaacttgtcatccaggcaccggcacgtttcccaagacggggatggaagtccgtatataagatagctaaaaactgcccatccttatcaaacacttcgtaggcctctacttctttgtgataaaccggaatttctgtattcttctggaaagtaattccgtatagtttctctgccaatccgaatacccctttttttacttgttcgagctcaaagtaggggcgaagcatttcttcgttaatattgaatttcttatctttcagtttgtttgagtaatagctccagtcccatggcattaaaatgaagtcatttccttgttccagacgtgctagttcctgtacatccttatattccgcttcggctgtgggagtgtaagcttccaataactgattgagaagtttgtatacagctctgctgttttcagccattctcctctttaatgtatattccgcatagtccttgtatcctagcagttgagctatcttcatgcgtgtattggctatcttctttacgatatcgatattgttgaattcgttatcgtgggtacacttggtattgtaagccatatacagtctatgacgtaaatcgcggttgtcagcataagtcataaagggaacataacttggggcgtgcagggtgaaggcccagccttctttcccttcgcttttggctgtttcggcagcagcttctacgataatctccggtagtccggcaaggctttctttttttgtcagcagcatttgatagctgttagtctctttcaggttgttttcgctgaagtcaagtgtcaacttactcaattcggtggtcagcttgcggtattcttctctcgcttccccttccagattggcaccgtgtcgtacaaagctgttgtatgcgttttcaagcaattgactttgttcctgtgtcagttgtaaagtctctttttgatcgtacacttctttcacgcgggcgaatagcttttcattcagcgtgatattattgctgtgctcactgagcaacggcataatcttttgagccagttcttgcaggtcgtcgttcgtttcggcactaagcatattgccgaagactgaaaccactctatccagtagttcacccgattcttcgaatgcttcgattgtattattgaagttcgctttttccggatttagtatgatagcatctatttccgcattctgttgcttgataccttcgaggatcgcaggctcgtaatgctctgttttaatccggtcaaagggcacggttgcgtgcggtgtctggtattgcccgaagaaaggattttgggcatttgttatattgttcatagtgcaaacaagtatcaatgttattaataatctctccatagaactacaaaactactaaaattgtagcttattcaacggataacagcttgctttttaacaatatataaaatgaaatgtataaaaaaaccgctacggtttcccgcagcggttttctatattattcaggcttctaattaagcgttaactgatgccatgtgagcgatcaagtcaagaactttgttagagtagccgatttcgttgtcataccaagatacaactttaacgaatgtatcagtcaaagcaataccagcttttgcatcgaagatagaagtacgagtgtcacccaagaagtcagaagaaacaactgcatcttcagtgtaacccaggatacctttcaattcgccttcagaagcttctttcattgcagcgcagatttcagcgtaagtagccggtttagccaagttaactgtcaagtcaactacagatacgtccaaagtcggaacacgcatagacataccagtcaatttgccgttcaaagcagggataactttacctacagccttagcagcaccagtagaagaagggataatgttgccggaagcagcacgaccacctctccagtctttcatagaaggaccgtcaactgttttctgagtcgcagttgtagagtgaacagtagtcatcaaaccgtcaaggataccgaacttgtcattcaatactttagcgataggagccagacagttagtagtacaagaagcgttagatacaaactgagtacctttaacatatgttttttcgtttacaccacaaacgaacatcggagtatcatctttagaaggagctgacattacaacatattttgcaccagcttcgatatgagcctgagctttgtctttgctcaagaacaaacctgtagattcaacaacgtattcagcacctacagcatcccatttcaaatcagccgggtttctttcagcagtgatacggatagattgaccgttaacgatcaatttgctgttttcaacatctgcttcgatagtaccgtcgaattgaccgtgcatagtgtcatacttcaacatataagccaagtagtcaaccgggcaaaggtcgttgatacctacgatttgaatatcgtttcttttcattgcagcgcggaaaacgaaacgtccgatacgtccgaatccattaatacctactttaatcattttgtttaaacttttaagggttttataatatttgttcaaatatctctcggtctccgcatttgttttattttcaaatgcggtgcaaaattacgaaaatgtttttatattcgcatattaaattcacattaaatattgaaaaaagatgggaaagaacacatttttacaggactttaaggcgtttgccatgaaaggaaacgtcatagacatggctgtcggtgtagttattggtggtgcgtttggaaaaatcgtatcatcattggttgctaatgtaattatgcctccgattggtttactggttggtggtgtgaactttacggatttgaaatgggtaatgaaagcggctgaaatcggagctgatggtaaagagattgctcctgccgtttctttggattacgggcagtttctgcaagcgacttttgactttctgattatagccttctccatattcttatttatacgtctgattacgaaattgactacaaagaaaaatgaggaagctccggcagcgcctcccgctcctcctgcacctaccaaagaagaagtgttgttgacggagattcgtgatttactgaaagagaagaattaataacggctgggtcctataaacattatttctttattgggccggttatacttctaactagttgtcttgccacattcgggtagtttcagctatcagtatttgtctgatgaggaaacccggatgtggcaaatttgatttatagtccgatcggttctacctgatatcctttttcaagtaaaagcgcgattaatccgtctttgcccggaaggtggcggacgcctacggcgatgaaggtgggctgggctttcatcagttcgggtatcttgttcatccaattcagatttctgcgctttaacaaatcctcccgtattcgtttccctatctctgttaatttcggtgaggttcggaagatcgaatctactttcacttcaaaatctatcaggcttttcatgttttgagtacgatacacatctgaaagggtattgacgaaagataaaggtgaaatttcgtcatcttcccgtagatctgatattaattcgtcagcttctttctttagattacttttttctgatacaaaggcgtcgaatatgccctccaagccgacaattgtgaggcctttctcttttgcttttttttctaaagctatgtccataacttgagatttcatactatcaatccgactttgggagtatcctgtgtctaccaatttcttacctttttctatctctcctaaaataagggctaagaaattaggctttatatacatcttatttaaaggagattttaaactttgacgtactatggaatcgagaaaatgaaaatcttctttatttaataagtcggcataggttgtgtctttaggtagttttatagcggctccgacctgagcaggggttggtttggacgttgtttcgctttctccggcgaattggctacaagcgttaaaggcttggtggagttcgggaatactgtcggtatattgatatagtatgtcgtatgtaccatgatatgttccgaacagataagagggatgcgaaagaccgttgcctgaaattttccataaccaaccgccttccggtcgctgtttcgcagtggaagtacaggtgataaaggttgcaatggtaagaaatgccaggaatagttgattgaatttttgcatagctattatgattataatatttataaatcttattatagtacgtctccgcctttgggtgtgggacaaatttgtggaatgtttagtaacggacaatgaatgcattgttctgcatttttacatgttccgcttagttttattttattctggatacgctgtctgcgtttttttacggcatcgtaatttttacctagtaggttggcaatctcttttagagatactttctcgaatatcaggatacagataaaaatctcgtaagacgacaactggattgattccagaaaacttatcaatggctggtttatttttcgatagaatcctaggatttcggtgtattcatcgtatgaaggttcagcaggtttttgattttccaatgtttgcatccgctcgcgtagggaagcgataatggcttcttgtgtctgattgcggaaagtaacatcctgattgacttgttctatttcctggaaaagtgatctccagtatgtacttgcttgtttttgcctcttgaatataataatagctaccggaattaagaggataactaatagtaccaatcccagaataatgagttgttgcagttgtagttgctgcagcaagatgtcgtgttcaatcaatgattgcgaaggattagattgcgtaatctcggttatcatgatgtctaaaagtttggtataagaaatatgtaaaaagaataaatacaatagtggctgccagattgactatccatagatctcctgtcattgctgagtttacctgttggggaaggggatgataataattagtcatgacatatgccacgcttgagacttgtaaaagaatatgtgttatcaggcaagtccataggctccggctatatacatacaaccagccgaaccatagtccgtatattaatcctagtacaggtaataaggtcatgcacccccacactacagaataaattattgcggctattataattgattttcggatgccatattctgtcagtagtcctcttagaatgattcctctaaaaatgacttctattataaaaggcatgagtattgcgctgataaaaggataaatgtaagcctcgtttgagtcttttgttccaatttctgtgaatatctttttgagaaactccgggaatggtacgattgaataaatcagtgcatgtacccacggaaggcagagagttcctcctgctgcaagtaatagtacctttatatttggtttgtcaaaacggagtatggagcggtccattgctttggttcggaaagctattgccagtattgttactgtgcttacatatagtatagtcgcacatagatagctaggtacgcctgatatgatgcagataacttgaacgattacagtccacagaataaagaagacagctagccaaatagattgacggcaattgggaaaagtgagtatttccatagtttttaatttaatgtaattatatagaagactaaaaacagtgttgcaaagtagtttcttttttgtgataataccaaattggtggaaaagtctaaagggacaggcatatatacattaaaaagcgttgtatgagctgtacataatggcttaaatggtatttgcgggacaaagattaactcattttaactcagtgttcccttgtcttgagagcgatagcagaaaataaaaaatggtttcatgatgttttgaatatactaaaatgatagatttttgacttatatcttatatagattgcgtactttttcctacttttgcagaccatttatttaaaaacccatacattgatatgcaggaaaaaataataattcttgatttcggttcgcaaactacgcaacttattggacgtcgtgtacgcgagttggacacgtattgcgaaattgttccttataacaaatttcctaaagaagatacaacaatcaaaggagttatcctttccggaagccctttttcggtttatgataaagatgctttcaaagtagatttgagtgagattcgtggtaaatatcctatattgggaatttgctatggcgcacagtttatgtcgtatactaacggtgggaaagtagagccggccggtacgcgtgaatatgggcgtgcgcatctgacttctttctgtaaggataatgtgttgttcaaaggagtacgcgaaaatacacaggtgtggatgagccatggcgatacgattactgctatccctgctaactttaaaaagattgcttcaacagacaaagttgatattgctgcctatcagattgaaggtgaaaatgtatggggcgttcagtttcatccggaagtatttcatagcgaagatggaacacagatcttgaagaatttcgtagtcggggtttgtgggtgcaagcaggattggtcaccggcttcttttatcgaaagcacagttgctgaattgaaagcacagttgggtgatgataaagtagtgctcggtttgagtggtggtgtggattcttctgtagctgccgtgttgctgaacagggctattggcaagaatttgacttgtatcttcgtagatcatggtatgttgcgtaagaatgagttcaagaatgtgatgaacgattacgaatgccttggcctgaacgtgattggtgtggatgccagtgagcagttctttgcggaattggccggtgtaacggaaccggaaggtaaacgtaagattatcggtaagggctttattgatgtgttcgatgtagaagctcacaaaataaaagatgtaaaatggttggcgcagggtactatttatccggattgcatagaatcattgtctatcacaggtacagtgattaagagtcaccataatgtagggggccttccggagaaaatgaatctaaagttgtgcgagccgcttcgtttgttgtttaaggatgaagttcgtcgtgtaggccgtgagttgggtatgccggaacatctgattacccgtcatccgttcccgggaccggggttggcagtacgtattctgggagatattacgccggagaaggtacgtatcttgcaggatgcggatgatatctttattcagggattgcgtgattggggattgtatgatcaagtatggcaggcaggtgttatcctgttgccggtacagtctgtcggtgtaatgggagatgagcgtacttacgaaagagcagttgccttgcgtgccgtgacatctacggatgctatgactgccgattgggcgcatttgccttacgagttcttaggtaaagtttcgaatgacattattaataaggtaaaaggtgtgaaccgtgtaacctatgatattagttccaaaccgcctgcaacaatcgaatgggaataaaataagtcctttttagatgatacttgagtagcctcaacttgaataaagttggggctattttattttcatctcggcaaacaaactgtttcatacggcaaaaccaatagtttcatgcattggaacctttggtttcgccgtacagaaaccatagtttcaccggtgggaaactttagtttcagacgcttgaaacttttgtttccaaggcttgaaacttccagtttcattacgggaaacaaatagttttaaacctttgaaacaaaattgaatagggtgcgtctctgtcttgtcaatgagagacacaccctattccgtataacttatgttgataactgtttatttcgcttgtaacttggtgacaatcgttgccgtaaccgtcggatcgtcagtactgccggcattaccagtcaggttttgaatatataccactcctttttgtccatcttgcgtctggtatgcatatacttttccattctctatttcaatactttctgttgttggtgacaaattctttagaggagtgtcatcaattctgctgattgcgttgaactgttctaaggtcatattcgtaactccgaatttagtattgcgagcaccgttaaaggttaagctatgcttggcaggagagattaatactgcttttccattcttattttccatacctatattaacttcagcagcatatttacccgcttcacggctcttatagatgcggccatataaccattcggcatagaatactccccaatatttgtcaactgattccaatttcttatcactatgttcagaaaagataacagcaggagtgatttctactacaaagtttttctgaaagtcttctccttcagcatcagttacactaattttgatcgctttgttttctgacaggtttgttatagtatatgaaaaatcataattacttttaggttcgtcaaatgtttgtctggtactctcgatgacagatatcgccgtaccggtttcagcattggctgtgctgataacgaaggaggtaagtcctgctgcagaagtgatgcttccttttaccgtatattctttgatacctttcggagtagttaccaagttcgttcctccttcaaaattgaatagtacagtaggaacataatcaatattagcttcattttcacaagaggtaagtgaaaacaggaagataaataacgtataaaataaatgttttgctttcatattattgtaaaattattggtttataaatctgattaccacccggcgttttgttcaatattctgactgttgtcaacttcttgctgcgggattgggaaatggtaacatttggaaagaaaaatacgttcttccagcaggcttctggtatatgtaggattttctaggctgcctgttacagtaaccttgtatactggtttagagaaccattcttccgctttggcccatcggcgggcatcgaagaaacgattgtcttcgaatgcaaattctacacgatattctttgtagatgcgctgtctgagttcgtccttattccaatttttgttttcatctaattctcctacaccggcacgtttacgtatcaggttgactgtttttactgcatttttgctgtcacccaattcattaagtgtctctgcatacccaagtaatatttccgcataacgtatcatttgggggttacagtcataattggagtttcccgaacttttgtgtccgattctatcgtcgagatatttcaggacgagataaccggatgatttgcttttatcatctacgtcagtcatatccaacgcttgttgggaaccattaagatcgaatgtgttgccatgataaaagattgtcattttaaggcgtggatcccggttttcataaggattcttatcgtcatatcctgaatttttattaatgataggctggccattggcatcgtatccggtgattggttcagtaccgtctttcatgtcgtaagcatctaccagattctgagtgggagtacatcccacataagatttttcattccagggagctccttggggaagattactatgcatggtggcattggcagcgagtagatatgtatatatattttctttggttttacgctcgcagaaataatgtgcataacttaattccggattttgcgtgtcataatataaatcatagatattcaatcccataactgctgataatgcgtctctggcatcttcccatttcttacgatccatagacgggttgtttagtttgctggcagcataaagtttggtacgggctatgtaggccagtgccgctcctttggtagcacgcccgtaattgggggcgtcccattctaatggaagttgtgatgcaacatctgccagttcggaaacgatatagtcgacggttgcttctgcagttgaacgcgaacggtccaagtcggtaggagagatgatttcatctcccagcaacacgactcctccgtaccaacggtataattctgcataatacagtgcccgtaagaaacgcgcttgtaattttgaggaggctttttcttcatcagacagtaccgatttgtctactttttgtataaatagagttgcgttacggatactattgtaatagaaggtccagggatgtcctccgttcattgcaatatcagaggcagacatggttgacttaccatgcgtatgtgctgatgaatattcaataggtgcatatgcgttgtctgttgcacagtcaaggaaagttactccatctccggagaaactggagaagctaccttgtgttagacgcgtgcgggcatataggttatttaaaatctgccttgtctttgctgcgtctgcatagattaattcttccgtgttcgttcctgtctggattcgttccatatcaccggtacatccgtataggagcagtagggaaaaggctgttagaataatatttttcttcatatatcgaattgttatcagaggttagaatgtgacgtttactccaagattatagattctttgctgagggtagaagtttccgcgattggcaggttgtacttccgggtcgatcacttttaacttatcccaagtaagcaggttgaatccgttgacatacatccttaatgcggatatcggggtgtgggtaaaccactttttagggaagttgtaggataactctacattcttcagtcgcagataagaagcgtcatacaaatacattgaagatgatttgaagttgttctgattggagcctgaagaattgctcatacgatgataagtcgcagtttgctgtgtttcaggagtccatctggccaaatgtctgtcggcaagagcagaaccaagattgaagaactcccatgcaacttcacctgtcagtggaattgttacacgtgttgctccctggaacataacggtcaggtcgaagtttttgtaagacagaccaacttggaatgagccggttatttcgggtacatccgagaaaccgaaaggtgctatgtcgtaatcattgataacaccgtctccgttgatatcacggaaacggacgtctccaggttgtaaggttccgtattgcgtcgggccggctgcgatttcggcatatgtattgtagaatccgtcggctatcagtgagaactgttgtccgatagaacctccggtacggttcatataaggatatttacgtatctgttcattttgttcgataatctcattgtggttgtaggcaatgtttgctttgatgcgatagccgaagtctttgatcttatgatcccaccctacttctacttctacaccttgattttttacttccattagattttgtggagaaaaacttgtcactccggaaatgatgttggtgcgtgagggagttttcaagatgttggtacggttttcgcggaagtattcggcattcaaggttaatttaccttcaaaccagcgtgtgtccataccgatattgaatttggtagaacgttcccaacttacaatctgtgctgcttttccttccaagagtcctccactggctgcagttggagattcaccgaaattgtaattggtgcctgcggcataggtcgcttccgaataataggcaaaattacttccgaatttgtcattaccgacttgtcctaatgaagctcttattttccagtaaggtaatagtttgctgtcttttaggaaagattcgttagtaacaatccagcctacggatgcggaagggaataatgcatatcgttcgccttcaacaaatctgttggaaccattgtatcctaaattgatttctactaagtatttaccttcaaaatcatagttggcacgggctaccagtccttgatatacctgcggtagccctccatattcaccatcgcccggtgcttggtgagagttatagttgtataaaataagtcccgaaacattatgtttttctgcaaattgacgtgaataattcacgaatgcttcccagtatacacgtttttttgctccggatgcaaaattgatgagagaagggaatactttggcaagtaggcgttggtatgttccattctcattatatttccatacaggttccaccacattcaagcccataccgttgtcttcgatataactattgtaggagaatttacctccgatactcaatcctttagtaatagcatgtaaatcgtagttcagttttacagttccttccaaagcactgtcgttgtcctttctatatccctgatagaggaatgcgtgtagtgggttggctctcacaagatttggaacggctgcaaaagttccgttttcgttgactagcgggaatgcattggcaggtgtacgggtcatattgttaaatgcacggctggcatctccttcggagttgggacggttcttgcttccggtacgatagctgaagtcaacgccaatactgaagtctttagtaacttgtatatctaggttggttcgtacgttgaaacgattatagtagtaggcagagttgtagtctggttgctggagtaaattatccagttccgggttaatggcaatcaatttggccagatctggtttcttttttaatttttcgatatcagtttcgtaggttccgttctgatgaaaatagcctaatgacacaaaatatttaagccgttcgtttcctcccgatacattgacattgtacttttgttgtgtacctagtttggtaaacatatctatatagtcgttgtccggatgagtaaacgggctggactggttgcggtataattgcatatcatgctctgtatatttcggtgcttgcccttcattcaccaaaccttcattcatcaatgttgcatattcttcggcattcaccatttttgtaatacggttgatttgtgtaataccgaactcaccggagaaagaaactttagctttaccggaattaccacgttttgtagtcacaaggataactccgttcgctccacgtacaccataaacggcagtagcagatgcatctttcaatacggaaatactttctatttcgtccgggtcgatttgtgaaaagtcacgttcgatgccatctaccataatcaacggagaagcatcgttcaccgtagcacggccacgaatatagagtgcggcagcgtcttcaccgggacgtccgctggtttgacgtgttaccagtccaggaatacgtcctgtcagactgtttgtgacactggaagtaggaccttgtttcagttcccgattgcccacagcagaaatagatccggtaaccgatacctttttctgttgcccataagctacaaccactacttcgtccaaggtttgtgtgtcatcatggagtcttacggtaagtgtctttccatctttgggaacggtaacttccacagttttcattcctatcattgaaatagcaataatagccttgttactggttacctttaatgtgaatttgccgtcaagatttgtaattgttccattactgggttgtcctttttctaccacattggcaccaattaatggttcgccggcggcatctgtaacaacacctcttacggtttcttgtgcttgcgctcctatgaaccataagctcattagtagcattaatatataccattttttcatattatacgatttttagattgttatctccaaccgggattctgtactaaatttgtatttaactgcatttctgagtaggggataggagaataatacatctttgtattaaatttcctttgtccgtcgacaacaaactcatgtgtggacacaactccattatcttgccgctctattctgaatcccattagtggctggttcaaatctttttcggctgttttccatcttctcaagtcaaaatagcgttgatcttcgaatgccagttcaacccgtctttcatttcttattttctttgtcatttccgtttgagaagttgtagtgtatgggactgttattcctgcacgtgttcttactttattcaaagcttcgagagctgtccaccccaaatcggctgcatcattcggtccgtatgcttcgttcatggcttcggcgtatagcaaatagatgtctgccaagcgaatgacagggaagtagtgataggtactcgttattgtttgagctgacaggtttatattcgtatcaaggaatttgcgtaaataataacctgtaacggtagaacgaagattgactttgccgatagcatcctgactgttggggtcgctgatgtcgattgctcctcttgctcccaaaatacttccgtcacgaacgatcgtaacatcaaaacgaggatccatattctcgaatcgggtatctgattgcatatcgttggcactaccatccttcttctcgaaagcgcataccagattatgggaaggacaagttcctcccgaacccaacagtgaaggagggtaattgtaaagttccagcatatagttttttggatttccggtatatactatatattcagtattttggtttggctgtatgataaacagtttttcaaagtttgggtataaatacaatttactcggagcaaggtcaattacggttttcaaagctttagcagcaagtttccacctttcttgtacgtttccgtcagtatagccgagtatcggattttgtacattgttgaataatggactcgctgcgtacgccagcgtttttgccttaatagccaacgggcatgtactggctgataaaaaaccaaaaccacgatattgattcgtgatataattgtagcgcgtaaatacttcgctggcttcattgcataaacttacaatataatcgacgcaatcgctgaaattattgcggggtaatgttataatctctttatcatcaagagtatatgtctttttcacgagcggaactcctccataccttttgattaactcgaagtaatagagtgcacggaccgatttactctctgctatggccagttctttataactttcaacttgtgcatctgtccaacctgcattgttttgtaggagaggaatgtactgctcgaaataaagtgtacgccggataccgatgtataaatcggcccaacggttttctatcggactaatttcggttgcgtatccttgtcccagtttatacattgcattggcggggtctacataagcaccgtcatctgtagatgcgtcgaggaatgctgtgtagttgctttggtatccattgggcatggaaacgtaaacgctattcagcatttggattgttttgttataatcaataaatgtctcttccggttgccagtattcataaggttgttggtccagatagtcgcatgaagaaactgcaagagcaatacaacctgttatgagtatatgtttaatcgttctcatagttagttaaaatttaatgtttattccggcgctgaatgagcgttggagcggataagcgacaccattgccataggcctccgggtcaataacgtctagtttatcaaatgtgagcaggttctggccatttaagaagatacggagttcttcaagaccaatggaacggaccactttggttggtagattatacgacagttctacattctttagtcttagataagaggcgtcccgttgccaataggtagacgaaagactgttgttgcttgaccctgcagctttagttgtaaatcttgggttgttgacagaagggttttccggtgtccatctatttctttggtgttcatacatatttccgttattgtagaatgcaaacgctgtgtatgaagatagcattttagatactttagctgccccttggaatagtacggacagagaaaatcctttatagcttcctccaagactgaagccatagaacacttgaggaacgtccgtgtatccgtaacgtacccgatctttttcatctatcttaccgtctccgttgatatctttatatcgtatgtctccgggaacgacgctgttcaatgtgtgaacaggagctgccgcaatttcttcatacgattggaaaacaccatcggcaatatagaccagtgaagtaccataaggatgtcctttggaatacatatagtcatacggttgcaaggcttcgtccatatcaatgactttgtttttgctgtatgaaatgttaccactaaggaaatatgtgaaatctttacctatgttatctttccagtttaggctggcttcccaacctttggtttccattttcccgatattcttgcctggcatatagatagtagtatatcccaacatggatgaaaatgtggagggaatggtgtatacaccggtgcgacgatccttccaaatgtcgaatgttgcgttcaaacgattagaaaacattcctaagtctgcacctagattcatttgagtagattcctcgtaggtagcagaaggattggcttgttgggtttccaatagagaagtatattgtaccatgtcattaccaaaatagattccttcattcaaattctgaagacggctcatatacatatacgcagatactgcacggtcattattgatcttaccgatactaccgcgtatctttagattagaaatagcgggctttaacacatcaaagaatttctcattggatacataccatgctaaagaaacagtaggagacaatccccagcggttttcattattgaatttgtaagaaccttgataaccgaaagtggcatctatctggtatctattatcgtatttatatgcaaaccagccaccaactgtttgatagcgatagggaagcacaatactttgattgtattcatattggtcgtaaaacatcattcccgagacattgtgcctaccgaaaatacgattgtagctaagcttaaaatttaatgtggtgttacgtgcatcaccatatttcatggcagcatttgatatcatttcttcactagttccatatttttggagtactccgttattttgaagtgtgtaataattgaaagagcgggtacggttttgtttttgtaagttgtatacgtccatagaaatctgtccgtagagcgataaacccttcagaaggaaatccagatcctgtttcagtgatacagaaaaggcgccataacgtttatcgatcgctgtgtagccacctctgttcaagatagcccacggattaatatatttatcattgcctgctacaatacggtctcccggttgtgatttgataggattccctgactggtctacatagttatgagtatctttatagtacattgggaatgccgtagccggcgttttcaacaaattttggaatatatattgttgtgcttggtcgtaataaggtgagttttcactttgcatccaaccgtctaatttaacagataaaagggttgtggaggtaatgtcgaagtctacgttcgagcgaaagttgattcgggaaaattctgtgttggtactgtaattctgctctttttcagtattaaacattcctgcttgtccggtatatcccaatgagacgaaataacgggtacgcccggaacctccttctactgtggcattatatcgctgcatgaaagttccttttttaagcaagtttcctatccagtcgacatctgggtagcgctccgggtctgaatgattggcgaatttattgatttccgtttccgtgtagaaaggattcaaaccgtcattaatgttcgcttcattgtaggattgagcatattctgccgcgttaacagctttgggaactctcatgttctgctgatatatcccttggatgttaaggctgactctaggttttccgagacgtccggatttggtttcaatcaggataactccgttcgcgcctcgcataccataaagagcgatagcagaagcatcttttaatatggtcactctttcaatttcctgagtttgtaccataccgtagtaattgcgttcttgtccatcgattagtacaagtgcgccatttccattgctacgtattccacgtatataaatggaagcttcgtcattgcccggttctccacttcgctgaatcgtagttaaccccgatattcttcctgacaatgcattggataaatgctgtacaggcacattctccaatactttaccggagattacatcggatgcaccgctaaactctgtttttaacttacttccatagggtatggaaatgattgtcgagtctttttcattcttttccttcactgttttgtcctgtgctgaaatgatggttgaataacctgcaagtgagcaaaatagcagaaagaacttgatttttaaagttttctttctcataaatattaaattaaggggaatattttataatattcagtttagaataagtcgtagtagaacttagcctaatttaatctatatctatgataatcagtttgttaaagttgtgatatttattaaaaaagagtaatggtataaagttggtatctaaaaaagtagatttaatttgcgggagaatgcaaaataaatgaaatattagcttgatattttaaaatcaattaatatatttgcggagaattaaaaacaaaatgaacttttaaagcaaaatcgcctatggagagctaagcacttctactataatttagaaaattattaagttctactacaacttagctattaatttaatcttttagaaacataaataagaaaagggaaaaactattttttaatggtggttatatgtttgtcgtttagtaatcgtagacaaaatgatcctatttgtgctacctaaacagggaattatataattaactatctatctaattatctaggtaagtttttaaaacctctgctattttctcatatcctttagtattaggatgaagtccatcgctgaataaggatgaattgataatgccatttttatctgtcaacagattgcttaagtttatataaatacaattctgttctagcttcttacgaagttctttgttaatttgctgaatacgtttttctgtgtttgctcttgggaggattcccattacgcataatttagcttgtggttggcgtattttaatagcttcggtaacctgaagaataccttgcagaatttctttatctgtattaaattgaagattattagttcctatcagtagaaaaatcatatttgctttgaaaccgtccaattcgccatggtagatgcgccacaatacgttttctgttttatcccagccgaaaccgagattgcgaactgacctgtttttgaatagcttgtcccaagcttcttttccacgttgtgtcggtgcagtaggctcgccggcccagtaatgcgtgatagagttacctatcataatgatttccggggcattttctcggtttaatttaaggatttcttcatgacgcgcgtaccaatcataggaatctctttgttgtttgcatggaatacatgaagtgggaccttcattcttttcatgtaatatttcccgtatcttttttaaataactgtctgcatattgctgcatacctaaatcagtagaatgaactccgtctaccataccgtctgccggaatacctatttcttcctttgtcagataatagatatccggaatttgttcttcttgtaaagtattgtatgcttttcgcaattcagtattagctacgcggtatgattcttctgctttttcggaagtgacatcgttggcatatccgtcatgctctactaataaaataggtgctttgctggtttcgcgtaatttctttactccttttaaggtacggtcgtatatcacttctgcactctttcccggtaggttgggcatacagtcaatgataaacagttttgcatcaatctcggacaataagtcgaatagttcgctctcgagtttgccattgccggagaatcccaaattgatgacgggatgttccgactttctatttaaaatatttccccatgccatacccggacgggaggcacaagccccttgtgcaatggaagttccgtaaataaccaggggtttttcttgtgagacgggaagaaaacggaaagaagtgttctcgggtacaccgatttctagccatgacacactgttgtaaagaggtagaaataattgatattcaaaaccttttccggtttttgcggcatacgaaagtccgctaaaatcgtatgtaatggtatcctgcataacataccgtccaacacaccaacgctcttgaccattattgtcggttgcatataaatcaatgccagagacaccagttgctggcatgtgtggcatggaaagagcgcctttcacaacataacgaatttttatttccggagcattggaacgaaatgcaatggagagtcctgcgctttggagtgataagtcccatactgcttttcgtactttatctttagcccgttgtggaagtcgtgtgtaaaatcctgcgggatcttcttgccatgcttgtccacggacgaccggaaaactttctttttgtggattgaaccacttatattgtgctgttagtgatgaagtgcaacctaaaaaaagaataaaaagaaagaggtgtaaatgtgttgttttcataggtggtataaataatataacttaatttatataatgagcttctgtgcatcaggaataagaatttcttttcgtcgcaactcaatcaatcctttatcctgtaattcgttaagtgctttggaagtattcagacgggtatcgtctaaatagcgagctaaatcatccatttttactttgaatatcttttctccttgtgttttctcgcaatgcagtaagaagaagcgggaaatcttctcctttaagtctatagtcggttcttcccatagtcgggagtaaagattttgtgcacgattgctgacaatattcatatagttgagccggaatatatcgtaattaaacaggtcgctaagtacgaaggctttactaatactgattgtgtgggcttctgtatgcgctatataagaggatgcgtaattcgtattcatgccgaataacgattgtggctctatcagatatggtgcttccatttgctcaatgacagtgtatatgttttctttggaagtggtgacgatagatactttaccttttaacaggaaacggagttgcttacaaggactaccattctcaatgatagtttctccggctttatgcttgataaaatgtagctttaccttatccaaaatactagtgaaatcttcatggcaaagaccttgaaataaaggcaattggagcaaagtgtcgaacattgtttccatacgttgttatctcttatttattgtacaaatttactcattatacaatactgctgtcaacatctgacccttctttttgttttttttattgtttgaatgcataaaaatagagtatatttgcagaaaaaaaggaggaaattatgtttgcaggctttaactggcaacagatgattagtgcgtttatcgtgctttttgcggtaatagacattatcggttctatacctattattattaacctgaaagaaaaggggaaggatgtgaatgcaatgaaggctaccgttatttcttttgccttattaatcggtttcttttatgcaggggacatgatgctgagactcttccatgtagatattgaatcttttgctgttgcaggtgcatttgttattttcctcatgtctttggaaatgattctggatattgaaatcttcaaaaatcagggacctatcaaagaagctactctagttccgcttgtttttcctcttttagccggtgccggagcttttactaccttgctttcccttcgggcagaatatgccagcattaatattatcatcgccttggttctgaatatgatctgggttttctttgttgtgagtatgaccggtcgtgtggaacgattcctcgggaaaggtggtatttatattattcgcaagttctttggaattatcctgttggctatctctgtcaggttgtttacggcgaatataacgttgttgattgaggcattgcataagtcctgattggaaaattcctccttcggattctcctcttcttcctcgtcatcatccttttcatctgcaaaaggttccgggcgttgaggcccgtgattcacaaaagctagggcacagagtgttcccataattccaccgcttagatgtccttcccacgacatattggcgggagagaaataggggaacatatgccagataattcctccgtataaaaaggtgacaagcagagaaatggcaataagtggtacgtatttgcggagaatgccactgaaaaaaaggaaaaaggcaagaccgtagattaatccgctggcacctatatgccagcccggtttacctataataaaggtaagtagtccggcaccgatccaaatcaggataaaaatttttcccgctattccccggtaaaagtaaaaaagacaccatgataagaaaaatagcgggagcgtattagccagtaaatgactgaatccactgtgtatcaacggatgagtcagaataccgaaaactccacgtttttccataggatatatccccaagtgagagagatcccaatgcatcccgacctctacaatcttgagcatataaagaatgaaaataagaaacaatggctttgctgcagctagcatgatacgctgaatatcttgtttcatgactttcttttctttagatattttacgcaatactacgaatatttgcacaaaatctgaaaataaaaaccctttttatttttgtttttatctagaatttgtacatttggacattgtacctgttatatatggtgctacaaccattctgtatgcgatatagtaataaatacaagtatgatataatagccaataattaacctttaaataatgcacaactatgagttatttacgatttgacaagaccctcatgacgaatctggaagaatctctgcagagagaaattctccggacgaacaaggcaggagcttatcattgtacaacgattgttgattgtaacacacgcaaatatcacggcctgttggtgattcccgttcccaatctcgacgatgaaaatcatgtgctgctatcttctcttgatgaaacggtaattcaacatggtgcggagtttaacttgggattgcataaatatcaggggaacaactttagtcccaacgggcacaagtatatccgtgagtttgattgtgaacatatcccggcgacaacttaccgtgttggaggagtaattctccgcaaagaaaaaatctttgtacatcatgaaaatagaatcctgattcgttatactttacttgatgcgcattcggcaacgactttgcgcttccgtccgttccttgctttcagaagtgtacgtgagtatactcacgaaaatgcacaggcaagccgcgagtatcaacttgtggaaaacggtataaggacttgtatgtatccgggctatccggaactgtatatgcagttgaacaaaaaatgtgagttccatttcctacccgactggtatcgtggcattgaatacccgaaggaacaggaacgagggtatgatttcaatgaagatctttatgttcccggttattttgaggtggatataaagaaaggggagagtattgtattctcggccgggacttcagaaatatcccctcggagactgaaacagacatttgaggcggaagtggctgatcgtacaccgcgtgatagtttttatcactgtctgaaaaattctgctcaccaatatcacaatcaacaggaaggtgaacattatatccttgccggttatccatggtttaaatgccgtgcacgcgatatgtttattgctttgccggggctgacgcttgctattgacgaaatcgaccagtttgaggatgtgatgaaaacagcggaaaaagcaattcgtaacttcattaatgaagaacctgtgggttacaaaatctatgagatggaacatcctgatgttttgctttgggctgtttgggctctgcaacaatatgcaaaagagacttcccgagagcaatgtcgtcagaaatatggagagcttctgaaagatatcatggaatatatccgtcagaggaaacatgataaccttttcttgcatgaaaacgggctgctttatgcaaatggtacggaaaaagcgattacatggatgaactctaccgtaaacggtcatccggtaattccccgtacaggatatattgttgagtttaatgctttatggtataatgcgctgcgttttgtggcagatctagtgcgtgaaggtggagatgcaatttttgcagatgtacttgacgcacaagctgaagtgaccggaaagtcatttgtggatgtgttccggaacgaatatgggtatttgcttgattatgtggatggtaatatgatggattggagtgtacgccctaacatgatatttacagtagcatttgattattctcctttagatagggcgcaaaagaaacaagtgcttgatattgtgactaaggaattgcttaccccgaagggaatccgttcgttgagcccgaagagtggcggatataatccgaattatgtaggtccgcaggtacagcgggattatgcttatcatcagggaaccgcatggccttggctaatgggattctatctggaggcttatttgcgaatctataagatgagcggactgtcattcgtcgaacgccagttgattagctatgatgatgagatgacaagccattgtgtgggctccattgccgaactatttgatggaaacccacctttcaaaggacgtggcgcggtatcgtttgcaatgaatgtggcagaaatattacgtgttttaaagctactgtctaagtattattaaaaaaggaggaacgaagatgaaagttttaatgtttggatgggaattccctcccaaaatatatggtggtcttgcggttgcttcttacggaataactaagggattgagcttgcaaggtgacatggaaacaatcttttgtatgcctaagcctagcggcgaagaagaaaagttcttaaaaataatcggtatgaaccaagtacctattgtatggcgtgatatcaattatgactacttgaagtctcgcttgttggagatgtctccggaagaatactattctttccgcgatcatatttatgccgatttttcttatatgcacgtcaatgatttgggatgtatggagtttgcaggaggttatcccggaaacttgcacgaggaaattaataacttctcgatcattgccggagtagtggctcgtcagcaggaatttgatattatccatgcgcacgactggctgacttatcctgccggtgtacatgccaaaatggtaagtggcaaaccgctttgtattcatgtacatgccactgatttcgaccgttctcgcggtaaagtcaatcctactgtttattctatagagaagaacgggatggatcatgctgattgtattatgtgtgtatctgaacttactcgccgcacagtgattaacgaatatcatcaggaccctagaaaggtatttgctatgcacaatgctgtttatccattgtctcaggaacttttagatattccgcgtcctgaacatccaaaagaaaaagtggtaaccttcctcgggcgtataactatgcaaaagggaccggaatactttgtggaggctgcggcacttgttttgcagcgtactcgtaatatccgttttgttatggcaggttcaggcgatatgttgaatgccatgattaacttggtggcggaacgtggtattgccgatcgcttccatttccccggctttatgaaaggtaaacaggtatatgaggtttataagaatagtgacgtatttgttatgccgtccgtttccgaaccttttggtattgctccgttggaggcaatgcagtgtggtacaccttctattatttcgaagcaatcggggtgtggtgaaattcttgataaggtgattaaaaccgactattgggatattcatgctatggctgatgctatttattctctttgcaccaatcaatctcttttcgagtatcttcgggacgaaggaaagaaagaagttgatgggattacttgggaaaaggttggcttgagaattcgtgctctttacgaggatgtgttaagaaactatggtaaataacaaaacaataaataaaaatgagaactatctgtctttattttgaaatacatcaaattatccatttgaaacgttatcgtttcttcgatatcggtaatgatcattactattatgatgactatgcgaatgaaacaggtatgaatgaagttgctgaacgttcatatctccctgcccttagtacattgattgagatggcgaaaagttcgggcggtgctttcaaggtagcgctttctatctcgggagtagctttggaacagcttgaaatccatgctccggcggtcattgatttattgcaccagttgaatgatacaggatgttgtgaattcctttgtgaaccatattcacatggcttatcatcactggccaatgaggattgttttcgcgaagaagtacttcgccagcgtgataagatgaagcaaatgtttggtaaagaaccgaaagtattccgtaattctagcttgatttattccgatgaaatcggtggcttggtagcttctatgggctttaaggggatgttgacggaaggggcaaaacatgtgttgggctggaagagtccgcattatgtatatcattgtaaccaggcacctagtcttaaattgttgttgagggacttcaaactttcggatgatatcagtctgcgtttctctaattcggattgggcggaatatcctttgtttgctgataaatatatcaactggattgatgtgctaccgcaagaagaacaagtaatcaatatctttatggaattgagtgctcttggtatggctcaaccattgtcttccaatattcttgaattcctgaaagcattgccggaatgtgcgagagctaaaggaattactttctctacaccgactgagattgtaacgaagttgaaatctgtttctcaacttgatgttccttatccgatgtcatgggtagatgaggaaagagatacgagcagttggctgggtaatgttcttcaacgtgaagcttttaataaactatatagcgttgccgaacgtgtgcatttgagtgacgatcgccgtatcaagcaggactgggattatttgcaggctagtaataacttccgttttatgacaacgaagaatacaggtatctggttgaatcgtggtatctatgactctccttatgatgcttttaccaactacatgaatatcttaggtgactttatcaaacgagttaattctttgtatcctgaagatgtggatagtgaagaacttaattctcttttgactactattaagaatcagggtgatgagattactgaattgcagaaagaagtagctaagtggcaagcaaaagccgaaaaggaaacggctgctaaaaaaactgcggccaagaaggttgttgtggcaaaagagtcggtggtaaagaaagaacctactgcaaagaaatcagcgaccaagaaaactgctgaatcaaagaaagcggtcggacgggccaagaagactgttacaaagaaagaagaataaaataaaattctatatacaacagaaccgtgagtgagatgtatatcagactcacggttctgttgtatatagaaaatagtatttaataaatatcctttttaaaataatagcgcagattacacaattagtaagtagtccgcgctattttttatgatattctcctgctatttatttcgctttcgtagaaccaaagtttgtagaaacaacttcgagttttaatatgttttctgggtatacaggattgccctgagaatctttctcttctccttttaatccacctttcaagcgtacataacctggttttaagtcatgttggataccaatgacattagaactgctaccataataaccgtttgaactggcatctgttgttacaagtactggaattagtatggctttattccaatcactgagttcttcccagtcttttatgttattaacagtatggttctctattttcccttcatcattaaatgtttggaaagtgatagattttttctcttgtatttccttgtctgctgctgctctatcttttaaacagtcatttatcaatttagtgatattattgtacgtgtattcagtgagattagttgtagaagaagtctgggtgaatagcgatgaagtaacgccatcacttagttgattattctcaaagaagctttctttatattttttacgtatcagtaaaacgtttctaggcatagacatcccaaatttcttatcgctagtttcgttataaataggaattcctaatttaacggcgttcaatgtatcaccttcaagtttttctgctatttggctaacagggagagtgacctgagtaaaaataccagccggactttttaaataggtccaatcagaattatcaatacacttctgaatagcttctgtatcatttgctaatctattagcttgaataatttcacgtgtagaattgaaggtgcggccagtatactgtatagagtccttttccgcattaactttagattttagcttaattccagtaatactatctgtcacatattcaatggaaacaacatccatttgtacttgactgatataaagtacagtaccgtctccatagtcactttttacatatatgccactgaatagatcaggaaaagccttgtagaaatcttttctgtcagctttgaaaagtttctgtcctaatttctttgctttggcttgatctaatcgaatacttacacttggcacgtatgtatcaagtttacgaatagaatcacttactgataaatctacggcagtatatgctttagttcctaataaatctgattgtttgtaataatcctccggattaatattggtataatatgcctcttcttcattcaaccttttatctaattcgtagatgcttaaacggcacgcagttagtgagtcaccgaaataactactataccataggtagatatttatttggcaattgcctattacgtgattattctcatctttgattaaagtaaatctatctttaatcttactatctatttctatattatcaaaactagtaaccaaacttcctgtggctttagtccctgcttcattttctttgtacatttcagagaaactcaatccttccggacagttcagttcagataaaaagcctgcctcatatgtaccgaatgtatcatctgtgaattttcccacgtatccggtgctggtctttgcatatacttcacctgcgtgtacagattttgttgttacgtcaaatgtagtcagttttccattgatattctggtcacttcccggaaacattcccagtcctaatccggctgtgttatcgtcacatccgaaaaaagtgattgccagtaaagctattaaggcgtattttgctttcatgatcgtcgtatcttgatttttattcttcttctttgttcgcagtggcatcccatacctgatcgtagaactcgttgcaagcatctgcatagttctccgggttctgataatcaagtatcagtttacttgattgacgggcatattcaatgatagattcattcacctttttgctgttttgtatcactccgtccgaataatccacggcgagtttgcaaagggcggcataatctaccggttcttttaagttgcttaaatcatccttagatattcctttcaacattaatttagttgcaaagtcgtcactgagcgtatttttgaagtcgtcttcatatacagagaatacaactttggcatcacggaacgacggttcatccttgtacgctttcttaatataaagaggtgctaacgctgtcatccagccatgacagtgaattacatcgggacaccagcgaagtttcttcacggtttccaatacaccacgcgcatagaagatagcgcggctgtcgttgtcgtcatactctatgccgttttcgtccatagcctgcatccgattctggaaataatcatcattatcgatgaaatatacctgcatacgtgcggattggatagaagctacttttataataagggggtggtcagtatcatcgataatcaggttcataccggagaggcgaatcacttcgtgcagttggttcctgcgctcgttaatgtttccccatttgggcataaaagttctgatttcacggcctttttcttgtatcgcctgtggaaggtttctacctatattggccatttcggattctgaaacgtaaggtgtaatctcttgagtaataaataaaactttattcgcctttgtcataataacaatagttctctataatattctgcaaagatacgaaaaaaaagacacattaaataagatattctttctttatgtggcaaatattagtttattttgcagagtttttgcaaacgagtaaaacataaaccaattgacgaaaatgaaaatagtgcacactatcaaggacttacaggtcgaattgactgccctgagagcccaaggtaaaacagtaggattggttcctacaatgggtgctttacacgcaggacatgcatctctggtaaagcgcagcgtaagtgagaatggtgtaactgttgtgagtgtttttgtaaatcccacgcagtttaatgataaaaacgacttggagaaatatccgcgtacattagatgcggattgctgcttgttggaagaatgtggagctgcatttgtatttgctccttctgtgagcgaaatgtatccggaaccggacacccgccaattcagctatgctccattggatactgtaatggaaggtgcattccgtcctggacatttcaatggtgtttgtcagattgttagcaagctgtttgatgcggcacagccagataaagcttatttcggagagaaagatttccagcaattagcgattattcgtgaaatggtccgacagttgcagtataaactggaaattgtaggctgtccgattgtgcgcgaggaggacggattggctttgagtagccgaaataaacgtttatctgcacaagaacgtgaaaatgctttaaatatttctcggacattatttaaaagtcgtaactttgcagcctctcatacagtaaatgaaacgcaaaaaatggtggaagatgcgattgacgtagctccgggattgcgtttggagtattttgagatagtagatggaaatacattgcagaagataaccaattgggaagatacttcgtatgcagtaggatgtatcacagtgttctgcggagaagttcggctgattgataacattaaatataaagaataactaaaaagacgaaaccttatgatgattgaagtgttgaagtcgaaaattcattgtgcgcgtgtcacggaagcgaatctgaactacatgggtagtatcacgatagatgaagatctgctggatgcggcaaacatgattccgggagaaaaggtgtatatcgctgataataataatggcgaacgctttgaaacctatattatcaaaggtgaacgcggttccggcaaaatttgtctgaatggtgctgccgcccgtaaagtacaaccggatgatattgtgattatcatgtcgtatgcgttaatggattttgaggaagcgaagtcgtttaaaccgtctgtcattttccccgaccctgcgacgaacaaagtagtaaagtaaaaaagtatctttgatatttttataagaaaaaccctgtcttacagaatgtaagcagggcttttcttttttatctattctattttcttgttactactttgtttttaactgttcgttcatagccgccgctgccttacggccgtcacccatggcgagaatcacagtggctccaccgcgtacaatatcgccacctgcataaatcatcgggatagaagatgccatgttctcatctacggcaatcgttcctttccgtcctaactccagtcctttgatagaactagggacaatcgggttcggcgacactccgacacttacgatagctaggtcaatatcaatcgtttccgtagcacctgggatagcgacaggactacgacgtccagaagcgtccggttcgcctaattccattttttgtagaataacctgttttacacaaccctgctcgtctgcaatatattcgataggattgtgcagtgtcagaaattctactccctcttcttttgcgtgtttaacttcttcgatacgtgcgggcatttcttcttccgaacgacggtagataatcatggcgcgttcggcacccagacgtttggccgtacggacagagtccatggctgtgttgccgccaccgattactgctacattcttaccgaaagctatcggagtatcagagtcttcgctggctgcatccattagattgacacgggtaagatactcgttggaagacataatattgattgagttttcgcccggaatattcataaagttaggaagaccggcaccggaagctacaaatatccctttgaaaccttcctctttcaggtcttctatactaattgtttttcctacaatacagtctttgataaagttaactcccattttggctagattgtcaatctcaacatcaacaatcttgttgggcagacgaaattcaggaataccatatttcagtacaccgccaatttcgtgcaatgcttcgaatacagttacgtcatatccatatttcgccatatcacctgcaaacgataatcctgcaggtcccgagccgataacagccactttgataccattcttttcagcaatgactggtacggagatttgtccgctctcgcgttcataatcagctgcaaaacgctccagataaccgatagctaccggtttctcattcattttcagatgaatacactttgattcgcattgtttttcctgtgggcagacacgaccgcaaacagccggaagtgcacttgtctcttttaatgtctttgctgcttccagaaattctccacgctcgatgttcttgataaaacggggaatgtcaattcctaccggacaaccttccatacatcctgggtttgcacagtcgagacaacgtttggattctgttatagcctgttcagcagtcaacccttggtttacttcttccttgcggctatgtgaacgatattttgcatcgagttcgttcatctcaacacgcgggatagccgtgcgttctttggctttcatcgacttacgcaactcctgtctccaggcaacattacggcttttttcgtcggtctcctttgtagcttcgcatacagtgtcgagtttgtgcatttcttctcgttcgatgtttttgaatgcccccatgcgtttcagcatttcatcaaaatctacttggtgaccatcgaattccggaccgtctacacaaacaaatttggtttttcctcctacagtgatacggcaagcgccacacatacctgttccatctaccataatcgtgttcaatgagacgtcagtgggaatttcatatttcttggttagcaagcaaacgaatttcatcatgatagcagggccgatagcgaagcatttatccactttctcgcgtttgataacttcttccacaccttccgttaccagtcctttgcgaccataagagccatcatccgtcatgatgataacttcgtcggagcttttgcgcatttctttttcgagaatgataaggtctttattacgtcctgccaatacagtgatcacacggttgccggcagctttcaaagcttgtacgatagggagcattggggccacacctacgccaccaccggcgcaaacaacagttccgaagttttcaatgtgagtcgcttggccgagaggacctactacgtctgtaatataatcaccttcgttcaactcacagaggcgggtagaagatagccctacctcctgtatcaccagggtgatagtgcctttctttatatcagaaccggcgatagtcaaaggcatacgttctcccttttcgcctacacgtacaatgacgaagtgtccggccttacgagatttagcaattaaaggggcttcaatttcaaatttgaacaccttttcagaaaagcgttccttgctaatgattttgttcattatctaattaatttgttggttttattacgtaactgctaacagaatgttataaattatggcaaagatacagcttctttacgaaaaacaaaaagaaaagccactcttttgaagagtggctttctatatacagatgaatctatctgtttatttcgtacggattttgtacccggctactccataatacaagatgaacaggaagcaaggtaaacacagccaataagcttgttgcgggcttgctacatcctttagccaaccatacagggtagggataacggcaccaccgaacattgccatgataagcaatgatgagccggctttggtaaacttgccgaggtcggccatggcaagcggccacagtgccggccacattaatgaacatcctaatgccatgaatgaaataaaatagatagatatatggctcggagttagtactaccaacaatgaaccgataatagccaggatagaacaaatttttagcgcagtagcttggctgagatatttcggaatgaaaataataccgcagatatagccgatcacaataccgattggagcaatccaggcataattagctgcaccttctagtccaagttcttttgcgtaatcgaccaatgtacccaatgagacagtttcaacacctacataaaggaataaggccaggcagcctagtaataagtgaggaaattgaaaaacagacgtttttgtggcagcatatggacaggcttcggcttcattctcgctttcgtcttctcctgccgcttttacttcgggcagtggagcgaagaatgccataatacccaaagctataaaagcacagatgatgataatgaacggcttgttcagatcttcgataccaatcagattgacatctttccccagcaaccatacgataaagatagcggggataggccatgccaacttattacagatacccattatgctaatacgttttgctgcactatccaacgggccaagaatggtgatgtatggatttacagacgcttgtaggtatgcattggctgctccgctgataaaagaagccagcaaaaataaggtgaagctttcctgatctgccgataagatgaacaggtagaatgctatggcaaaaataaagaaagacagcgacatggtacgtttgtaacctattgccttaattgtgagtccggcaggataaccgaaaactagaaaaggaatgaatgtcgcagcgataatcagataagaagccgtattcgagattcctaatgatttttgtaataccgggactaataatgaattgattccgagtgcgaaaccaatcgcgaaaaacataatgccaataaatgtcaatggcaacacaaagcttttagtgttttttgtcatgggggaaatgtgttaaaggttatataaaaatctcttgtaagaaaaggatatacctgattcttacaagagtgaaaaattcttagtctatcatatcgaaaccgcagtatggaaccaatgctttcggaattttgattccttcaggtgtctggttgttttcgagtagggccgcaacgatacgtggcaatgccagtgctgaaccgtttagggtgtgacaaagttcagttttcttttctccactacgataacggcatttcagacggttggcctgataggtgtcgaagttggaaacggaacttacttccaaccagcgtttttgtgcttctgagtatacttcgaagtcgaagcaaagcgcagcggtaaaactcatgtctcctccgcaaagacgaagaatgcggtagggtaattccagtttttgcagcagtccttctacatggtcgagcatttcctgatgagattgcttggagtgttccggtttgtcgatacgcaccaattctactttggagaattcgtgcaggcgattcaagccacgcacatccttgccataagaacctgcttcgcgacggaaacattgtgtatatgcacaattcttgataggcaattgtttttcgtctaggatgacatcgcgatagatattagtaacaggcacttctgctgtcggaatcaaatataaatcatctacttcgcaatggtacatttgtccttctttgtcaggaagttgtcctgtgccgtaaccggaagcggcgttgaccactgtcggtggcatgatttcaatatatccggatttgcgtgcttcatccaggaagaagttgataagggcacgttgaagttgtgcaccttttcctttgtatacaggaaaacctgctcctgtgattttaacacccaagtcgaagtctatcaaatcatatttttttgccagttcccagtggggaagtgcatctttgggaagttcggtttccattcctcccattttctcgacgacattgtcttcggcacctacaccttcgggtacactgtcataaggaatattaggaatcgtatagagtgcattctgcatatcggtggcagcttgtgtcattgttgcgtccaattccttattaccttcttttaattctgctacacgtgcgcgtgcggtttcagcttcttctttcttgccttccttcatcagttgtccgattgtgcgcgaaagagaattaacttctgccagatttttatctaattgattttgggtactacgtctcttgtcgttaagagcaataacctgctctatcgtttcttttgcatttttgaaatgcttcttttccagtccgcggattaccgcctctgtgttttctgtaatttgtttaatggtaagcatatctatactttttatgaactttcacttaatggatgcaaagatacagaaaaaacgaacaatcaagcaacgaaaatatctaaaaaagaaaagaaggtgtgtcgtaatacacgatgcgccttcttttttttcattgactataaaaatcggttcattttct

SEQ ID NO: 3060 - DNA, 743 bp, Unknown
  gut microbiota DNA sequence
aaaagttattatttttcaataaaaatcatctcaaatataaattatcattatctctataccaatcctctattgcttcctcaaatgtataatgaaacttataccctgaatcagccaatttctttccgcagatattagtagaaatcattaacttcttgacgcgagccggacaaatgcctaaagcttttcctcctaacggacccacaatacttgcagctgtcagcaaaagacttcccggcaccttgacaatagtacgctgaatccccgtaacttttttcatcgtttcaactatttgttcaatagtaaaagccggttcaaatgtacagttatacaactctaccccttcattatgattctccaaccgatagagcataaagcgaaccagctctttcacataaatacaagccttaatcgtatctttacgacccggataaaagaatttaccgctgcggatcccccaatacaaacgagtaaagttaccgttttcccctttaccgaataccacacccggacgaacaatagtaagctgtcgttcgttcggctttttagcctgccagaccgtatgtatcttttcggctaccaacttagaaatcccataaggggtgttcggagtaggaagtgtgtcttctgttttcaaatcttcagctgcaccataaggagctatggagctggtaaaaacgattttctttatccccaatttctccgcaaaagcgcatacattctccgcaccacgaatatttgtctca

SEQ ID NO: 3061 - DNA, 100751 bp, Unknown
  gut microbiota DNA sequence
aactattcacgatcccgattattatagggatgttacgtatgaatctgaatttgaatatacagatacttttgtatctgttgtatattccggttaatcccgtcctttattcttcctttcataaacccaacttttgcaccatggaaaagcagaataacatcgtacttgccccgtgcgccacacaggtagcggagctttataatttatggagggaaaaccatacgggccggcttacggacttttataagtttatggtaaactcttcggctgccagggatcgctttatatcctctctggaggcgcagcatgagttaatcggaagttttatcgtaaccaaaacagcaatacaatgagtgccagcgacgaagctttaaaggtgaacatatatccgacgggaaatgcctttacgcgtaatcctatttttctgtctgtatcatcctattctatggcaacatacagtatcagaatgaataatgaggaaattttcaaaggaaacggaatcggggaatttcgtgttaatatagccgagattgtcgaaaccggaatagcaagtacacagattttaccggataatacggagcctctgcttgccgtttccggtttgtcggccaaagtaactatacatgtggttaatgagggggaagaagaggataacctgtcttttacagcctggaaagggggaatttccaagaaagagtttaaacgtcttcgaaatatggggactgatatattttctttgaagttcttgaatgaatcctgcaatttcttttttaccacccggagcaacgactggcgtataacgatgcgcgagacggaactttacccgctctgtttcatctatccgggacacgaactgaaaataacggaacttcttaccggtcaaagccttgcagtaccaggtacggcagggaatttctacgccttgaacctggaggccgtaagacttaaattctttaccgattacggggtactggctaacctttttgacgtgtatagcggtgatacgtttgctctccggatcgggatcgaacaaagcccgacggttcgcgagcgttaccggctccggttcctgaacagttacgggacttacgaagtgttttccctggaaggcgaggcaagcgtaactcccagcatggatgaagacgaagacgctgttttccggcgttacgatgaaattaccgatgattattattcggatcgcatacggacggagatacaggaagctgtaacgattaagacgggattcaaacgcccgcaggaaatacgttttcttcttgatctgctttcctctgatgatgtttacctggcaggttacggccgggaagaaataaaagtcattccttcggcggaagagttttcttaccgtgtccgtccggacgcaccgcagaacgtgacgttaaaactcatgtttgccgacaaagagtccaactggacgggagaaattacggaaagcggctaccggaaaccgagggttcattccaaagagtttagtaaacaatttaattaatgtatctatatggcaacacaggagtatatcgatgatcttattatagtcattgaaaccgcggaggacgcggaaagcgttactaaccaaatggtggcggcggttcttggcttcttgaacgaacacctgaaactggtttcccagggtaaggaagtcgaggcggaggaagccgcccgcattgccgccgatgcagcattacagaaggctatagacgccgtttctttacgtatcgaccgacttgtcggtaacaacgcttcgcaggcaatcgacaactttaacgagattcttaattttctgaacgggcttaaagacagtgattcgcttgccgcattgctggctgatattaacgcccgtatcggcagtgaagacggttcggagagtgaagacggttccctttggggaaaactgaaaagtttgtcccaggatataaccagttgttccgatgacataagcacattgcagatagaccgtgacaaaatgaaacaggggttacaggaaacggacgggcgtctgtcttccacctttaccaatgtaaacaaccttttgaacgccggcagcgtttatagtgatctgtcgggggtatttgcagcattgaaaacggcgggaaagattaacaatgtccggaaaaacggtgtaatcctttctttccttactgccgacggctgggtgacgaaacaatttagaggtaatccggacacggattttgaaaatgtcgaaaagtgggaggatttcggcagcggcggttcggccggcgggaatacttataacgtaactggtaacataccacttacagaaggtttctatactcttgcttccgccattgccgcggtaccggaaaaacaacgcggccgggggcgtgttatcacctttgaaacatcgctcggtaaatgggagacgtggcaatttaccggaaccgatccggctgtctgggatcaggaggcgagctgggaagagttcggcggcaaaggaacggtaaagagtgtaacggtaaacggcgagaagcagacgccggacgcggctggtaatgtgaatgtaaacgtggatatcctggaagtggacgaaactttgtccttagattccaccaatccggtagaaaacaaggttgtaaccgcccgttttaatgaggtggacgcttccacgttgttcaatgtaaatgcagaggtaagcgaggatgaaacatccgtccgtctgtctttccagaacaaaagcggcgcggaaattaccgctgtggatatcccggccggttccggtggaggttccggcgaaacggtggctactaaaattgccttaaatgcggctgtagataatgcgatcataaaagaaggcggaaacgcccgtcttacttatacgtacgatcaccaatacaccacgggggacgaaaagggggaatctaccgggcaaaaggcagatatcaccgttacgatcaggcgtggaacgactaccatgtattcccagacggtcagcgatgtttctaaaggcagttacgaactggacctttcaagttacttgcttgttgggaataccgatatttacgtagtggcaaccacaaccgatccgactaccggcaagaaacaaacccggcaggcgtttacatccgtaaaggttgttagtctttcccttaccagctcttacaatctggccggggctatagccacaggcggttatactctggccgacacgattaatattccttatgctgtcaacggtgccggaacaaaggtcgtcacactttatctgaacggtcagcaacagaacgcgcacactattacaagatcaggaacgacaaacggcagtttcagtttgtccccctcttcgcttgtgaccggccggaataccgttcaaatggttgccgaaatggaggcttccgccgatctcgtgttaaagtctgaaagtatctacattgatatcctgaaatccggaggatcggcaccgttcatcggcacgatgataagttttccggacggccgtatttttacggaggatcatcttgttccgcgcctggaagcggggcagtacgaacaggtgaaatttaactttgtggcttatgatcccgccgcgacgccggccaaagtggacgtttaccgggacggggtgaaaacgcagtctgtcagtgtggcccgtactacgcagacatataccaaccgttttacccagcagggtgaaatcaatatgaaatttaagacgggagccacggaatacccgttttatatcgacgtgacggaaagcggcatcgacttgcaagaaactactgccgggcttgtactgaaactttcggcagccgggcggagtaacagtgaatccgatccgggagcctgggattatggcgacatacatacaacgtttgcgggtttcgactggaacagcaacggctggacgggtgacgccctgaaacttacaggaggcgcgaagattgaaatcgggtaccagccgttctccacagatgcaaccactaccggggctacctatgaaatggaaattctttgttcgtcggtaacggaccggcagggggtaatactggactgtatggccggcgatatcggtttccaaatgacaacggagcaggcccttatgcgtgtttctggcggtacggaagtaagtacaaagtttgcaagtgatatgaacctgaaaatagcctttattgtcgggtccaaggctggcaaacggttgctggaactttatgtaaacggaatccgttgcggggctgtacagtatggggctaccgaaggactactgcaggcggaaccggtgaacatccgtttattcagtgatacggcggatgtggagatcaggaatttccgtatttataaccgtgcgcttacggatgatgaagaactgaacaattacatggtagaccggactacgtcggacgaaatggtcctgttatttgaaaagaacgatgttacgggggacaacggtacggatatagacatagacaagctacgcgcccaaggaaaggcggttatgcgaattgtcggcgatgtgaaccttgtcaacgccaccaataacaagaaattcgaggtcccggtcgatatctatttttatagcccgtacggtaaggagtatgactttgtagcaaggaatgtcggtctaagaatacaaggtacatcatccaccacttatccgcgtaagaattaccgtctttatttcttgcgcttggagaaatacggtaccacgctggaagttaacggcgtggatgtgccgtctcttgaatacagtttcaaaccgggagcacggccgatcagtatattctgtttgaaagcggacttttccgattcttccggtacacataataccggtgcggtgcgtattgtgaatgacatttggaagaagtgcgggtggttgacgccgccgcaggctgcatataagggggaatatgacgtacgtataggtgtagacggtttccctatggacctgttttatgataacgacggcaccggtacgaatacttatctgggaaaatacaatttcaataatgagaagtcggaaagtgcgatcatttacggttttgaaggaattgaaggattcaacgacgaagcgtccctgaacgggcagcgtaacaaatgtatctgtctggagttcctgaataactccgaggccctttgtttgttcgggactaccgacatgtcttcttttgatgatgcgctggaatttcgtttcaaagcagatactacctgggcggatgcacacgaggatgacaaggcggcagttataagactttggaactgggtagattcatgtaaaggtaatcccgccaagttcctggcggaatataaccagtatttcggtaatgacagcccgtttgcatggtatctgattaccgattactttatggccgtggataaccgggcaaaaaatatgatgctggcgacctgggacggcctgatctggtatttccttccttacgatatggacacgttgttcggtgtgcgtaatgattcggtactgaaatacgaatataccattacccacgcaagttttgacgatagtatcggtagttatgcttttgccggccatgattccgttttatgggaactggtacgatcttgtccggacaaattgcgtgaagtggcggaaaccttgcgtagtaatatgagccttgaatatgtcctgcaagtatttaacgaggagcaaatgggtaactggtgcgagcggatttataacaaggattcggagtataaatatatccttccgcttaccgaaggggtgacaaccagcagcggaaccagttattataattatctgtatgccttgcagggcagccgttacgcgcaccgtacttataccattcagaaccgtttcgcccttctggatagtcagtacgtggccggtacttatcgtcgtgacagcttcgcggcttatttcgggtataagttcggaaacgataaccggaaagttcggattacagcctccgaacggtattattacgggtacgggtacacgtccggaacaccgcaccaaagcgcggtacttgcagaaacggccgatagtgtggtggaactgacaatggacacggatttgattgtaaacgatccgcaatatttctacggtgcaagccgtattcgcgggcttgatctgacggatgtaagccacgccattgtcggcacattgaacctgaataactgtacggccttgcgtgatctgaatattagttgtgaggccggacaaacgacacttaacgcccttctggtgggtaattgccgtaatcttcgaaaactcgacatatccgggcttaaatcctcttcctttaccggtatggacctttcaagcaatgctaaacttgagaccttcctggccggtgatacatcccttaccggtgtgacattcgccggcggtgcgcctctggccgtttgcgtccttcccgcaactttgcagacgctggaactccggtacctgaacaaactaaccaatgctgggctgcagctggaaggcacggcaaatatcacgcgccttgtgattgataactgtagcctgatcgactggaacacgttgttacagcaatgcagcgcgaccagctatctacgaattaccggtatagatatagacgggaacggtaatttgcttcgcaggcttatgacaatgggcggcgttgatgaagacgggggaaacgtgcagacgtgccgcctggtaggtacgtaccggctcacccagtccatgtcggatgaagagtacgccgccacctgtgcacatttcccggaactgaatatcattcagccgcagtttgtcggtataaaaatagatcagacggtaggagacggggaaaagattacgaatctggataactcaaccggatatgactataatacggaatttaccccgtcttcccatatcctggaagtgttggcgaaaaggccttgcgttctggccaaaaagacggcggagggtgaaatgacctgttatccgcttcatgatgagaaccggaacaaatacgccgatagtgagaatgtggagaacgccacggatgcagtattaaccggatcggaaggcgaagtttacgtatatgaacctcattactggtacaagggagtaacggacgtgctgaatcaatgtctttacggttttatttcaagtaatgaggatgcgccggcagcggcagggtacaccagtgtaaaatttacccgtgaagagctggacgtaacggaagggatcgggattcgtaagaatacggattacacgaccattgaagaggcaaagaacgaatacgaatccggatcgttcgccctggtggatgttcgggattacaagcaggttcgttttcccggtctggcttccactctttacggggctgtatttatagatgatacgggcaaaatagtaagtcgggtcagcgtttcaaacgcgaacggttttatcaatggtatgtacttgttttgtgccgttcctgtaggggcaacgaaactggcctttaccttccttaattcggcgacattcgatttcgttttactcacaacgtcggaaagtgtagaagcgatcgagccggactgggtagagcatacggaatgcctgggcggtgcttatgaagcctacttgattgatgatgtgttgcgttctgtcagtggtgtttcaagtgtaggaaccatttcacaagcccaggcaatcaaatacgcccagaaccggggcaaaggtttccagctgtttgactgggaaatgcacaaggacgtgggtaatctgcatttctttaaatacggtaataccgattcgcagggagtttgcggatatggaacaaacaattaccagaaagtgacgggccttacaaatgcgttgggaatacgtgatacggtttcttattataaagaaaagggcggttccaatccacaggcggaaggtgcttaccgggacggtgtaaattatcagtccgtcaatgtactgggatatgaaaatttccagggaaacaaggcggaatggttgcagtatgtcacggtaaacaagacagcagcggacggaaggtggtttattaccatgccggacggaacggaacgcgttgtacagggaattactgtttataatgcggatatttatcctacccacatggtttggggccggtatatggatttgattgcagccaaagaaggcggttccacttcttcacattggttcgacaggttctatgtaggtaccgggctttctcgtgtggtgtttcggtcgagcttcagcgcgtacgcgttgggcggtgtttcgtatgcgtacgcgaatatcgattcatcgggcgcgaatgcgtacatcggcgttcggcttgccttcaggggcataatacgctgggcgggtagcgtcgcggcctttaaagccataaatcaggctgattaaaataaaaaaatagcaacgtaaaacgttgtgtgggtagcgcgggcgtccggaagtaagacgggtgccggtgcttcctgaaagtacaaaggcggatttcctcatatacactcgtgtggtgtatcggtcgaacaacaacgcgaacgcgttaggcggtgtttcgtatgcgaacgcgaataacgattcatcgaacacgaatgcgaacatcggcgttcggcttgcaaacaattagaataaagaaaaagcgcataagccttaaagattggcgtacaacagtggggacgtgtccccgacgtggagccaagaggaatgagcctcgccaacagcagccgtttacggctggaaaggggaaaaacaaagcgcagggcaatggggtttggtaggaacttttttcgaagaagcccggcccggggaattgaaggctaatttaattatcatgtggagagaagataatattatagaagagattgtcaaggactccaatatagaggacgctataaaaacggtattgcgcaaaagaagacgaaagcgcagctttgccgggcgtagaatactggcggatgttccgaaggcggtagagaggatcaggcagcggatcaggagtgggcggttcaagctcggaggatatcgggaaatgaccgtagacgacgggccgaaggtaaggatcgtacaatcggtttccctggaagacaggatcgttcttaacgctgttatgaatgtggtggaccggcatttgaaagtacgttttatccggactacttccgcatccattaaaaacaggggtacgcatgaccttttacagtatatcgttaaagatataaaagctgatcccgaaggaaccctgttcgggtaccagttcgatataacgaaattctatgagagcgtagaccaggacgttttgctggatgcagtgaaaaagatgttcaaggataaaatattgatcggaatcctggaaaagtgcatccgcatgatgcctaaaggcgtgagtatcggactaagatcatcgcaggggctttgtaatttgcttctgtctatttatctggatcaccggttaaaagatcaggaggcagtagcacactattaccggtattgtgacgacggtctggtgctttctggtagcaagaaatacctttggaaggttagggatatcattcatgaacaggcccgtaaagcccgcctggagattaaaagtaatgataccgttttcccgattaccgaaggtatcgactttctaggatatgtaacccgcccggatcatgtgcggttaaggaagcgtaacaaacaaaagttcgcccgcaagatgcacaaggttaaaagcaagaaacgtaggcaggagttaaccgcttcattttacgggcttacaaaacatgccgattgcaagaacttattttataaactaacaggaaagaaaatgaaaaaattaaaagatttgggctacaagtacaagcctaaagacggacggaaacgatttaccggggcaaggatcaagtcgcccgaactgatgaacaaggatgtgatcgtacttgattatgaaaaggatgttccgacgaaaaacggaaaccggactgttataaagctggaactcgacggcaaggagagaaagtattttaccagccttgaggaaacccttttcatttgtgaatcagcggcaagagacggagaactgccttttgaagcacattgcgaaggtgaagtaagtgaaaaaggattgataattatacattttacttgaaatgatacgaatttatgcagacagcaaggcggaaccggtaagatgtaccaaccgccgccggggaatctggcgtattacgtgggattaccaggaaacagagacagcagaaggagtccaacgtagttacatggaagagacgttcgatcatctacccgcactggcagaaatcaaggcggttattaatgaatggtataaccggaagataaccgacacgatcgaaagcgggtacgtatggaacggtctgaaagtctggctttccatggagaaccagatgaattataagacggcgtacgatcttgccttgcagacaggcggggaaaaccttcctgttactttcaagctcggggaagaagacaacccgacgttttacgagtttgcaagcatgcagcaactacaagagttttacaccggtgccgtgaaacatatacaggagacacaaaaggaaggctgggaacttaaaaaggcgatagactggagtgtgtatacgttggagtagaaaaagtgaaagggggaagcgggaaatacggtttccccttcactcttttagttataacatatcatcaaaggcgtgtattcccgcttcgcgttcatcttccagagcatgtgcgtaaaccattgtcatagttatagaactatgtcccaaaaggtgggatagcgttacgatatcatgtgttttcttataatacaaggtagcgaatgtatgccgcccggtttttgaactgatatcctttgttattcctactttaccggctattgttttcaatacccggtttatatcctgatccgtgggaaggttcataaacaagttaccttttgtacgtccggcccggtaatattcataaatataacgtgccgggtccgataagggtacagttaccggtagtttggtcttacctcgtgtgtagtgtagttcattccctatgaactggtttatctgcaatgcttttgcatcgcctatatgcaaagaagtaaaacaaagaaacagaaaaaaacggagtacgttctgggtacattcttccaagcggccggaccggtacaaggcggtcagacggaggagttcttcttccgtcaggtatataacttcacttttggggcgacgtatctttatggccgcgaacgggtcctggtccatataaccgccgcgtatggcggcacctacatatattttgatagtagccatgttacgccatgccgtagaatccatgttacctattttgcgaagatatgcaaagaaagacaggagaaattcatgggtaatctctgaaaatacaaggccgggggcgaatgtttccagtttcttgatgatagaaacatgatgtttccaggtaccgaaagaaattgttttgctaatttgtttgaggtaaacccgtgcaaaatcaaagaaggtaccaaaatcggaaggattgttatactggcggaagaaactttcttttgtcagcgtctcatttttaagacgggcacggacaaatatatcgcttactcgtgaacggatattggagatgattaaatttttatccttactttctttgtcccggccttttatcacttcgttttgctcgtcccattctttggaggtgacacttaaccttaccgcgatccttattttctcacggttgatataaaattccacatacagggggagccggtcggttttgccttttttgccttgtcttacaactcttattgccgtcatttttatatgcctattttatgcctgtagaggggatatgcctacaaatatgcctacacaggcaggttattaaaagttaaacggggcgaaagtaaaacgtttaatatcagctatttaaaagaaaaatccgataacatttaactgttaccggatgttaatagtgattccgaagcgattcgaacgcttgacccacgccttagaagggcgttgctctatccagctgagctacggaaccagccttattttcggatgcaaaggtagtgctttttatgaaaactcaaaaactttctggaacttttttattcatatttttctttggtgctatgaatcagtattttatgaaagaagtttttttatttaattaggtggggactgaattcgtgttttatagataaacaaatgaatagcatttttttcgggaagttaataaaaggagatatttggaagaactcttgtgacagtatatttgattttattccctgttgtccctcatagaacattaaatatccctctatacattttcttgttgtatactatatttatttgataaaagtagttacccaaacagtttgtgtatcacccctttgacggccgagaaaggcgtaaaagggtgattccttttacgctgtatttgagaataaaagcccgtttttacgaagaataacgaacgttatataggtttcaaaaagctcaaaaaaacaaaaatagggttgtgtctttctattattccttatacttttggacgataaacaactaaaaaacacataaagttatgaagaaattgatttttttatttgcatttagtattgcagtaactaacatttttgcacaaacggatcctaatcaaattaagaaagaaggaaatgacgcattcaatgctaagaattatcctgtggcctacgctaagttcagcgaatatttgaaacaaactaataatcaggattctgcaacagcatactattgcggtatagcagcagatgaagtgaagaagtatgcggaagccgtaactttctttgatattgctattcagaagaagtttaatactggtaatgcgtatgcccgtaaagctttggctttggatgcattgaagaaaacagatgaatacgttgctacattggaagaaggcttgaaagttgatccaaataataaaactatgatcaagaattatggtttacactacttgaaagccggactcgccgcccaaaaagctggtaaagctgaagaagcagaagaatgtttcaagaaggtaattcctctggatcataaatcatataaaacaaatgctttgtacagccttggagtattgtgttataatgacggagccaatatcctgaaaaaagcaactcctttagcaaactctgatgcagataaatatgctgctgaaaaagaaaaagcaacagctagatttaaagaagcattaggttacttggaagaagcagcaaaggtatctcctgacaacgcaaatgtgaaaaagatgattcctcaggtacaggatgcaatgaagtaatttgaccgatctcgtatagataataagggttgcccgatagacacggtggcaaccctttttttgttgcacctttttctaatctatactttttgcgtacatttgcttcacttaaaaatagaacaaatccatgcagttatatacaaaagaacaggctatcagacaaatgaactatttagggcaatcctgtcgtccttttatttttatcattaattaccagcaggatgcttcttatatagaagctgtatcttcggtagaccctgccgaaatactctataacttgaatggttttacgaatcagcccatgtttgcagagaataatatagcttttttgtcaagaaagcgacttcgttggcaatctttcccggaatctttggctacatatcaacattcgtttgatattgtccaacgaaacatctttgccggaaatagttttctcactaacttgacttgtcgcactccggtagaaacaaatctgactttgaaagatatctattgttattcaaaagctatgtataaattatgggtcagagatgcttttacggttttttctcccgaaatatttataagaattcataatggaagaatatattcctaccccatgaagggaacgattaatgcttcaaccccttcggctgaccggctattaatcaacgatcctaaagaaacggcggaacatgccactattgtagatttgattcgtaatgatttgagtatggtggccgaacaagtatccgtatcccgataccggtatattgataaattgcagaccaatcaagggagtattcttcagacaagttctgaaatacagggtgtactgccggatgattatctgacaaatttgggaagtattatattccggcttttaccagccggttctatcacaggagctccgaagaaaaaaacaatgcagattatcaaggaggctgaaacctatgacaggggattctatacaggtattatgggctattttgacggtaaggacctcgatagcgcagttatgatccgttttgtggagcaggagggtggtaaaatgtattttaagagtgggggtgggattaccagccaaagtgatgtggaaaatgaatataatgaaatgaaacagaaagtatatgtgcccatttattgaaacgatccgaatagaagatggaaagatttataatatcaattatcatacggaacgttgcaaccggactcgtgccgccttctggcaagatgttgccgatattgacttaggtgaatttatttctccccaatcattggaaggtatctggaaatgccggattgtttacggaaaggcgatagaagaaattacatacgttccttatcagaggcgcaaagtttcctctttacgtctggttacgtcggatactattgattatacttataaaagtacgaatcgggaagaactaaattcattgtacgcccagagagaaacggctgatgatatattagtggtaagaaacggatacctgacggatacatctatttccaatatagctctttatgacggcaatacatggtttactccgtcgtacccgctactcaagggaaccaagcgggctgaacttctggacaagcatttgattcaagaaaaggagatattgcatacacagttgggaagctatttccgtattatgttattcaatgcgatgattgattggggacaaatcgtgataccgattgatgaaaaacatttaattctataaactattattaacagaaatatttagagaacctttgaacaaaggtgttctttcgtctgttatatttatgtgtttttcatagtattagatataagattaattaaaagagattgtactccacttgtgaaagctaaagtacgtcagagacagaagagtctgtttttttgataaatgtgttagagcatcggttttaccaggccgatgctttttttatgtccttttgttgcgttttgtagtttatatgaaataaaatttgtacgtttgtagggtaataatagaaaatgataaagatgaacatacccgttatctttcagtttttaaaagatctttctgcgaataataatcgtgactggttcaatgaacacagggcggagtatgaaacagcccgtgtcgagtttgaaaatttcttagcaacagttattgcccgtatctccttgttcgacgaatcaattcgaggcatccaacctaaagattgtacgtatcgtatttatcgtgatacacgcttttctacggataaaactccgtataaaatacattttggcggttatatcaatgcaaaaggaaaaaaatccgatcattgtggctattatgtgcatctgcaacctgatggatctatgcttgccggagggagcttatgcctgccgtctaacgtactaaaagctgtgcggcagtcaatttatgacaatattgaggaatttgttgcgatcgtagaagatccggagtttaagaaatactttccggtgataggggaagacttcctgaaaactgctcctaagggctttccaaaagattttaaatacattgattatttgaagtgtaaagaatatgtctgttcttataatgtccccgatgacttcttcgcccaaccggatatgttggaacagatagataaagtattccgccaattcaagcgatttgccgactttatcaattacacaattgacgattttgaataatacctagaatataaacttttaaattaaactcttatggtagtagatactttagaaaatctggagaaatatgcgtctttaaatcctttgtttgcacaagctattgagttcctgaaatctcatgatcttcaagccatggaaatcggtaagactgaactgaaaggaaaagatctgctggtgaatattgcacagaccaaacctaagactaaagaagaggctaaactggaaacacataacgaatttattgatattcaaattccattgtcgggaacagaaatcatggggtatactgctgctaaagactgtgtcccgacaaatgctccatacaatgtagaaaaagatatcactttctttgaaggattagctgaaacttatattgccgtgaaaccgggaatgtttgctatcttcttcccgcaagacggacacgctcctggtattaccccggacggagtgaaaaaagtaattgtaaaagtaaaagcataatcctaatttaattcagatatggaaaagacactgaatcttatcaaaaacgatccttggctggaaccttttgccgacgctattgccggccggcatcaatttgtgctggataaagaagccgaactgactaataaaggaaaacagacgctgtcggatttcgcttcgggctatctttattttggattgcaccgtactgccaaaggctggactttccgtgaatgggctcctaatgccagtcatatttacatagtaggtacattcaacaactgggaagaaaaggctacctataaactgaaaaaactgaagaatgggatttgggaaatcaatcttccagaaggggccattcatcacggtgacctgtataaactgaatgtatattgggacggtggacagggagaacgtattcctgcttgggctacccgtgttgttcaggatgaacagacgaaaatttttagtgcacaggtatgggcccctgagaaaccttataaattcaagaaaaagacttttaaacctaacacaagtcctctattgatttatgaatgtcacatcggaatggcgcaacaggaagagaaagtaggttcatataatgaattccgtgaaaaggtgcttccccgcattgccaaagaagggtataattgtattcagataatggctattcaggaacatccttattatggaagtttcggttaccacgtatccagtttctttgccgcttcttcccgtttcggtactcctgatgagttgaaggagttgatcgatactgctcatggaatgggtatcgctgttattatggatattgttcattcccatgcagtgaagaatgaggtagaaggattgggtaattttgccggtgatccgaaccagtatttctatccgggagggcgtcgtgaacatccggcgtgggattctctttgttttgactatggcaagaatgaagtcgttcacttcttgttgtctaactgtaaatactggctggaagaatataaattcgatggattccgttttgacggtgtaacgtctatgctgtattatagtcacggattgggtgaagcgttctgtaattacggagattacttcaacggacatcaggatgataatgctatctgttatctgaccttggctaatgaagtgattcatcaagtgaatccaaaagcgataacgattgctgaggaggtgtccggtatgccgggattggctgcaaaagtagaagatggtggttacggattcgactaccgcatggctatgaatattccggattactggatcaagacaatcaaagaaaagatagatgaggactggaaaccttccagcatgttctgggaagtcactaaccgtcgccaggatgaaaaaactatttcttatgcagaaagccatgaccaagcattggtaggagataagacgattgttttccgtctgattgatgcggatatgtattggcacatgcagaagggagatgaaaattatatagtcaatcgtggtattgctttgcataagatgattcgcctgttgacctcttccacaattaacggtggttatctgaactttatgggtaatgagttcgggcatcccgaatggattgacttcccgcgtgagggtaacggttggtcttgcaaatatgcccgtcgccaatgggatctggtcgacaataagaatctagcctatcactatatgggtgacttcgatgaagaaatgttgaaagtcattaagagtgtgaaggatttccaggcaaccccgatacaagaaatatggcataatgacggcgaccaggtattggcttatgagcgtaaggatttgatttttgtatttaacttcaatccgaagcagtcgtttacagactatggtttccttgtagctccgggagcttatgaggtgattctgaatacggataatatagcattcggtggtaatggctttgccgatgattctgtggttcacttcacgattgccgatcctttgtataagaaagaaaagaaagaatggttgaaactttatattcctgcacgtactgccgtagtgttgagaaagaagaagtagatatctctttatattaataaagaagcccttgcaaattttctatacttggatttgcaagggctttctttataagaatgtgcccggaccgagaatgtcgtacatataactgacattgcgtgtttttagcaatatccctttaggagtatagaacaactgatatttaatgtcaacattatcttgtcctacctcaataacaatgattgcctgccatttaggaaattctaccatagtcacatcttccgcaacccaacttgcataagaactaaatgtaaaagcattatagaccacaggtgtcagccgatcgagactgacaagatcagtctgcgtcatttcccattgtccctgcgcattgaaccatacatttttggtgaaaccgttcattacaaagttggcacaatagtatccgtcatcttgcgaccaggctatatcatttgttttgggatacattttcttgaaggtagcctgcacattatcaggaggtacaatcgctaatactgatatggaaaatagtaacagaaccgccataatattaaatttcttcataagctttatggtttaggagattatttatctacctaaacagctatcatgactatttgtttgaatgatacatataaaataacccggtcattatagtgtgatcgggttataggggaatatagggtttcttgtctttttcagaatgcaattttcagtatctttccattgtagcctctaactgaaacttccgtggctttatatggcaataagctgatttcttctttcgcaccggtcaaaagatcaacagcctgataggattccatttgtggaatttgtaaaaagtcgaaagcgtgtgagggaacattgattgctacatctactagttgactgtcgaaattgacaatgataaacaataactcgttcttgtattttcgcataaaagtatattgcttatgttcattgaaacgccagccattttgattagcatacatcaggtcaaagaaaacaccctttgcaatagccggttcttcattacacaaagtcagcactctttgataaatttcatataaacgtttatgatcttcattgagcattttaccatcaaattttcctccgttacgccaacgacggacgctgtctatactccaataatcaaatatagtagtccgtccatcccttccgctaaagccctcactgtccattccgggttctccaaattcctgtccgaagtaaatcatcataggattagtattcatgcaggcggaaacaataagtgcagggattcctttgcgtgggtcaccggcaaagaaatcggacgcaatgcgttgctcatcgtggttttcgaggaaattaagcatctttttctcaattccgttcagactctgccagcaatgagtgatagaagcagccgactcatatccacaggctacattacgaagtgtatcatataagcctactttatcgtacagatagtcgaattttccacggaacaaataattgcgatattcattcggattgtagacttctgcaataaagagaatgtccggatatgcttctttgacttgaggaatagcccattcccaaaattctacgggaaccatttccgccatatcacaacggaaaccgtcaatgtctttggaagcccagaacagaagaatatccaacatctttatccatgtatccggaatcggagaaaagtggcacgtacctccattctggtagtctactccataattcaatttgattgtctcgtaccagtcagtgatattgggagtagcgtcaaaacgattattgcctgttgctttagccgggaattcgtgataaggttctgtcgcaccgtctttcatgtcaaactgggcacgaagttccgcttgaggaatataatagaaattattatagggactgaaagactggcttgaatcatcgttagctcccaattccgttgtcccgtccggttgtgcatcagaatggtattggcgtgctacatggttgggaacaaaatcaattataacttttagtcccgcacgatgtgtacgtcgtacaagattctcgaattctctcattcgttcgggaatgtcattcgccaagtcagggtctacatcataataatctttgatagcatagggcgaaccggcttttccttttacaatggcaggatgatccggactgatattatagcgacgataatctgtctgagtagcatgctcgataatacctgtgtaccaaatatgtgtagtacccagttttttgatttcactaagtgctttgagagtaaaatccgccatttttccgcaaccgttggtgactatatctccattgtagacgcagtggttattattgttgccgaacagccgggtgaacacttgatagataattattttattttcgttattcatatagagtagatttttacatttctaatattaactacttcaataagaagcattacttccatatctttcctttttcaactaataattgattcagcactccgttagcggtattatatccttgctcgaagatttcttccgctttttccaattccgtgttgctatacccatataggttataaggttcaatcagcaaatcacatttttctctttcagggaaagtattggcacggaacatgaagtgaaacgaacgcatagcgatgctgacaatattcattttataatcttgcgccatgatcgggcttacattaactgctactaccttgtcacagactctacggagagtggaaaccgggagattcatcatcaatccaccgtctacgtagttcgttccatcaatatttaccggagcaaacatgacaggcatacagcacgaagcagctacccgttcggcaatggaaccacggtgaaaatgaaccatacgtccgtggtcaagatcggttgccgtgatgatcaagggaatctggagttcttccagattctttgcttttacattggtacgaaggaaatctataaattcgcaaaggtcaaataatcctttcttggggattaccagcttggtcaggtcttgaaatttgtgtccggaaaaataatccagcactttgtgaggttcattaccatctgcataaaagactcccgcgagagctccagcgcttactccggagataatatccggtttaatatcatgctccaggagagcttgcattacgcccaaatgagcgaatcctttaataaatcctccacttagagcataacctatctgatatttccggttcgtccaattgtttgtatatacctccatgagttttttctgtctttaattcgccacgaatttagtgaatttattgaaagtagaagaaatataatggatagtttttagtatgccggatggaaactttgttccggtactacgccgatcagaacccaaaatcgtctatttcacccttgtgctcttcgctttctttaaatggttttgcttccttttgtaccggattcccttcaatatagatagcacggaacggacgagcagggcaaacatattcgcatccaccacagcctacgcaaatctctttatttacatggggaatcgtcaacccgtctttataaggcaccattgcgacagcctgcgtgggacagtgttcagagcaggccccacaactagttccgtctgtataaacgatgcaattttcctcgataaaaacaacatatcccatttgtgtaagatgtttttgctttacacttatcggaagaatagccccgttaggacaaacatctccgcaaacagtacaatcaaaattgcagaatcctttctcgaaactgacggtaggttgcattactcctgccaagccatactccatgaaagctggcttcaatacatgcgatgggcatttgctgatacaaagatggcacgatgtacattgctgctgaaaatgttcacggctgacagaccccggcggagtaatcggattctcttttttgtatacttttttacctcccagacttgcaacggattctttaacttgtgaaagtagtttcggaactgctccggcagtaagtagtcctgcaacgagaaaacgacgtttggatgaatcggtaggggagagtgaaggttggtagatcaatgccttttgtttgcagacccccaggcagtcaaagcaatctacacaacgaccataatcaacagtatgctctttactattgatgcacgctgccttacatttggtagcgcagagtccgcaactgttacacttgtcggagtcaatgcggactttgaataatgagaaccggcttaataagcctaaaattgttcctacaggacaaatcgtgttgcaccaagtccgtccgtgcttccatgccattataaaaatcattgtaagtatgacgactgcaatgaaaagagatgaaatacttaaaatagaagtatccacctggtaaaacgtataattgtcgaacttggagaaagcggattccaaaagattattttccagcatatatatcggtttaaatacatgtactactatccgaccgtatgcgctgtatggatcaagcagtcctacgataaacgtgaatccgcatagaaaagagatgacagtccccccaagcacactccaacgtaatctattttttgcaggactataactatatctttttttctttttacttgttgattttgacaggcgcgcaatgatatcttgcaaaatccccataggacatatcgtcgaacaatagatacggccgaataaaagtgttaacacaatgagaaataataagatacctacacttaatgaaagcaaggctggaacaaattgcaagtgtgccagacgatgaaaactgttaggtaatatttctgcgaaatcgagaaaaaagaaagtaatcagtacaaaaaaaagtgctgatattccaatacgtatctttcttaacatggttgatttacatcttgattcgcttgacatttaatttgtcaagattcatggttcctactttcagtgcttctcctttggcaagatgtcctactgtatccaacggcatctcacgcacttggttgaagaatttggcagcggctgtgtccaccgctacaatatccggtgagataaacaatccctttgccaaaacgacatctgaagcagagcgtccgcgaggaccgttagtcttcataatccggtaggcatctacaacgttcagcgcggctttcttttgcagggtacaaatatcggcaatacattgttgcaagtcgttttggtgaaagaatccgcgatcccatacaattcccatatggtttttcatggaaatagtcagattggctccgccatggtttttcaggatagggacatttatccatacgtcgcagttcaggattgcttcatgcacttttgctttcttcatttttttgccgcttgggagatctaccggtttgtagtaagattccagatgtgcgggcattacttttgctccggcggcttttgctacagcttcaatgccactgtttttgtagcatttctgccagtcgtcacaggtatggtcaaatacggtcacttcttttgctccggcggcaaagcattgtttcacgatttccgccactaacttcggatttgtatttcctgccagttccggcaccttgtcccaaccgatgttaggcttcacaacaaccttttgtcctggtttaacgaattgcttcatcccacccagttcgcttatggcgcggcggaacatggcttccggctctccacccatgactgctaccagatcagggttagctccgtttgctttattgatagtctgagttaatacctccatagcttccgagtgctgtatagtcaaagcagcaccggttatggctactgtttttaaaaagtcccttctgtccatttttctattttgagtttagaattttgcaatcgcttttaacagggcatagccaccaaaccactggatcaacattcccggagtaccgatacggaaatcttgtactgctacatagaaattaccaagaatcgcccattcaaaagctattcctataatctggtagaaaagcacgacaccaagaacgcccaataaagagacagattttagcattcgtgcggcaaaggcagaagctccagcaagtaaagtggattttatcaacataacaggaagcgtagcttccgaaggcatggcgaacagcaagtgattaatgacaggagaaagaatcgcggtcaataatcctacacgaaagccatatttatagcctgcaatcaacgtgaaaaaataaatgggcagcagggtaggaccaccataaggtatgagatggcatagttgtggaagtgcaatgttgcctgcaataaacaacagagcggacaagtaagtttttacattactgtaattcagcgagtagagcttggcagatgtttccattttcgttaagaacttttatatttaatagaacaataatatcttgaggataagactgttctttgcaggaaaggtttaatccggtaaagaacaatctgcttattatattaaaaacaggatggaaaagtttcatacctatttgaaactatttgacctgttttttgctctattcactatccattctttcccggatctttccccaagcatgagtatcgaataagcaactttggcgcattgtgccacacatttccctgaatctggacataggtatagtatagctcaatttatcgggttcgaagtagggacgtaccgacggatcgaagaaaccgatgaatgtccgtttgccgccttttcgattttctatggtagcttgcgttactatgcagctacaaccggaaccgaacatggaaactacaccgtcttcagcattattatcataataagcccatgtggtaagtccggaaagcatatcggggttggctatgaatacgacaccttccacttctttcagactttctatcctgtctatacgcgcaaaatgaaggtatttcttttctgctttgagtactccgatttgctgtataaagtcgatgaccatttgcggagtctgtttgtaccgctcttttaatgagacaaaagtcgggacgtgttcgggcatttcggtaaaaccggtatagaacttgccgccaccacagccgattgtttcggcattcaggctgatgataccgccttctcttgccgttttcatacctttaaagaaacagccatttattttttccgccgttccttcctgcgtgtccgaataccagaatacaagaggcagttcggccttctctccgaatgcctcccggaagttttgaataaatgtttggatgtccatagcttatcattttttgtttatacatagttgctctacaaagttagaataaaaaaggataagtgcaagtgaatcagaagttaatatcggacacactttttttacaatcttccagttgttttaatccttcttcagatagtttggggtaatgcaggtccagttgtttcatccgctcgcagataatgtgtcctactgcgtagcgcataaaccatttattgtcggcagggattacgtaccacggagccagttcggtagatgtttcggttagtacatctgcataagctttcatatactcatcccaaaactggcgttccttaacatctgcggaagaaaatttccagtttttggttttgtcatccaacctttccatgaaacgctttttctgttcggcttttgatacgttcaggaagaatttcaggacaacggttccgttttccgtcagataacgttcgaaatcattgatttgccggtaacggcgtttccaaaaatcagagtcaatgtctttgatggtttctacacccggcaatttgttggacagtataatttcgggatgcactttggcgataagcacgtcttcatagtgagaacggttgaaaattccgattctccctctttcgggcaggcaacgattgatacgccagagataatcgtggtccaattcctcggcagaaggttgcttgaacgaaaatacttggcatccttgcggattgataccggacatgacgtgtttgattgtcccgtcttttccggctgcgtccatagcctgaaaaataataagaatcgaatagcgattctgggcgtagagcatgctttgcagttcggaaagtttctctacgtttttagtcagttgacctttagcatcctgtttggatagttcgccgataaatgacggatcgaaatcggagacggaatattgtcttccgggtttagcaagcaggtcttttaaaatgtcctttttcatgggtttgttatttgaatgtttctactgaaaataaaacaggcggagcaatcaattagtttttcaggcaaaggacattttccggatttacagtgctgttcctttcttcggtacgaacaggtttgtcatatccacctgttcaagagtgagcaactctatctttttagaaataccgcctgcatatcctgtcaggctaccgttacaacttacaacccggtggcagggtataataatactaataggattgtgtcccaccgcattgcccaccgcttgcgtcgacatggacggtagtccgtttaggcgagctatttccttagcaatatccttgtacgtaatgattttgccgtaagggattttttttaatatttcccatacggagagacggaaaggagtactttccaagtgtgtctcaggcatgaaaccgggatttttcccactgaaataacaatcgagccattctatggtttgctcgaatacgggcaatactttttcttcgtgttccggagacaacgaagctgcaaaatatttctgtccatcaaaccacaaacctgtcaaagagctaccgtcacttgcgattgttattccaccgataggggactgatatttgtaaatgtattgcataacattatatataaggtgatatcttttacaaaagtagtatttcatttttaaataagatcttttacacccctgttttgaagaataattgcttatatttatctgatagatgaggtatttaccaatatataagattattttgcgcagccctgcaattacggggacaagagaaagtcgaaccagtctgtagcctatgccgtagtcaatatggaaataggcaaccgtgacttacaataatgacaccggaatatttttttatcaaaaagagatttaaagcgtttttaataacgacatagagatagttttttactctctttaaagtcgtttttccaacttttccttatctttggcgtttaacaaaccgtttttaatcatacaacaacgaaaaacaatcgatcatgaatcaagagttatcaatgaatgccaataaattagtggcatttctccagaagccgacttctgaatttaccaaagccgacatcatttcatttatccaacaaaacgacatccgtatggtcaacttcatgtatcctgcgggagatggtcgtctgaaaactttgaattttgtcattaacaatcaagcttatctggaagctatccttacctgtggagaacgggtggacggttccagccttttctcttttatcgaagcgggaagtagtgatctttatgttattcctcggtttcgcacagcatttgttgatccgtttgctgagatacctacgctgtctatcctttgttctttcttcaataaggatggagaaccgttggaaagttcaccggaatatacgcttcataaagcgagcaaagcatttacggacgtgacgggaatggagtttcaggcaatgggagagttggaatattatgtgatagcaccggatacgggtatgtttgaggcaaccgatcaacgtggttatcatgaatcgggaccttatgccaaatttaatgagttccgtacacaatgtatgtcttatatctcacaaactggcgggcaaattaagtacggacactctgaagtaggtaactttactttggaaggctatatctatgagcagaatgaaatagagtttttgccggttcctgtcgaacaggccgccgaccaattgatgattgccaaatgggtaattcgtaacttaggattcaaatatggatataatgttacgttcgctcctaagataacagcaggtaaagcgggttccggtctgcatgtccatatgcgtatcatgcaggacggaaagaatcagatgttaaaagacggaattttgtcggaaacagcccggaaggctattgctggaatgatggagcttgcgccttcaatcacagccttcggaaatacaaatcctacttcatacttccgtcttgttccgcaccaggaagcaccaacgaatgtttgctggggcgaccgcaaccgttctgtattggtacgtgtacctttgggatgggctgccaagaaggatatgtgtacattagcgaatccgttagaaacggaaagctattttgataccacccaaaagcagactgtggaaatgcgttcaccggacggttcggcagatttatatcaactgcttgccggactggctgtagcctgccgtcatggttttgaaatagaaaatgctttggaactggctgaaaagacgtatgtgaatgtaaatattcaccagaaagaaaacgaagataagctgaaagcattggctcaattaccggatagctgtgttgcgtccgccgattgtctggaacagcaacgggctattttcgaacaatacaatgtatttagttcggcaatgattgacggcatcatccgtaaacttcgcaattatgaggataagacactacgtgcggatctggacggaaaaccgcaggaaatgcttgatttggttcataaatatttccattgcggataatgtagtaactgataatatgagtaaaagcctgtcttctcaaagcaagataggcttttattttccccaattgcactcctcacttccacataattctacactaattccacaatcagatagaacccgccaactttttattcgtctgatttttaacgatatatgtaaaaagctgatatttggtatccgttttgcaatatgataagtatagcgataataaataatggtttttataattcacacttaaaaaattacgattatgaaaaaggtattagtagcagtagcattagtaatgggattaggtagttctgtagcatttgcacaggaagtaatcaacactacatctgtagaaatgcaggcgcaagttccacaggatgagtttactaagattgatgtaaaagagttaccggaagcagtggcacaggctgttgccaagaactatgaaggtgctacaatcaaagaagcttatgtagcggaaaaagagagcggtaaggtttataaagtaattcttactactaaagattcgcaggaagtaacagtcctgatgaatgaaaagggtgaagaagtgaaagaataaagcaaaacttcgaatgtagtataaataactcataaaaattctcggttcgtgatgaatcgggaattttttgtttatctcattttttagtaataaaccaattgatctacgttcatcgtcggatagttttattagtagttattattcgaatttcttacgtatgtgactaatcgtttccggagtaactcgaaggaaagaggctacttcttttagagtaataaaattctgaaaatcaggatagcgtttcactaaatctaaatacagttcggtgggagttttacaataaatgtctaatagacgcatataggtttgtacaaagagctcttctgcaagaatccgttctaagttttgtgtcatttcatttgtagagaagaaattcctcatatcttcggcagaagcatagtaaattcgagcatcacttgcagcctggatgcttaccatagctttctcttttttcaagcatgccggatagtcacctacatactctccggcaaaagaataaccgacaatatgctcgtatcctctgtcgtctgtacagatatatcgaaataacccttcttctatgtaagctccatgtgtagccaaagctccctgcagagtgaaatattcctttttcttcatttctttacattgcccatgtgtcaaaaagaagtctttaaatgcggagaattcctcgcgtccggcatagtgattaaaatttttcatgtttggttagattgttttcgtgccttaataggtgacgaatttatgaaaagagtgacattatgcctaattgcggatgattttaaaagattatttaaaccggacttccttattaggcagatattttttcattcctttagatatgctgtcttatcacaacagtttatttgtagatttctacagtactcgtactttaaaattcttttttgaggatatatccgaagaaaacgatcgattttgattacttgatagaagggaaagaggaatatgaacgttaagtattgacctaatttcataaaaaagatgttttatgaaaagaaaaagagaggaatgtagtgcaatatcgccaaataatgctttcctttgcaaccaacaacaataataaggtttattacgatttgattattttacgtgaatcttctcatttatttgagtatatccatttctaattaagattttccaataactttcttattgaattattaattttttatatttgtattttatgaatttgtacattggaaatcttagctataatgttaaggaatcagacttgagaaatgtaatggaagagtatggaacagttgcttcagtaaagttaatcacagaccgtgaaactagaagatcaaaaggattcgcatttgttgaaatgccggatgatgcagaagctaataatgttatcaaacagttgaatggcgcagaatacgtaggtcgttcaatggtagtgaaagaagctttgccgaagaactaaaactaaataatagtgatagaaaaagggcgtgtcaggaaactaacacgcccttctttctgttaatctctgttgttgttttcttcatcatccaccatgttattgagttccagttccaaatctaccagttcttgttcccgtaatttcagaatatctctcgttgtatcttttgctgcttttaataatgcaggaatgtccgacggctcctgtgcaacctgaataccggctgcctctaatgcttctatcttttctttagccgaaccggaagttccggagataatagctcctgcatgccccatttgttttcccaaaggagcagattgccctgcgatgaatgctacaacgggtttagttacatggttacgaatatattcggcagcctgttcttccgcatttccgccaatctcaccgattaaaacaatagcttcggtttcggtgtcattctggaacatttctaacagttcacggaaatgaagccctactacggggtcgccgccgataccaatagctgtggattgtcccatgccattagcggttaagtgatatacaatttcatacgtaagtgtaccgctacggctaatgacacccacgtttcctttctgaaaaacttgtcccgggaggataccgaccatactttttcccggagaaatcaatcccggacagttaggaccaaccagtattgcccccttttgtttaatgaattgatgcgctttgatgacatccagtgtagggataccttccgcgatacagacaattaaccggataccggcatctgccgcctccatgatagcatctgctgcaaaacgtgccggaacaaagataatagaagtgttagcctgcgtctgttccacagcttcatacatggtgttaaacactgggataccgtttgcatcagttccccctttaccgggagaagtacctcctacaacgttggttccatattccttcatcttcctggcatgaaagagcccgtcccgaccagtaattccttgtacaatcaaacgggtggatttatctattaatatactcataattgttttttactttttattgatattgttacgcattatgattttatagccattaacgctgcttcctgcatagttgttgctatctgaaaacggctatgatttcgtagaagatcgcggccgatattttcatttgttcctgttagccggacaatgataggtatttcactctttatctgctcgaatgactgaataagcccgattgccacatcgtcacaacgggtaatccctccgaaaatattgatcagaacaacttttactttttcatcttgtaatagaagcttcatggcttccactacttttatggggttggaactaccgccaatatcaagaaagttggcaggattacctccataaatcttaatcatatccattgttgccatagcgagtccggcaccgttcaccatgcaacctatattaccgtccatgcgaacataactgaaacctctttctttggcgtcggcttctaccttttcttcctctgtcgggtcgaataaagcatgtatttcaggatgccgacatagggcgttgtcatcgaaaacaattttggcatcaatagctattaacataccttttgttgttagcgctaacggattgatctcaaccagagaggcatcattctccatgaagattttataaagtgcttgcaggatgacagccattttacttgcttgttccgttttgggaaaaagtgaaaaggcgaaatgacgtgccaaataatctggaatgccaatgaaaggattgattgaataccgaataattttctccggtgtctgacaagccacttgttcaatatccataccaccggatgcactcatcattagaataacggaacgtgtatttcggtcgatagtgaaactgacataatattcggcggtaatatcaactgcttcgctaaccaatatctgattgacgggaaggcctttaatactcattccgagtatatttttagcttcctgataagcatcttccgtgttgtttaccagtttgacgcctccggcctttccccggcctccggtcaatacctgtgccttaatgacaactctatctgcacctacactccgatatgcagctacaacacctgcagcagtacggcataaagtgtgcctctcaacaggtattccatacttagagaaaatctctttcgcttgatattcatgtattttcatggctcacaaatttgagtaaatgattcctgctaataaaacagaagcaagatacggaaagtttacgaaaaagaaatctacctgaatgttttagagcatatcactctctttttggtatgaagattcggaataaaaaaagcgtgttggcaattctgccaacacgctgtaaactaataaatactgtatttattgattttatgcaatgccatgagcactaacagtaccgtcaattttcttaatcagaccttgcaatactgcacctggtccacattctgtgaagtcagtagcaccgtcggcaatcatatttttaacagattgagtccaacgtacagaagctgtcaactgagcaaccagattctttttgatttcaacagggtcagtatgaggaagtgcgtctacattttgatataccgggcatttaggagtatggatttctgttgcattgatagcagcttccaattctacttttgcaggatccattaacggagagtggaaagcaccaccaactttcaatgggagagctcgttttgctccggcagctttcattagttcgcaagccttctcgatgcctggtacggaaccggagataacgatttgtcccggacagttgtagttagccggtacacaaacttcaccttcagcatttacggtagtacagatttcttccaccttttcatccggcaatgcgatgatagcagccattgtagaaggagtcgcttcacaggctttctgcatagccattgcacgtgcataaacaagtttcagaccgtcttcaaagctcaaagctccggcagcaaccaatgcggaaaattcaccgagtgaatgtcctgctgtcatttccggtttgaaatcatcccccatacaaagagcggagattaccgagtgaaggaatacggcaggttgagtaaccttcgtttgacgaagatcctcgtccgtaccattaaacatgatatctgtaatgcgatatccaagaatatcatttgctttttcaaataattctttagctaaagctgaattttcatacaggtctttacccattcctacgaattgagcaccttgaccgggaaaaacgaatgctttcatatctttattatttaattgatttttaattgcgggtgcaaagttacggatttttatgatacgaccgcacaaaatgtacatatttgtgcaaccgaatccgggaaatgccataacggaccattgccatgtccgatgtgcaaatccttgcctgcaatgatagcctgagtgatatatgatttggcatgttggatagattcccgtaaaggatagccttttgccaggttggtcgcaatagcggaggagagggtacagcctgttccgtgcaaattgttactttctatctttttctcctcatatatatggaagatcgattctgacgtatgtaagaggtcgcacattctgtcaccctccaaatgccccccttttattaatacacttgtctgatactcatccaccaaccttttggccgcttcctgcatttcatgtatgttatgaatgcttttatctgtcagaacacttgcttcgtcaagattgggagtaattaaagtgacgagtgggagcagttctcttttaatttcttctatagtttcgtccgacattagttttcgtccgctggtagacaccatgaccggatcataaacaatatattccggtatatattttcgcaggcagtctacaatggtacgaacgatctgaatgtcactaaccatacctatcttgattgcaaccggttgcaaatcatccataacagcttctatctgcccacggacaatctcaggcagcactgattgtacagcgtgtacccctaatgtattttgtacggtaactgcggtgatgactgacgctgcatagcctcccaaagccgagattgttttgatatccgcctgaatacctgctcctcccgaacaatcggaaccagcaatggataaaatgactggatgacgttccattttggattttttaatagttacgatacaaagatagaataaaaaacgataaggtacaaaatgacatatcgtttaaagtacaataagtatccctatctgaatttattctatagattatgaaaagtactgaaaataaagcatcaatctggtttttgtactttatacaattactcttcctggaaaagactaaaatacatattgtaattcataagataacactaagtattgatattgtagaatatatgatatgtatttatgtgataaacaatgttttatagcatattaattatttttgtttaagcgaatattagcctctatatttgcgccatattaaaaaaacggatatgcagaatatacagaaaaatacacctttggccaacaatcatatatcagtagattgtgtagtgattggttttgacggcgaacaactgaaagtgttgcttgtgaaacgtgcaggtgaagataatggagaagtatatcacgatatgaaacttcccggaagtcttatttatatggatgaggatctggacgaggctgcacagcgcgtattatatgaattgacaggacttaaaaatgtaaacctgatgcagtttaaagcattcggttccaaaaacagaacgagtaatccgaaagatgttcgctggttggaacgggcaatgcagtcaagggtagagcgtattgtgactattgcatatttgtcaatggttaagatagatagaactttggataagaatctggacgagcatcaggcttgttggattgctctgaaagaagtaaagacattggcgttcgatcataatctgattattaaggaagcaatgacatacatccgtcagtttgtggaatttaacccttcaatgttgttcgaactactttcgcgtaagtttacagctgcgcaattgagaactctttttgaactagtatatgacaaagttgtagatgtgcgtaacttccataaaaaaatagcaatgatggaatatgtggttcctttggaagaaaagcaacaaggagtagcccatcgtgccgcacgctattataagttcgataagaagatatacaataaggtgagacggtgatatatgccgggtgtttggtaaatctaagtaataaaattgaaaatcgttaaatcgtaaataaaatcatgtttttattaggttatgacataggtagctcgtctgtaaaagcgagcttggtaaatgctgaaactggtaaatgtgtatcatcggcattctttccgaaaacagaggcaaaaattattgcagtgaatcccggttgggcggagcaagatccggaaagctggtgggagaacttaaagttgtctacacaagccattatgaatgaatccggagtcagtgcggctgagattaaggcaattggtatctcttatcagatgcatggtctggtatgtgtagacaaagaccaacaagtattgcgtcctgctattatctggtgtgattcgcgtgctgtgccttgtggtcagaaggcatttgaaactatcggagaagaaaaatgtctttctcatctcctaaactcaccgggaaactttaccgcttccaaattggcttggattaaacagaatgaaccagctatctatgaacagatttacaaaataatgctgccaggtgattatatcgccatgaaattgagcggagaaatctgtacaactgtttccggactttcggaaggtatgttctgggacttcaaaaacaatcgtatagccgatttcttgatggattattatggattcaattcgtcattgattgccgatattaaaccgacttttgccgagcaaggatgtgtaaatgcaatagcagccaaagaattgggattaaaagaaggaacccccattacttatcgtgccggtgaccagccgaataatgctctttctctgaatgtgttcaatccgggtgaaattgcttctacagcaggcacatcaggagttgtttatggagtgaatggggaagtgaattatgatccgcagtcacgtgtcaacacttttgcgcacgtgaatcattcgaaagagcagacccgcttgggagtattgctttgtatcaacggcacaggtatccttaactcatgggtaaaacgtactattgcacctgaaggaatatcatataatgaaatgaacgtgctggcttccaaagctccgataggtagcgcaggaatcagcattcttcccttcggtaatggtgccgaacgtatgctgaataataaggagataggctgtagtatccgtgggatagattttaatactcatggcaaacatcatattattcgtgcagcccaggaaggtattgtgttttcttttaaatatggtatagatattatggaacaaatgggtattccggtaaagatgattcatgccggacacgcaaatatgttcctgagttctatcttccgtgacactttagcaggagtgacaggggctacaatcgaactttatgacacggatggctctgtcggtgctgccaaaggcgcaggtatcggtgcaggtatctacaaggataataatgaggcttttgcaacacttgaaaagctaaatattatcgaacctaatgtggctaaacaccaagaatatgcagatgcatacgccaaatggaaatatcgtctagaaaaatcaatggtcgataaaatttctattttcaactcagataacaagtaacaatataaataatcatttaaaatataaagaattatggcaacaaaagaatttttcccgggaattgaaaagattaaattcgaaggtaaagatagtaaaaaccctatggcattccgttattacgatgctgaaaaagtaatcaacggcaagaagatgaaagattggttgaagttctctatggcatggtggcatacattatgcgctgaaggtggcgaccaattcggtagtggaacaaaactgttcccttggaacggtaatacagatgctatacaggctgcaaaagataaaatggatgcaggttttgaattcatgcagaaaatgggtattgaatactattgttttcacgatgtagacttggttttagaaggtgctagcattgaagaatatgaagctaacttaaaagaaatcgtagcatacgcaaaacagaaacaagcagaaactggtatcaaactgttatggggtactgccaacgtattcggccatgcccgttatatgaatggtgctgcaacaaatcctgattttgacgtagtggcccgtgctgctgtacaaatcaagaatgcaattgacgcaactatcgaattgggcggtcagaactatgtgttttggggtggtcgtgaaggttatatgtctcttttgaatacagatcaaaaacgtgaaaaagaacaccttgcacagatgttgactattgctcgtgattatgctcgtgcccgtggttttaaaggtactttcctgattgaaccgaaacctatggaaccgactaagcatcagtatgatgtagatacggaaactgtgatcggcttcctgaaagctcatggtttggataaagatttcaaagttaacatcgaagtaaaccatgctactttggctggccacactttcgaacatgagttggcagtagcagtagataacggtatgttaggttctatcgacgctaaccgtggcgactatcagaatggttgggatacagaccaattcccgattgacaactatgaactgactcaggcgatgatgcaaatcatccgtaatggcggtttgggtaatggcggaactaatttcgatgccaaaactcgccgtaattctactgatttggaagacatttttattgctcacattgcaggtatggacgctatggctcgtgcattggaaagtgcggcaactctgctgaacgaatctccatacaagaaaatgttgtctgatcgttatgcttcattcgacggtggtaaaggtaaagaatttgaggaaggtaaattatctttggaagatgtagttgcttatgctaaagcgaacggtgaaccaaagcagactagcggcaaacaagaactttacgaagcaattctgaatatgtactgctaatagagaatcaaatataaggcgatagaggtagagctttatcgccttactattatctaatccaactactacacactacttatctacttatacaccatgattaatacaacgaacgaaggtagtaaactctacctatattcgataacttctgttgctatcctgggaggattgcttttcggttatgatacagcagttatttccggtgcagagaagggtctggaggcattcttcctttccgcttccgattttcaatataataaagtaatgcatggaatcacttcttccagtgcattgataggctgcgtacttggtggggcgttctccggtatattcgcttcccgtctagggcgtcgtaactccctgagacttgctgccgtactctttttcctttcagcattaggttcctattatccggaatttctgtttttcgaatatggaaaaccgaatatggatttgctggttacatttaacttatatcgtgttttaggtggtatcggtgtcgggcttgcgtctgctgtttgtccgatgtatatcgcagaaatagctccttccaacattcgcggaacacttgtttcgtgcaaccagtttgccattattttcggtatgttggttgtatactttgtgaattacctgattatgggcgatcaccaaaatcctattattctgaaagatgctgccggagttttatcagttagctcagaatctgatatgtggactgtatttgaaggctggcgttttatgttcggctcggaagcttttccggctgcattctttggtctattattgttctttgtcccaaaaactcctcgctatttggtattggtacaacaagatgaaaaagcttattcaattctggaaaagatcaatggtaagacaaaagcacaagaaattcttaacgatattaaagctactgctcacgaaaaaacagaaaaactctttacttatggagtggcagtaattgttatcggtattctgctttccgtattccaacaggctatcggcatcaatgcagtgctttactatgctcctcgtatttttgaaaatgcaggtgcagaaggaggtggcatgatgcaaacggttattatgggtgttgtgaatattatctttacactggttgcaatctttacagtagatcgcttcgggcgcaaacctctgttgataatcggttctatcggtatggccgtaggtgcatttgcagtagcgatgtgtgatagcatggcaataaaaggaattcttccggtactttcggttatcgtatatgccgccttctttatgatgtcatggggcccgatttgctgggtattgatttcggaaatcttcccgaacacaattcgtggtaaagcggtggcaatcgctgtggctttccaatggatattcaattatattgtatcttctactttcccggcattgtacgatttcagcccgatgtttgcgtatagtctttatggaattatctgtgtagcggctgctattttcgtttggcgttgggtgcccgaaacgaaaggtaagacattggaggatatgagcaaactatggaagaagaataaataaatcagataatatctcttgtggaaaatccgtaaatcagcagatataggaatctgtgatttacggatttttattttcttatctttggagaacaatatatgaggataagctgtacctttgcactgtctttatataaaaacacgtattgttatggaacaacatccgattaaaattaataaagtgcagatacgtaatcttcaaatagaagattacgcacaattatcccaatcgtttactcgtgtttattctgacggtagcgatgtgttctggacccataaacagattcagaaattaatcaatatttttccggaaggacagattgttacagtggttgacgacaaaattgtaggttgcgctctttctattattgttgattatgataaggtgaagaatgaccatacgtatgcacaagtcacgggtaaggaaacatttaatacgcataatcctgaggggaatattctgtatggcatagaggtatttattcaccccggatatcgcggattgcgtctggcgcgacgtatgtatgaatatcgcaaagaactatgcgaaacattgaacctgaaagccattatgttcggcggccgtattccgaattatcataaatatgctgacaagatgcgtccaaaagaatatatcgaacgggtacgtcaacgtgatatttacgatccggtgcttacgttccaattatcaaatgatttccatgtccgcaaggtaatgactaattatttgccgaatgatgaggagtctaaacattatgcctgtttgttacagtgggataatatctattatcaacctcctacacaagaatatatcaatccaaaaactactgttcgcgtaggtttggtacaatggcagatgcgtagttataaaacactggatgatctgttcgaacaggtagaattttttgtagatgcagtatcagactataaaagtgattttgttcttttcccggaatactttaatgcgcctttaatgtcgaagtataatgataaaggagaatcgcaggctattcgcggattggcaaaatataccgatgagattcgtgatcggtttataaatctggctattagctataatataaacattattaccggtagtatgccctatgtgaaagaagacgggctgctttataatgtaggattcctttgccgtcgcgacggaacatacgaaatgtatgaaaaaatgcacgtcactccggatgaaatcaagagttgggggttgagtgggggaaaattactacaaacctttgatacagattgtgctaagattggtgttttgatttgctatgatgtagagtttccggaactctcccggctaatggcagatcaaggaatgcagatattgtttgtacctttcctgacggatacacaaaatgcctattcccgcgttcgtgtctgtgctcaggcgcgtgcgatcgaaaatgaatgttttgttgtcattgcaggcagcgtgggaaatctcccccgcgtacacaatatggatattcagtatgcccaatcgggtgtatttactccgtgtgattttgcttttccgacagacggaaaacgagcggaagcgactccgaatacagaaatgatattggtttcggatgtcgatctggatttattgagtgcgttacatacatacggtagtgtacgcaatttgaaagatcgtagaaatgatgtctatgaagtgaaattaaaaaaataaaatagtgacgttatcccgttaaaatagcgtcaccatatatctcgaatagcgtcactatgtgtttaggatagtgacgctatatttttatttagaagaagtaccgctttccagtatgctaacgatagaaaatagtgtgaagcagatagcccctaatcctactagaacacgtgccggaatgaaataatctgcatgtacggtagcgagttcgaatacgaaagcagccaggaataaacaagtcaatgctgttaataccggaatcatagggatgcggttggctagtttaaattcccgtctccatatctttgccaacagaattactttactggaaatactataacatacaagacccagtccaagcatgatatatccggtggtaccgtttgcactccccgaatctgccaaaataacgaataatccccatacaaaagaaatagatcccattaataaaactagtttcggccatttattccgttctttttccgaataatcatttcgcacctgacgagcaatagtagccaccaatgctatgaggctggtacaaatacaagcaagccctaccattacgtgtcctgcgacaaaataagcaggatgagagtggctgttgcctaataaaacgaatgcccatacccatgcaataatagatatgacgattgcaagaatgatcattgctcgtctctgacccacagaaaacgctccttgtgggacctcatttcctgttgctttagagttttccggaatcaaagagaatcgggtagaagaggtagcggcagtagctacgcaagccgtgataaatcctacaccggttattacatgacctgcgacaaaggcggaaggagaggtcgcattactgaaaatacagataccactaataacagtgattagagctgccaaatatcctacaataggtaaaatgtattttgttgtttcattataggtatgtatgatttgccggataatagtggcagctgtacaaaacagtgcaatacatatcataccaagtgaaaacacgacaggacctgctacgacccggtttcctgcatctccataaccataaataaacgctccgtatccgaagcaaaagagtgccatcgccaaagggattgctctgaataaaatactgataccgtaattcataattgagtgcttttttatttcccactaaaacaaggagatttccgttttgtttaggccgacagctatttataatcgttaacttcacatgattccgattaaaagtcttagctttttgctcaactaaacaaatgtttttgtaaatttgcacccttaaaaatggggatacccctcaaattgtaaattgtaaatagtaaaatcgtagatacagctatgggtaagagatttactgaatattcgcagtttgacctttcgcaggtgaacaaagatgtactgaagaagtgggacgaaaacaaagttttcgccaagagtatgacagaacgtgatggctgtccttcgtttgtatttttcgaaggacctccctcggctaatggaatgccgggtattcaccatgtaatggctcgtaccattaaagacattttctgccgttacaaaacaatgaaaggttatcaggtgaagcgtaaagccggttgggatacgcacggactgcctgtggaacttagtgtggaaaaagcattaggcatcacaaaagaggatattggtaagaaaatctctgtggccgactacaatgcagcttgtcgtaaagacgtaatgaaatacaccaaagaatgggaagatttgacgcatcaaatggggtattgggtggatatgaaacatccatatatcacgtatgataatcgttatatcgaaacattgtggtggttgctgaagcagttgtacaaaaaaggactgttatataaaggatatactatccagccatattctccggctgccggaacaggattaagttcgcacgaattgaatcagccgggttgttatcgtgacgtaaaagatacgacagtggttgctcagtttaagatgaagaatcctaaaccggaaatgacagagtggggaactccctattttatagcatggacaactactccttggacattgccttcaaatacagcactttgtgtaggaccgaaaattgattatgttgctgtgcaatcctataacgcttataccggagaacctatcacggttgttttggcaaaggctttgttgaatgctcttttcaaccccaaagctgctgacttgaaattggaagattataaggcaggagataaactggttccatttaaagtaatcgccgaatacaaaggtactgaccttattggcatggaatatgagcaactgattccgtgggtaaaaccggttgaagtgtcagaagacggtgattggaaggctagtaataaggcattccgtgtaattccgggcgactatgtaactacagaagatggtacgggaattgtccatatcgcaccgacatttggtgcagacgacgcaaacgtggcacgtgctgcgggaataccgtcgctttttatgattaataagagaggcgaaactcgtccaatggtagacctgactggtaaattctacctgttgaatgaactggacgagaattttgtaaaagaatgtgtggatgtagaaaaatacaaggaatatcaaggtgcatgggtgaaaaacgcctacaatcctgtgtttatgatagacggaaaatatgatgagaaagctgcccaagccgccgaatctctggatattgttctggctatgatgatgaaagcaaacaatcaggcattcaaaatagaaaagcatgtccacaactatccgcactgctggcgtacagataagccggtactttattatccgttggatagctggtttatccgttctacagcttgcaaagagcgtatgatggaactgaacaagactatcaactggaaaccggaatctaccggaacgggacgttttggaaaatggctggaaaatctgaatgactggaacctgagccgttcacgttattggggtactccgctacctatctggcgtacggaagacggtacaggtgaattgtgtattgagtcagtagaggaattatacaatgaaatagaaaaatcggtagctgccggatttatgaagtccaatccttacaaagagagaggttttgtacccggcgaatatactgaagaaaattatgataagattgacctccaccgtccttatgtagatgatattatattagtatcgaaagacggtcagccaatgaaacgtgaatccgacttgatcgacgtatggttcgactcgggtgctatgccttatgcgcagattcattacccgttcgaaaataaagaactgttggatagccgtcaggtatatccggctgattttatcgctgaaggagtagaccagacacgtggttggttctttacattgcacgctattgctactatggtatttgatagtgtatcctataaagcggttatttctaatgggctggtactcgataagaatggtaataaaatgtccaaacgccttaataatgctgtcgatccgttcacgactattgaaaagtacggttccgatccgttacgttggtacatgattaccaattcttctccgtgggataatttgaagttcgacgtagaaggagtggaagaagttcgtcgtaagttctttggtactttatataatacctactcgttctttgcactttatgccaatgtagacggatttgagtataaagaagctgatgtgcctatggcagaacgtccggaaatcgaccgttggattttgtctgtactgaatacgctgataaaagaagtagatacttgttataacgaatacgaaccgactaaagcagggcgtttgatttccgactttgtcaacgataacttatccaattggtatgttcgcctgaaccgtaaacgtttctggggaggtgaatttacacaagataaactgtctgcttatcagacattatatacgtgtcttgaaacggttgctaaattaatggcccccatttctccattctatgcagatcgtctgtatacggatttgattacagcaacaggacgtgataatgtagtatccgtacacttggctgaattccctaaatatcaggaagaaatgataaataaggaattggaaacccgtatgcaaatggcacaggacgttacttctatggtattggcattacgtcgtaaagtgaatataaaagtccgtcaaccgctacaatgtatcatggtgccggtgctggacgaagagcagaaagcacatatcgaagctgtgaaaagcctgataatgaacgaggtgaatgtgaaagaaatcaagttcgtagacggtgcggccggtgtcttggtaaagaaagtgaaatgtgactttaagaaactggggccgaaatttggaaaacaaatgaaagccgtagctgctgccgttgcagaaatgtcgcaggaagcaatctccgaactggaaaagaatggaaaatatactttgaacctgaatggagaggaagccgttatcgaagtctcagacgtggaaattatcagtgaagatattccgggctggttggttgctaatgaaggcaagttgactgtggcacttgaagttacagttaccgaagagttacgtcgtgagggtattgcccgtgaattggtaaatcgtatacaaaatatacgtaaatcaagcggtttcgagattacagataaaataaaaataacaatctcgaaaaatacacaaacagatgatgcggtaaatgaatataatacttatatttgtaaccaggttttaggcacatctcttgaacttgttgatgaggtgaaagacggtacagagcttagctttgacgatttctcactgtttgtgaatgtgataaaagactaatactatattgattaaccttttaaaattgtaagattatggcagaaaagactagatactcagatgcggaacttgaagaattccgtgccattattatggagaaactggaactagcacaacgtgactatgaacagttgaaaaagagtttgatgggattggacggtaatgatactgacgatacatctcctacatataaagtgttggaagaaggagctaatacactttccaaagaagaaacgacccgtttggcacaacgccaactgaagtttattcagggattgcaggcagctttagtacgcatagagaataaaacgtatggcatttgtcgcgaaaccggaaagctgattccggcagaacgcctgcgcgctgttcctcatgcgacattgagcattgaagctaagaacagtggtaaaaaataatagatagctacacaagctacgggtgacgagctacaagtagctgcgcaatgttgacgcacggcacttgtagctcgttatgtttaatttataatgaacgcatgaagaaactattcacgaagggaacaatcgctctgatcgttatcttttccgtattgattatcgaccagatcattaaaatctggattaaaactcatatgtactggcacgaaagcatacgtgtgacggactggttttatatttatttcaccgagaacaacggaatggctttcggtatggagattttcgggaaattattcctgactactttccgtattgttgcagttgcattaatcggttggtatctatataaaattgtaaagaaaggcttcaaaaccggatatatcgtttgtgtggctctgattctgaccggtgctttaggtaatattatagatagtgtattctatggagttattttcaatgaaagcactcattcacagattgcgagtttcatgccggagggcggaggatattccacctggttctatggtaaagtagtggatatgttttatttcccgattatagatacaaactggcctgcatggctgccattcgtaggtggagagcattttatatttttcagcccgatctttaattttgcagatgctgccattagttgtggtatcattgctttattactcttttatagtaaatatctgaatgagtcatatcattcattggataaaggcgataaaaaggaagttgagaatcatgaaaagtaagcttcggtttcatctgtgtttcatctgcatgcttgcgcttgcggtagcgggatgtaaagtgaaaagacctaatgacgtaatcccggaatcgaaaatggagagtttgctatatgattatcatttggcaaagtccatgggagataacctgccttacagtgagaactataaaaaagcgttgtatattgatgctgtttttaagaagtatggaactacgcaggctgtattcgactcatctatggtttggtacacacgcaacacagaagttttatcgaaaatctatgagaaagtaaagaaacgcttgaaagaccaacaggacgaagttaatcatttaatagctttgcgagataagaaaccgaaaatgacagaaccaggtgatagtcttgatgtatggccttggttgcgtatgatacgtttgaccggcgagatgatgaataaccgttattcgttcgtattgcctaccgatactaactataaagaccgtgataccttggtttgggaagtgaattatcgttttctggagccaatgcttgctgattctttgagagcggtagctatgggtatgcaggttatctacgaaaaagatacgataaatcatctgaagactataacccgcccgggagttcagcaaatacgtttatatgctgatacgctgggagctatgaaggaaattagaggtttcatttactatccgatgttaggcgagcagaaagggggaacgctattagcagaccatttcactatgactcgttatcattgcaaagatactctcgcttttgctgttcgtgactccctgaataagatagaagctctgaaagcggattctctgaaaaagatttcggaggaagaagtggtggattccttgcataaagttgccgaagaacataaagaggatgtccaacgtttgacgccggaagaaatgaaccgtcgtcgtacaggaactcaacgtgaaaagaaaccggaacagatcgaggtggagcaacatatccagcaagagagaatagaacaaagaaaggaacggcaaatgaatcagcgcaggcagcaacagcaaagacgtcaaactcgttagtgatatgaaacgatttgcatctcattatttattcatgcctgatgttggttttataaaacagcaggtagtggaaataaccgatgaaggagttgttcgagatacatttccactaacggaagaaatagagtcggttgaatggatgccgggagtaattgttttgcttcctgctgaccagcttgaagaaataaaaaacactgggatgattttaaaaaatatcccggtgtttcaaattaatccttccaatattctaaatcaatcttcccggtgttttgaagagtcattaaaagaattaaaagagaagggggaagtattattccctattttattttatccgtttgattttatttccatgcagcctgtcgacggaactcggcacagattactgcggtagctatggctacattgagtgactcggaggtttcttttccttgtggataattgggaatataaagttttctatttattaaagtttctacttcttttcctattccatttccttcatttcccattacgatcaaaccattggcggttaatggctgttcatacatatttttcccattaaggaaagttccgaatacaggtatatcttcaccgagtgaacgaataaaatcagggagagaggtataatgtacttttacccgcgcaatcccccccatagtggcttgtatggtcttgggattataaacatccactgtgttttgcgaacaaataatatgttcaatgccgaaccaatcagctaaacgaacaatagtccccaaatttccggggtcctgaacgtcgtccaatgccaagcaaagggaatagcgggcaacccccgaggtcagagtatattggggctgttcaaagacagcaagcacctgctgcggagttttcagtaaactggctcgtgaaagatcttcttgagaaacttctgctatttcatttacacgaagatcaggatgttcctgaatccaggatgtggtagctgccagaaaacaacaggggaaatgtccgagtaaatcgcctactagtttaggaccttcggctagaaaaactcgttcttctttacgtattttctttagctcaagcgaatgaatatactttattttgtttttacttaacgataccataaactttattttgtgacaaagctataaagatatttccaatctatccttactttcctctctttttcttaatttattttcctcatcggaaaatataatttatctttgtgagcgcattttttatgctatcgatgtaaaaccgtatgaggaaaaaatttctttatttgcttgcttctgccgctattttgtcacttgtttcgtgcacatccacaaagtttgtgccggagggttcttacctgttggatgaagtcaagattcgtacggaccagaagaatatacggccttcatctttacgaatgtatgttcgtcagaatcctaatgccaaatggttcagcctgattaaaacacagttatatgtttataatctttcgggacgtgattctaccaaatgggggaataaatttctacgaaggataggtgatgctcctgtgatatataatgaagaagaagcgcagcgttctgaagaagaaatcacaaaggctgttcataatatgggatatatggcagcaacggtaaagcgttccactaaaataaagaagaagaaaataaaactctattacgatgtaacagccggaaaaccatacgtcgttcaatctataaaatatgatatcaacgatcctcaaatagctgctcttttgaaacaagattcagcaaaaagtttattgaaggagaagatgtattttgatgtaaacgtgttggatgcggataggcaacgaatcacggataaattactccggaatggttactataaattcaataaggattatataggctataccgcagatacggtacgaaatacttataatgtagatttgacacaacacttgcacccatttaaaactcatgtcagtgattcggcaaaggcacatcaacaatattggattaacaagattaactttattacggattatgatgtattgcagtcgtcggcattgagcagtgtggagattaatgactctattaattataaagggtatccgatttattataaagataaactgtatttgcgtcctaaggtgcttacggataatcttcgttttgctcccggagatttgtataatgagcgcgatgtacagcagacatattccagttttggacgcttgccggcattgaaatataccaatatccgttttgtggaaacgcagattggagattcgacaaagcttgactgctatgtgatgctgactaaaagtaagcataaatctatagcttttgaggtagaagggaccaactctgccggtgacttgggagcagcagcttctgtttctttccaaaatcggaatctttttcgcggatcagaaacctttatgataaagtttcgtggcgcttatgaagtgatctccggacttcaagcagggtatgcaaataataactatacagaattcggagtagagtcaagtattaatttccctaattttttattcccttttgtgtcttctgattttaaacgaaaaattagggcaactactgaattcggcttgcaatataactatcagatgcgtcctgaatttctgcgtacaatggcttctgcttcatggagttataagtggacgcaacgtcaaaaaatacaacatcgtattgatttgattaatattgctttcctttatttgccgcgaatttcagaaagatttaaagaggactatataaataaaggtcaaaatgatatttttcaatataattatcaagaccgcctgataataaatatgggatatagctataactataatagtgtaggaggggctattgttaataatacaatcgcttccaactcgtattccattcgttttaatttcgagtctgcgggaaatataatgtatgctttgtcgaagatgactggaattaggaaaaacgctaataatgagtatgccattcttggaataccttatgcacaatatatcaagggagagtttgacttctctaaaaatatcaggattgactatcgtaattcatttgcatttcatgccggtataggtatagctgttccatacgggaacgcaaaaactattccgtttgagaaacaatatttttcgggtggagctaacagtgttcgcggatggagtgtacgagatctaggtccggggtcttttgccggtaagggaaatttgctcgatcaatccggagatattaaattggatgccagtatcgaatatcgaagtaagttgttctggaaatttcagggagctgtctttattgatgctggtaatatctggactgttcgtgaatatgccaatcaaccgggtggagttttcaagtttaataagttttataagcagatagcagtagcttacgggttagggcttcgtcttgacttagacttctttattcttcgttttgatggaggtatgaaggctgtcaatccggcttttgagactaaaaaagagcattttcctattattcatcctaaatttagtcgtgattttgctttccattttgcagtgggatatcctttctaaccaaccatttattgccttcttttattagttggagtgtatcttgcagagaagaaaaccgttccgcttttccattgataggattgataataaatgcattttttatttggcagattactgttgccatttcagagtcaggagttatctcactcgaagtaatgatagaagcttttgccgctccttgtgttttcagttgatccaaatgattttgctgaatattagatgctaaaaaactaagataggatagtgaagacggagtactccattcttcggcaaccggataattgaaattataaaaagattcacagaaattgatagctatctcctccaattgagtcttggggttctgtttttggcatgaaaaacaggtgaatgttattactgaaaggattaatatatgtatcttcttcatagcatagaatagtaatatagtggataataaaaaagagatgaaactcgtttgagaaagtttcatctcttacatatttattctttaattattagcgagctgcaaacataaggttgctcattgtagcttggcgagctgccatcatgccttgagcatccaaagttacattcattttttcgccgttcggtaagaacaaatcggcagtaccgtcgttgttcatctttatgagttcagcactttcaccgtttgcaactacattccatgtattagcttctttgttataaatcaaatccatagaagcagtttcaccttctttagtaatggaatatccattttcaagtgtctttaccatgtaattgccgttctctccttttactttctttacgtcacctacgttagccatcggattggaaccactccagaactcgatagaattaataactaaagcatcagccaggtaggacactccgtaaaccggaacaatgttgaaagctagaaatacaagttcatttacaaatttgcttccaatagattggttccaagaagataaacggttgaataaaccaaatgaacctacacaagaactgaacaataggctgccactaagtagcactgcaactaaagtaagtttctctcttttcatgtcgaaatgttttttaattaataaaaaatgtttataatgcctctgttatatgtatgcaaatataatattttttaattaatcaaggttattattttcaatatttgtgttacttcgattttcgccgttgcagttcgtttcctattatgtggtctattgaatatttaccaggaccggcaatatacataagaatgaatacaactaaataaatgaaagctagctccttgactgtaaatatatcattcgcatgaatcacaaagaaagctatcgccattgtgaaaatcatcggaatcattgccagccgatataagaagccaatgataaaagccattgaacagacaagttcgccaaaaatagctaatccgagggataggggactacctatacctaacggatcaggaaatgcagttgacagttcctgaaagttactccatttttgtataccatggttcattaataatattccgaagattatccggaccgccaataggaacaaagaaacttttgctgtatttggctttgtagggaataaaaaattataaatcataagttgttctttttttaagttcatctctatttatataaacataaaatatcttgattttgttctttgctccaattagaatcagaaaaagacaaatcggtaataaaaggatatgtctatcgctcttattaccgatttaccgaatttaatataatagaaagtttttatttattctttattcaatatatagtgatcggcaagtgctcctgttatttcctgtttgtcatcagttaataaacgcaccctgttttcttctactttataataagatatttctccgttttcttcttttagagttaacaagttaccttttaaagtatatgtacctttatcgtcgaacgaactatctctatcaatatatacggagtgaagcgtatatgtcttatctggatttaatattaaggttgtttcaatgcccggacagtcggccgcagggaaaacacctttgtatgttccttcgtaatcaagcgaagtttccgcattatgcatatcaacaacttcgattgtggtactgtctgtatctgtacctttgtttgtttttgaactatttccgcacgccgccaatagggtacacgaacataccagaataaaaattttcttcatgattattttttttaatgattaatctaatttagtttaatattgtaaaggtatgaataataattcgaatattggcaatgaaaagaaatggacaactttatttatgaattaataaactttgtatctttgcgaaaaaatataaagatatgacacaacatacttatgacaatgaatctgttcaggaattgctgaactgggcaaagaaaatgcttgaaactaaaaattatccgaccgagaaatatgaattaaataagtgtactactataatcaatggtaagacttatttggaatccttagttgcaatgatcggcagaaattgggagaatcctacttttcatcctactatcgaccaattatgggaatttagagaaaagtgggaaggaaaagaagagaataaaaaaccgtagcatcatagctacggtgatttataaaaaaaggagaacttttacaagttctcctttttctgttttgtacaccctcagggattcgaaccctggacccactgattaagagtcagttgctctaccaactgagctaagagtgcttatttcctcgtttgcggttgcaaaagtaggtcttttattttatttgaccaaacaataatgcagcttttttactatctttttttcgtctttattcgaatacataaagctcggaaggcgtatttcgctttaaagcaagcagttgcacatctttacctacaatgactcctttgttctttaatttccattctaccgttttataggctaactccggatgattattatctttgcttaaatggcataaccatatatatcgtagatgttcggtgatattttctgccaaaaattcggcagtatcagagttgctcatgtgccctgtcttacttgtaattcgttctttcagatattgagggtacggtcccattttaagcatttcctcatcataatttgcttcgagaatcagataattggctttacttatataatgagcagctgtaggagtaatctctccaaggtcggttagaaaagagaataccttgccgtcaatttcaatacagtaacctacattatccgttccgtcatgaggaacttcaaaagattctatgtggaaatcttctaaagttataggctcttttttctccaaataacgaactgatgaactaagtttttccgtcatacaataactacggttgattccggcatgaatacgcgccgttgtataaacagggatattcagtttttctcctaaatgacctacagccttgatgtggtcagcatgatcatgtgttataaatacagcacgaatactatccatcaggatattaaagtctttcagtgtcttttttatagtacggataccaatgccagcatctattagtattccataggtttcagtacccagataataacagttcccactactgccacttgccaggcttataaattttactttcatgttttatcctctttattaaaaatgcaaaatgccgtcaacttttacagcaaagtgacggcaaatatacgcaaaaaagaagatatttatcgagaagatttcttctttttgtcgatggattcggtgatttttgcaaataatagcaatgctatggcggcaatcaatccgatagcggcaaagtaataccatatatagtgcgcatttacactggctgcttcccatgcagcatgcgtctcaaataaggtagggtccggacaatatttagtcaatagaatacctgccagaccaaagccgaagattgaggaaagaaaagaatgcaaatggctaaagcctaaatacatcccttcttctcctttgggtgcctgcaaggaaaaatattcaagataacgaggtgaaataaaacattcggcaagtgcctgtacaataattccggcaaccatcatcaaagtaatattgctcatgccagagataatatcgttacctaataaattaccgcaagccatcaataaagcagaaaaaggaattaagaacattcctacattcattgaagtaattgcactccgtttcgccattagacgtgttatgaaactaacaaaacacactaccacaaaagggttcacattagcaatccaccctggtttcgccgtctcaccagccatacggattacgtatttaggcatagtggcataaagttgttgctgtaccatccaaaatccggtgacaatcagtatgagaatcaataaacgccagttggtgataattttcataaatccccggctgatttcacggagactttttccttcacctgctgtatgtgtagatttataaagaagtataacggcaagcaaagcaataattgtcatagcaccggagaaataattgatatagatataagcttgctcaccgatcacattgcgtaaaggatcaataattgttttaccagtgaaggcacctatattaaccatcatataaaaaattgaataaccgcgagcgcgtgttgcctctgtcgtttctttagctacggaagcggaaataatagactttataaaagaacctccgaccataagtataaataagacaggaacaataatccaccgggtatagctatctggcaaaccgttaaactgcgtagtagcaccatagttgactaatcctgccgtttccagtaacgtaggtaagacgcccaatcctaaatatccgatagacaataaggagaatgctataatcattgatttccggaaaccgatcttatcagcataagcaccagaaaaaataggaagcaaatacaatcctccggaaaaaagtccagagatcatacttgcttcaaaatcattaaaacctaaaattgtggatagataaatagtgagaacgatgaaaacggcataatatgccatccgttcaaacagttcgactgtgttgctgacccaaaatgctctggtaaagcctttggcagcacgctgaggggaattgttcatgtagttatgtttttagttaaaatgttaattcagcgcaaagatacgtttttttggcagactgtccgtatctttgtgtaaaattaggtatttaaacaattatggttatagctgttgattttgacgggacgattgtagaacatcgttatccacgtattggcgaggagattccattcgctattgatacactaaagttgttgcaacaagaaaaacaccgtttgatattgtggagtgtacgggaaggagcgcttttggacgaagcagttgaatggtgtaaagccagagggttggaattttacgcaattaataaggattatcctgaagaacaaaaagatcatcagggtttttcccggaaattgaaagctgatttgtttatcgatgaccggaatcttggcggcttaccggattggggagttatctacgaaatggttaaggaaaaaaaaacatttgccgatatatatagccaaaacgaagaagatacagcaccactgaagaaaaagaaaagatggttttctttttaatcggtgaagaaattgtacgtaactcaataaaaaatccctctgtttgaatcaaaatccaaacagagggattttttattgagttactatctgttagaacttaaagaagttctttgcattattatagctgatatcttcaatcatttgatttacacgctctatttcagaagccgggatttcaccattttccacatcacgtcccaccaagttacataatgtgcggcggaaatattcatgacgcggataggaaaggaatgaacgagaatcagtcagcatacctacgaagcggctcaaaagaccaagtacagacaatgcattcatttgtttttccataccgtctttttgatccaagaaccaccagccggaaccgaattggattttgccgggaatggaaccatcctggaagttacccaacatagtagcaattacttcgttagcacatggattcaagttgtaaaggattgtttttgtcagtttaccattgctattcaaacggtcgaggaatttagccatagcttttgccgttgtaaattcgccaattgaatcaaaaccagtgtcaggacctaacagcttgaacattttagtattgttattgcggatagcaccatagtggaactgttgggtccaacctttttcccaatccatttcaccgaaaatcacaagcattgctgacttgaatttcaaaatctcttctttagtcaactcaatgccaccatataccttattaaatatagttttaatttctacatcagtataatcttctgcataaaattcttcgataccatggtcggacaagcgacatccttgttctgcaaagaaatcgtgacgttttcgtaaagcaacaaccatgtcgtcaaagctggagatagtaacaccgctaacctctgataatttttctacataggcacggaagtcggcaggaacttctactgccattgctttgtccggacgccaagttggtaacattttgatttcaaatccgctttcacgcgttttgatatgatattccagcgaatcaatcggatcatcagtagtacatacggtttctacatggtaacgacgcatcattccacgagctgaatactcaggttgggcaagtttctcgttacattcatcataaatttcacgtgcagtttttggattcaatatcttattaatgccgaaagctgttttcaactccaaatgagtccagtggtatagtggattacggaacgtataaggcactgtttccgcccatttttcgaacttttcccaatctgtggcttttcccgtacagaagcgttcgtctacaccattagtacgcattgcacgccatttgtaatggtcaccgcccagccatatttcagtcagtgatttaaacttgtagtcgtcggctaccatttgggggattaagtgacagtgatagtcgataatcggcattttagccgcatgctcgtgatacaacttttgtgcagtttctgtctgcagcaagaagttttcatccatgaagttcttcattattactgtgttttaagtatataaaattattactttctacatttatacctatatagtattgattttaaagctaataggcgtaaatatcgttttagttttattaaccgttatcgaacacaaaaatagaaaatttacttggagtaacaaaataattcgtatatttgcagcgattatttataatatttaagttttagcactatggaggaccagaactatactataaaagacatagcccgtatggccggtgtttctgccggaacagttgatcgggtattgcataatcgaggtgacgtgtcttcaaaaagtaaagctaaagtacaaaaggtattggatgagattcattatcagcccaatgtgtttgctatcggactggcggctaaaaagaaatatacttttatttgtctgatcccatattatatagaacatgactactggcattcggtagtgggcggtatagaacgtgcacggcaagagttacgcccttttaacgtgagtgtgaactacctttgttatcatcatggagacaagaagagctatcaggaggcttgtcacactattagagacagcagtgtagatgctgtgttgatcgctccgaatttccgggaagaaacaatagaattaacatcttatttacaggaaaataagatagcctacgcatttgtcgatttcaatatggaagaagcgaatgcattaacatatattgggcaggactcatataaaagcggatacattgctgctaagatattgatgcgtaattattcattgggagaagggcaggagttagtgctatttttaagcaataataaaaataaccctgccgaaatacagatgcaacgccgtttgaaaggttttatgagttatataacggaagaatatgataacttgacaattcatgaagtagtgctcaataagtccaatcaggaaaataaccagcagacgttggacgagttctttcaagcacacccgaaagctgtgctcggaatcgtctttaattccagagtctatcaactgggggaataccttcgccacgcaaaacatagcatgaagggattgataggatatgaccttctgaaagcaaatgtagaccttttgaaatcaggtgatgtacattatttgatagggcaacgtcccggattacaaggatattgcggggtgaaagccttgtgtgaccatgtagtatttaagaagagtgtcgattccgtaaagtatatgcctattgatgtattgattaaggaaaatattgatttttattttgaatttgtataatatcaactttataaattacaactaacatgaaagcattaaacaaaggaactgctcctaagacacaacgtccggagcgtattatccaatttggagaaggtaactttttacgcgcatttgtagattggattatttataacatgaaccagaaaacagattttaatagtagtgtagtagtagttcaaccgattgataaaggtatggtcgatatgttaaacgcacaggatgatctttaccatgtcaatcttcaaggattagataaaggagaaactgttaatagcctgacaatgattgacgtaatcagccgtgcattaaacccatatactcaaaatgacgaattcatgaagttggcagagcaaccggaaatgcgtttcgttatttcgaatactacggaagctggaatagcttttgatccaacttgcaaacttgaagatgcacctgctgcttcttatccgggcaaactgacccagttactgtatcaccgttttaaaacatttaatggtgacaagtcaaaaggattgattatcttcccctgcgaacttatttttctgaatggacataaactgaaagagactatttatcagtatattgaattatggaacttgggtggtgaatttaaaacatggtttgaagaagcctgtggcgtatatgctacattggtagaccgtatcgttcccggattcccgcgtaaggatatcgatactattaaagaaaaaatacagtatgatgataacctcgttgtacaggctgaaattttccatttgtgggtaatcgaagctccacagaaagttgcaaaagaattcccggcggataaggcaggtttgaatgttttattcgttccgtcagaagctccttatcacgaacgcaaggttactttgttaaacggccctcatacagttctttctccagttgcttatttatccggcgtaaacatcgttcgcgatgcttgccaacatgaagtaattggtaaatatatccataaggtgatgtttgacgagttgatggaaacattgaatctgccgaaggatgaattagaaaaatttgctactgatgtattggagcgtttcaataacccatttgtagatcatgcagtaacaagcattatgctgaactcattcccgaaatatgagactcgtgacctgccaggtctgaaaacatatctgggacgtaaaggtaagcttccaaaaggattggtacttggtttagccgctatcattacttactataaaggtggtgtacgtacagatggcgctgaaattgttccgaatgatgctcccgaaattatgaatctactgaaagaactttgggcaacaggctgtacaaagaaggtaacagaaggtgtattaggttccgaatttatttggggagaagacctgaataaaattccggggttggcagaagccgtgaaagcgaatttagattcaatcctagaaaaaggtatgcttgaaactgtgaaggatattcttttataaaaggattatataaagtcagccccactattctaaaagaatggtggggctgactttatactgtcgtcttgaaatgcaattccttattcttcggctgtgtggagaatgaatgtagtagcaccaattgtcacaatagcaccatcttcaatccgtatccggtctttgtctcccaaaatttcattcatgagaaatgttccagtaaggctcggagcgtcccgcagtgtataaataagctttccttgcttgttacgctttatgttgataatacagtgacggcgatccatgctcatatctccgctttcgataggggtattaatgacagttcctacacaacgacgccctatcacattatcaccttcctgcaatggtaatatttgcttaaagccgaatatattttcgatcactgtgatatatccgaattcttctttgtgtacttcggcttcttcttccagattttcttcttttctaagagcttttactttacttttccccaaccggatactaaattgcttgccgcaatgctcacactcaaatacgagcgattggccttcgctatacttagtttcatcaaaataaaggtaattctcacatttaggacaaagaactcgtttcatgtttttaaaagggggattttattttgccagtaaccaggcattcttataagtttcgttttttctcaactctagcaattgcttggttgcttcttcgcgattatcaaatgagcgtatgctgacacgtaccttgcctgccgtattgagggctttggcttctgcaaatcctttttcctttaattgatttgccatagcttctgcatctttcatgctgattccgcctgctacaataatatggaaaggatgattgaaatttgcttgtgatttagcagagacaggagcaggaactgtttcttgcttgttgacttttacttctttaaccgcaataggccttgaggttttagctttatctactgtaattttgggagcagatgtcttttgcacctgttgttgtgtacccctactctttacagaaacaggagttactacaaccgattgtttctctatttgctcaaaaagttcaccaggcaataattgcgcatagttgtttttctgaatatctgtattttctacccggtttgagaaagcaaaaaacagtatgacagcagcaatcatagctactgcattacggagatatgcacgattgatacttatctcataagttttcttctctctagtcagattggctggtatcaagaccttctctttttgttgcaaagtagcaagttcgtgtatctcaaaagaatccaaaccatataatgaaggagtcgttatcttacaatcataaggtataaactcataatttccataaatattataatgaatctcaccaacattttccaaatgggctttcccttcttcgtggagaatctcgataaatgcacttacttctttttctacgatgcgagttgcatcagcaaaactggtatcatatgctgacatataagattgtaccaatactccatcattcaattttaattgaggattaaaaccaatcgtacgggtagggggtaaaaaaagattttcttcttttacatgagttgcgggagcatagtgtgcaacaaatccaccaaatcccggaacgatgacgcagtcgttctccaatagtaaagcctctatatgttgtgccaattcaatcatgtgtgcaaaattaagagataaattgaatatatcccagaaaactacgaaaaattcactacttttgcatcgttttatttagcactattaacaatgaactatatacagacggaaatagacggagtatggctgatagagcctaaagtattcttcgacgaaaggggatattttatggaagcctttaagaaagaagagtttgaatctcatattggtcctgtaaactttgtgcaggataatgaatcgaaatcatcttttggggttttacgtggattgcattatcaaaagggtgaatatagccaggctaaattggtccgtgtcatcaaaggggaagttttagatgttgcagtcgatttacgtaaatcgtcacctacattcggaaagtatgtaagtgtactgcttagtgaagaaaacaagagacagttttttattccccgtggttttgcccatggttttgccgtattgagcgaagaagctattttcacatataaagtagataataaatatgctcctcaagcagaagcttctattctattcaatgacaaaacattgggaatagattggccactgtcggaaacacaaatgttattatcctctaaagacagagaagggactgcctttaaggacgccgtatattttgaataaacgactaacaaacaatagataagtatgaaaattgcaattgtgggaacaggatatgtcggcttagtgtcgggtacatgtttcgctgaaatcggtgtagacgtaacatgcgttgatacaaatagtgagaaaatagaatctttgcagaaggggattattccaatttatgaaaacggattggaagaaatggtgcttcgtaacatgaaagcaaaaaggttgaagtttactacatcactcgaaagttgtctggatgatgtggaagttatattcagtgctgttggtacacctccggacgaggacggaagtgctgacctgaaatacgtactggaagttgcccgtaccattggccgcaatatgaaacaatataaattggtagtaacaaagagtactgttccagtaggaactgccccaaaagtccgcgctgttatccaggaagaattggataagagaggagttaaaatagatttcgatgttgcttctaatccggagttcctaaaagaaggaaatgcaatcagtgacttcatgagtccggaccgtgtagtggtcggagtggagtcagcccgtgcagagaagttgatgtctaaattgtataagccatttttattaaataatttccgtgtgattttcatggatattccttctgcggaaatgactaaatatgcggcgaattcaatgcttgcaacccgtatcagttttatgaatgacatcgcaaacctgtgtgagctggttggcgcagacgtaaatatggtacgtagcggaattggttccgatactcgtattgggcgtaagttcttatatccgggcatcggatatggtggttcatgttttcctaaagatgtaaaagctttgattaaaacggcggaactaaacggatatccgatgcaggtacttcgtgccgtggaagaagtaaatgaacttcagaaaagtgtgctgtttgataaattagtaaaacaatttaatgacaacttaaaggataagaccattgctttatggggattggcttttaaaccggaaacggatgatatgcgcgaagccccggcattggtattgattgataagctgctgaaagccggttgtcagatacgtgcatacgaccctgctgccatgcaagaatgtaaacgtcggattggagattcagtttattatgcttgcgatatgtatgatgcagtacttgacgctgatgctttgatgttggtgactgaatggaaagagttccgtttgccttcatgggcggttatcagaaaaacaatggcacaacagattgtgttggacggtcgtaatatatatgataaaaaagaaatggaagaacttggattcgtttactcatgtattggtaaataagataataagagtatctttactacaaaattgagacaaatgataaagtatgtggcaatatcgttaatagctatctttcttatggcatgtaccggcaataagaattcgtatttttccgaggaggagaaggaagattcgaatgccaaggaaatgttgcaggggatttggctggatgatgaaacggagagcccgttgatgcgcgtagaaggagacacaattttctatgcagactcgcaaagtgctccaattgcttttaaaattatacgggacactctttatacttatgggaatgatacgacttattataagattgataagcaggcagaacatatattctggtttcattccataacggataatatcatcaagctgcataagtcggaggactttaatgattcattgtcttttgtccgtgaggaagtggttattcccacctatactgaagtaaccaaacgcgatagtgtagtgacttataatggcgctcgttatcgtgcttatgtatatattaatccttccaagatgaaagttatcaaaacaacttattctgaagacgggattagcatggacaatgtgtattacgacaatgtgatgcacatttgtgtctatgaaggcaagaaaagtttatttgccagtgatataacgaagcaaatgtttgataaggttgtgcccgaagatttcttggtacaggctattttatctgataccaagtttttaaaagtagaccggaatggttttcattatcaagccattttagccattccggagagttctgtatatagtatagcagagttggaaatcagttttgacggtactctgactattgcttcaaccaaataaagatttagttctgcctgggagagggacggttgttcccttttcctcctccattgtttctttttcctttgaagtttcttctctttgaatagttgccgcccttattactaaaagaacgtggcttatattcgggagcttcacctaattctgttggaataggaattttatagatttctttttcaaggaagttctctatacttttaaagttactctgctctttttcactgacaaatgtaagtgcaaccccatcgttgttggcccgtgccgtacgtccgatacggtgcacataatcttcactatcatgaggaacgtcaaagttgataaccaggcggatatcgtcaatgtcaatgccgcgtgccacgatatccgtagctactaatatattaatttttccggctttgaaatcatgcataactgcttctcgttggacttgttcaagatccgagtgcatttctcctacattcagtttcattgatttcaaggcttttgtcacttccttaaccttgattttagaagacgcgaagataataacacgttcgggaacttcatccataaaaaggttacgtataattcccaacttttgattctcgtagcaaacataggcagcctggataattttatcggcaggccttgaaactgcaagttttatttccgatggattattcaggatggtatttgctaactgctggattttggcaggcattgtcgcagagaacatgatagtctgccgttctttcggcaagtatttcactatctgcataatatcatcataaaatcccatatcgagcatacggtccgcttcgtccaatataaaataagaaaccttggaaagatctacatatccaagacttaaatgagcgattaaacgtccgggagtagcaataactacgtcagctcctaatgtaagcccttttttctgttgttcgaacaggataccgtcgtttccaccatataccgccacacttgatgcaggcataaaataggagaaaccttccatttgctggtcgatttgttgcgctaattcccgggtaggagacatgataacacaattaatcgcatcctccggatgtttaccttcggatagtttattcagtacgggaagcagaaatgctgccgtcttacctgtacctgtctgtgccactgctatcaagtctttaccctcaagtatgattggaattgcttgttcctgtataggtgtacattcgtcaaatcgcatggcatcgagcgcctcaagcacatttgcattaagttgcagttcggaaaacttcattctttcaatttatttgttagcaaagataaactatttttctctctcaattacatattcaaataagaatctttgaaccctaggaaatagagtactccatcaagtccgatagtgttaatggattgcttggcatttgccacaactttgggtttggcatgaaatgcaatgccgagtccggcaattcctaacatcggcagatcgtttgcaccgtctcctacagcaattgtctgtgcaatatccactttctcgacctgagctatcaatcggagtagttcagctttccgcttcccgtctaccacgtctcccagataacgtccggtcagtttcccgtcaacaatttccaactcatttgcatatacatagtcgatgccgtatttcttttgcagatattgaccgaaataagtaaaccctccggaaaggatagcaattttatagccatatttcttcagtacatacatcaatcggtccacaccttctgtaataggcagactttctgcaatctcttgcatcacagactcgtccagtccttttaagagtgctacacgacgcgtaaagctttccgtgaagtctatttctccccgcatggcactttctgtaatagctttaacctgatcacctacaccggcacggatagccaattcatcaataacttctgtttcaatcaatgtagaatccatatcgaaacaaattaggcggcgcatacggcggtacatattatcttgttgaaaagaaaagtccatttccagttcgcttgccagtttcattaatccttcctgcatagcaactcggtctttgggagtccctctcacggaaaattcgatacaggcacgggtacgtgtgtctgtcttgtcttcatctaatgggatacgacctgtcagacgcttgatagcatcaatgttcataccttgctcggccaatatcttggtagctgcggatagttgcagcgcagaaagcttgcgccccaacacagtcaggatatagcggtttttaccttgcatacctacccaattctcatactgttcggtcgtgattggctcaaaccgaatcgtgactcccaatgaagaagctttaaacaacagttctttcatgatgaacccggaatgtctttcttcacttttgaaaaggatacccaatgacaatgtgttatgaatatccgcctgaccgatgtcgagaatggtagcatcatatttggcaagtatttcagtcacggatgaggtcagtcccgggcgatcttcgccagtaactcgaatcagaattaattcagtatttgatggttgcataagaaatagactttaatcctgcaaaagtagagaaaaaagttcgtttttatgctaaataacataaaaagttatactcaaaaagtaagatttttgcttgtttttttggaagttaatttaataattacttacctttgcactcggtttcaaaaataaaggctctgataatcagcggattcctcttcgcctgatgcctgaaaagacaatgtttcgggaagaaaccactgtttaaggacagtcccggatagtattaactaaaaccgaattacatgagacatgtaaaatggatttttgttgtattactgatttgttccttgaccgctttcgttgagaaagacaaaccgaccggaggtttgagtgagggtgatgtagcccctgattttaaaatcgaatctacatcagaagagcaacctgcatttaaactggctaatatgaaaggccgctatgtgttgctaagtttttgggcaagttatgatgcgcagtcccggatgcaaaatgtaagtttgagcaatgtgcttcgttcttcccgtaatgtggaaatggtttccgtatcgtttgacgaatatcagtcgattttcaaggaaaccgttcgtaaggaccaaatagttacgcccacttgcttcgtggaaacagaaggcgaggactccggattgtttaagaagtaccgtttgaatcgggggttcactaactatttattggatggaaatggtgttattatagccaaaaacatctctgctgcagatctttctgcttatgtaaaagaagtcggttgacgattttggaaatgtaaggagaaagaggtatttttcggttcgctgtctggcgaataatgaagaatagacaaaagaggaaatggatacaacaaaaaagttccgcctacacttgctttcaagcaggaataaggcggaacttctattttatatattctttatccttctatttaggagccttctggtacaggaagaatgcgatacccgcataaaggatgtttggaatccacacagcgataacaggaggtacgtttccattaatagcaaaagttgaagtaattgtctggaataagatataagagaaactcaatcctaatccgatacccagatgaagtcccataccgccttttgttttccgtgacgaaagcgaaacaccaataattgtcagaatgaaagaggcgaatgacatggcaattcgtttgtgatattcaatctcaaattccttaatattggcaaatccccttcgtttctgtttctcgatataatcactcaattgaggactggtcagcatttcctgttggttcttcataatcaggaaatcggatggttccatgttgattatagagtcgattttgtctcctttggtgattttttcctttaaaccgtctaattcgcgtaccatatagtcatggatagtccatttgtggacggtagcagtatcataagttatacggcgtgcggtcaaatgtgaaaccagttttttatcgacaaatttatccaaagagaaacggtttcctgtcttcattgcgttgttatagttatctatatatgcaatgacaccactatccacttccaactgtacgttacgtgccgtattctgctttttaggtttgatgtacctatcttcaaagttcaggcgcgtcacacttcctttaggaatcacatacgagcttaacatgaatgttgttaatgcaataatggcagcagaaatcatgtacggacgcatcattctcttaaaactcatgccggtagagaacatggcaataatttcagaattttccgccagtttggaagtaaagaaaataacggcaatgaatacgaacagcggactgaacagattagagaaataggggataaagttcatgtaatattcaaagatgattttactccaaggagcttcatgctccataagcttgtccatcttctcgttgaagtcgaacactactgcaatagaaatgattaatgcaatagcaaatacgtatgtccccaagaacttcttgatgatataccagtccagccgttttataaatcgattgcttttcattccttataatctagttgatactcttttaaccatcatcggtttccaagtagaaaaatctccggcaatgatatgtttccgggcttcacccactaaccatagatagaatgccagattgtgtatggaagcgatttgcattgccagcagttcttgtgcgtggaaaagatgacgcagatatgctttactgtatagagtgtctacgctggaagctccgtctacttcaataggagagaagtccatttcccattttttgtttcgcatattaatgattccatcttttgtaaacagcatgccatttcgtccgtttcttgtaggcatcacgcagtcgaacatatcgactccccgctctatgccttcaagaatattgacaggagtgccgactcccattaaataacgcggtttgtctttgggaagaatttcattgacgatctcaatcatttcatacatcttgtctaccggttcgcctaccgcaagaccaccgatagcattcccgtcggcacctttagaagctacaaactctgcagactgcttacgcaagtcgggataaacacatccttgcacgataggaaaaagagattgattataaccgtatttaggttcggtttcattaaaacgttgtatacatcggtcgagccacctatgtgtcaaccctagtgactttttggcatacgcatagtccgagtctcccggaggacattcgtcaaaagccatcatgatatcggctccgatcgtacgttctatatccatgactttttccggcgtgaaaatatgcttgctgccatcgatatgagaacggaattcagcaccttcttcccgtaatttccggattccggcgagggaaaatacctgaaaaccaccgctatcagtaagcataggacggtcgaatccgttaaaacgatgcaggccacctgccttttcaatcacctctagtcccggacgaagatataaatggtaggtgttccccagaataatctgcgctcgaatatcctctttcagttctgtcaggtgtactcctttaactgtgcccagtgtacccacaggcataaagataggggtttgtatttgcccgtggtctgttgtaatcaaacctgcacgggcattacttttagtgtctgtatattgtaactcaaatgtcattcctggctgggtttcttaacagataaatcaatggcgtccgccactttttcgtttgtcagagctattgcaaatacctcctttatgtcatttacatagtggaaagtcaatcctttcagatagatatcctgaatttcatcaatatttttcttattctctatactcatgatgatctccttgatgccggcacgtttggcggctagaatcttttccttgataccacctacgggaagcactttaccacggagagttatttctcctgtcatggcaatattagctttcacttttctttgtgtcaatgcggaagccaaagaagtagccatagtgacacctgctgacggtccatccttaggaattgcgccttcaggaacgtggatatgaatattccagttatcaaaaatatcttcgttaagctgcaaaagtgaaacgtgcgacttgatatattcaagtgcaagcatagcagattccttcattacatctcccagattaccggttaatgtgagacgtccgcccttgcctctgctcaaactagtttcaacaaagagtatttcacctcctacagctgtccatgccaatccggtcactacacctgcgtaatcatttccctgatatttgtcacgtgtatattccggtgcacctaaaaagtcatacaagtctgtcggcttaatttccgttttagcaaaatatccgtccgttgcatactgacgtgcagacttacgaagaatcttgccaatcttcttttccagttcacggacaccgctttcgcgggtatatgactctatgatagcttccaatgtttctttcggaagtttaatatcactcttctttaatccgttagcttccagttccttggggagtaagtgtttacgggcaatctcaatcttttcttccgtgatatagccgctgacttcaattagttccatacggtcgagcaatggaccggggattgtattcaagttattggcagttgcaataaacaagacttttgacaggtcataatctacatccagaaagttgtcgtggaaagaagtattctgttccgggtcgagcacttccaacaaagcagacgacgggtcgccctggcggtcggcactcaccttgtctatttcatccagaataaaaacagggttggaagcaccggctttgatcaagcttttgatgattcgtcccggcatagcaccgatatatgttttacggtgtccgcgaatttctgcttcatcgtgtacgcctcctaaggacatacgtacatattttcgttttaatgcagacgctatggattttccgagggatgtcttaccaactcccggaggaccgtatagacagataataggtgatttcatgtcacctttcaattttagtacagctaaatgttccaaaatacgctctttcactttttccagtccatagtggtctttattcaatgtcttctctgcattctttaaattcagattgtctgtcgtataaactccccacggaaggtttagcatggtttgaaggtagttaagctgaacactgtaatccggagattgcggatgagtacgttccaacttggccaattctttcaggaaagtttctctgacctccgcattccagcgcatacgttccgccttctggcgcatttcttcaatttcctgttcctgaccgctaccacccaactcgtcctgaatcgttttgatttgctgttgcaggaaatattcgcgttgttgctggtcgatatcttcacgggcacgcatttgaatagatgccttgatttcagccaactggacctcacggtttaagatttccaataggtgataagtacgttcacgcaatgagttaatgcttaataaatccattttctcatctttcttgaacggaagattcgaacaaatgaaattaaccaggaacattgaattattaatgttcttgatagcaaatgccgagtcctggtgcattacatctgacgatttgatataacgcattgtcaagtccttgcaggtttctaccaaagcttgaaattccttgtcgtctttacttggaacatcttcttccaagagttcaatttcaccttttaaatatggatgagtctctgtgatgtcttttagaatcagacgtttcattccctgaagaataacagtcgttgtttgatccggcatttccagcacacgtacaatccgtcctacagtacccacattatgtaaatcctccaacttcgggtcttccgtatgggctgatctttgacataccactgcgatgtccttatgctttttctcggcatcacgtataagcttgagtgaggattttcgtcctactgttataggaagaaaaactccgggaaacaacaccatattacgaagggggaggaccggaagaatttcaccagatttgacattcacttcaaatgcttgctcgtcgttgccatcatagtcagtaatcagcgagaagccattgttatcacctacatcttccaataagtatctttctttcatcttttcgttttaatttagtttatgtcatacaaatatgcataaatcgtttgcaaagttaattgattctctctaataataaagcactgttagaataaaaacacaaaaacaatgccaaaatatagagcgatcggagaagtattccataataattatttatttttggcgatttccagtaaaatagtagaataaaacaggtttaaaaacaagtgataaaatgtcaaatccttattttcaatttaagcagtttacggtatggcatgataagtgtgctatgaaagttggtacggacggggtacttttgggagcgtggacttctgttcaaggtgcgcatagtattctggatgttgggacaggaaccgggttggtcgctttaatgttggctcaacgtagtttgccgaatacaaatattgtagcattggaaattgatgaagctgctgccaggcaggctaaggaaaatattgttcgttctccttggaagaagcagatagaagtagtacaggctgattttagaaaatatcaatctcctgagaagtttgacgtgattgtttctaatcctccgtattttgttgattcattaggatgtccagatcaacaaagaaattctgcccggcataatgattctttgacttatgaggaattattggaaggagtaaccggtttattgacagaaaatggtacttttacgattgtgattccgatggatgtagctgatagagtaaagatgatagcttctgaaaagaaattgcaggcagtccggcaactaaatgtgataactaagcccggtggtattcctaaacgtactctgattaccttttctttttctaatcaggaatgcattgtggaagaactattgacagaagttgcccggcatcaatatagtaaggaatatatagcattgactcgggaatattatcttaacatgtgagtaggggatttgtattctctcgatattaatgtatttaaaatgataaatagaaagaatctgatatcgcaagtactatagcttttctcgtcttttcaatagaattgatgcaataatgttttttatgatttttaagagaaatcgttttttaaagagattgacttctaaaacaatcataaaagacagaggatgaattcaccctctgctacccaagctgtttgtatcaggatttaattcttttacagcctcttctactactttcttggtcggcttgcgataaacctctgcctgttgtaccggcattatctcattcatcattctttcatatcctttttgttctaacaaatgaatttctttttcatttgtttctttttgttttcttgttttcatatggcttttattttttaagtttctactttgaaaacagaaaacagcaaaagatagttcattttactagaatatattttcgattaattcatctcaataaacgcattaatacatatctttgtccatgtaacagatccctctttacttaaattatgaaagaaaataagtatgatagtcttcttcaagcaggatttgaaatattcgaattaatagaaccacaaccgaacgaagtgatgttgaacactattccggaaatgaaagatgagcttcgacgtcctatgatgcttttgatttctgccaaaaagaaatattgaaatgcaaacgaatgaatttcagggtattgaaaaataataagtaaaaaacatccgtttagctattgtcaattaaaaaatactccctatctttgcaccgcttttgaaaagaacaatccttcagaaagtagcggggtgtagcgcagtccggttagcgcacctgctttgggagcagggggtcgtgggttcgaatcccgctaccccgacgaaaatattaagtcaagaaatttagaaataaaaagctgatgcatactatgtttcagcttttttggttttatacaaatgataagttgattctactttgtttgtgacagataaagaaggcaattctttgaattatctttgaacttgtttatagatatatatttctatttgttcatcatctataatataaagcggtgctttaggagagataaagcatagctttacgatatctaaagctatgggttatgaatcagaaacagatactttcttttatttatcggggatagaaggtgaagacctctctttcatgagtttttcatattatccacaagatacacaaaaagactgcaattatttaggaaaagtgagaataaacttacttcctttacctgattctgattttacattaatactcccttcatgtaaagtcataatttgcttacataaactaagtccgataccggaaccggatgttttggtagtaaagaaaggtacaaatatcttatcaagaacatcgggcaaaataccttccccattgtcagatactgtcagaagcttattgccagcaggcgaaattattacttctacccgaatatccttatcagattgcctaccacaggcttcacgggcatttttcaataaattgatgagaacttgctctatttgagcccgatctatatataaggttaggtctgatgaagggatttcaaaatggatatattcttccgggaataatttctttaaatccatacacagttccgtgatagaaactttggtgcagacaggagtagggattcgtgtcaagcgacgataattttcaacgaactccaataatcctttgcttcttctatgaatagtctgcatggcttgtaacataatggaatattctttttctccaagcagtttgggtatccccctttcgctcagtgtttctgaaagagagataatcggtgtgatagaattcattatttcatgcgtcaatacacgtatcagcttttgccaggcttccatttcatttcgttccagtacggaatggatgtttttcaggctgattatttgttgctcttttccttgtgttacaaatttcgtacaagaaatagccatttccaaaacagtgctgttttgttcaatacgaataataggaatatcattaattgcagaagctctcaggagtgcttccggtaattgtgagatctgtcctaaatgcgtgacagcagcttggttcatccattctatatgtccggctttgtcggtaacaagtacggctgtatctaccttatttaataagttttcgtaatattgatgtttgatttcctctgctaataatcttccccgaaaatcttttaggctctctgaaagttcttttgcccactcattcattattttatttttaaaaggcgggtggaaagtttgcatcatgtcattgtatcgaagtccgtctgtcagccgtctcaataaaattatttgcttgaattgcatacggtataggtgtataccaaaggttattaatagtatgatgcagataacggtactgaaccataactgtttttgaaacaacaggcaacttccgatagaaagcagcattataaataagatgtgtaaaatcactctgattgcaaatcgtttcataggcctagtttttcaagtttacgatatagggcaaaacgggttatgcccagatactcggcagcacgggagatattcccttcgctgagtttcattgctttctcaatagtttgacgctccagttgttccagattcagtatcatttcttcttccttcctctgtttaggactggcatggaaaagaaaattttccggttttaataaagagccgtctcctaatataacagcgcgctctattgtatgctgcaattcgcgtacatttccgggccaggcatactttaacagtttgtttttggcttcccgagtcaggccacgcatatcttttttatatttacgtgcataccgttgtagaaaatattcagctagtagaataatatcatttccacgttcacggagtggaggaatatgtatttcaatggtgttgatacgatagagcaagtcctggcggaagtttccttcgtccactagttgacggatgtccgcgtttgtggcacaaatcaggcggacgtcaataggaacagcctgcgtactgcctaaacggttgatttgtcgcttttcaatagctgtcaataacttcgattgcataggaagtgaaagattaccgatttcatccagaaacagagttccgttagtggcaacttccattcgtccggcttttgatttttttgcgtcggtgaaagctcctttctcaaatccgaacagttcgctttcaaaaagttgttcgggaatacttcccaagtcaatagtgacaaaaggtttgccgtatcgaggagagcagcgatagagaagacgggcgattacgtcttttcctgttccattttctcctaaaataaggatattggcatctgtgctgcttaatttatttattgtggtgaaaacttcctgcatggcaggagattctcctataatatctccttccgaagaattctgaccgctaagtaattctacctgctccttcaaaatgtttacttcccgttgagagtgacgtaatcgcattccggaagtaagagtggccagtagtttttccttttcccacggtttggggataaagtctgttgcaccggctttgatagcccgtactgctttatcagtatctgcataggcagtcataaagatgacaatcgcttgcggatcgattttcaatatttgcttcaagctttcgaatccttcctgaccactaatagcgtcacggctaaaattcatatctaataaaataagatcaggttgaaaagtggtcatgaaatgttcgattcggtcgggagtggtggctacctttattttttctgtgtaaggttccaacagcaggtttagagcgaagaggacatcttcgttatcatctactataagtatctttcccagtttgtttacttcttccattcttttagctaattagaatataatctttttcctttactgcaccggcaaagatatggataataatcatgtgttgtatgtgcgattacgcactattttcgtgcgtatttgcacgctattttaaaaagaaaaacaagtatatttcattgatatacaaatatttatataaatggcacaggttttgaattataaataacaaataaaactaagaatgaatctgaaaataatctgcataagtattggaatcctggcgacggaattattggctgctcaagatcagacaacagaactgtcattggaacaagttgtgaagattgctcgtctagagtctcccgatgcgcagacggcacgtcatagcttccgttcggcttattggaattataaatattatcgtgccaattatttaccgactttgaacttgacatccgatcctaatctgaatcgtgccattaataagataacaatgggggacggttccgttaagtttgttgagcagaatttgttgaatactgatctgactttgaatctttcacaaaacataccttggacaggaggttccttgtttcttgaaacgtccgcacaacgtatggatttgttcagcgaacataaatattcgtggcagacttcacctatcatgataggataccggcaatcgcttttcggctacaatagtttgaaatgggataaacgaatagaaccggtacgctatcaggaggcaaagaaaagctatgtagagacattagaacttgtatctgccaatgcgattaataaattttttgctctagccactgcccaaagtaattatgacatagcatcctttaattatgcgaatgccgacacgttatatcgctatgcacaaggacgttacaatatcgggacaataacggagaatgaaatgctgcaactggagcttaaccgtcttacagaagaaacaaatcgtatgaacgcccgtattgaaatggataactgtatgcaggaactccgttcatatctaggcattcaggaagagagggagattcgtgtacgtgtcagttcccggataccggatttcagtattaatctgaatgaggcgctagcattggcgtatgagaatagcccggatatacaaacgatgaaacggcgcaagctggaaagtgaaagtgcggttgcgagagcccgtgccaatgcaggtttgaaagcagacatttatcttcgtttcggactgacacagacagcggataaattaccagaggcttatcgaaaccttttagatcaacaatatgtaagtttaagtatctccctaccaattttagattggggacggggaaagggacaggtacgggtagcccgttctaaccgtgacctggtttatacgcaggtggaacaaagcaggacggattttgaactgaatgtccgtaaactggtgaagcagtttaatctgcaaacgcaacgtgtccgtatcgctgcccgtacagatgaaaccgcccaacggaggaatgaagttgcccgtaaactttatatattgggaaaatctaccattcttgatttgaacgcttccatttcagaaaaagatagtgcacgccgtaattatgtatcggctttatacaactattggagtttgtattacacactccgtagcatgacactttatgattttgagagtaacaagttactgacggaggattataatctcctcattgaataggatagaatgattttttataattgatataaatataaaaactatataacctcatggatataaaattagaaaagaagccgtggtacattcgttatagatactatctgacaggaggacttttgtttatctcctttctgatttatgtaatcgtcctttcattaggtcccaggaagctgcgtgttgatgccgagaatattcagatagcggaagtgaaagatgctgactttatggaatatgtagatgtagaagggctaattcaacctatattgacaattaaagtcaatacccgcgaagcaggaagtgtagaaagcatagtaggtgaagaaggcagtttacttcagcaaggtgatactattcttattctttctaatccggacctacttcgtaacattgaagatcagcgtgatgaatgggaaaaacaaatgattacctaccaggagcaggagattgaaatggagcaaaagagcctgaatttgaaacagcaggccttgacgaataattatgagcttgagcgtctgaaaaaaagcattgctcttgaccgtgaggaatatcaaatgggagtaaagagtaaggcccagttgcaagtagctgaagatgagtataattataaacaaaaaaatgcagctttgcaacaggagagcttgcggcacgattctgctgtgacaatgattcgtaaagaacttatccgcaacgaccgagaaagagaacggaaaaaatatgaacgcgttcatgaacgtttgaataatttagtggtaacggctccgataaaaggacagcttagctttgtgaaggttactcccgggcagcaagtgtcttccggcgaaagtattgctgagataaaggtacttgaccaatataaaatccatacttcgctcagtgaatattatattgaccggattactaccggattgcctgctaccattaattatcaagggaagaaatatccgttaagaataacgaaagttgtccctgaagtaaaagaccgtatgtttgatgtcgatcttgttttcacagatgatatacctgataacgtaagagtgggcaagagtttccgtgtacagatagaactagggcaaccggagcagacgcttattatcccacgcggcaatttctatcaggctacgggaggacaatggatttataaggtgaatgcttcaaaaacaaaagctgttcgtgtacctttgtctgtcggtcgccaaaatccgcaacaatacgaaattacagaaggtttacggccgggagattgggttattacgacgggatatgatacctttggcgatgctgaggaattaatattaagataaacagacaactttaaacagatagtatgaaaacactgaaatatgcagtacgctttttattacgtgcgaaatcatatacgactatcaatttactcggactgacacttagtctagcctgttgtattatcttgtcccgttatatttatcgtgaaacaacagtagatatgcattgtatagaccgtaatcaggtatatggagttcaagtgtcgtttgatggaaaccgggtgttgagtaaggcagaaataggaaagcgtgatagtacttatatagatgacaatgttatactgacacgttcaagtgtaatattgcttgagaatgattatgtagattatcagacaaatcgtttttctgtacatgccttaatagctgacaatgcttatttcagactttttccttatcaagtattgcagggagagatttctttggaagttccggaatcagcattgttaatggaagatttcgccaaaaaactttttggtaaagaaaatccgctaggtaaggtgttacgtttttctaacggtaaagatatcaaggtgacaggtatattgaaaaagccggtaaataaacaaacattcaatttcgatatagtactttctcatgcattttcgacagactggggacggatgcctttggagtttattcagtttacttctgagaaggcagtggaacaagccaatcaaatagggagttatccccggtttataaatcaagattctcgtttcggagatgttcgtaaatacacattctctcttattcctgtcagtcaaatgtattgggagcaagcattactttaccaaacagggcctagtatgcttgttagtgggaatcgttctcatctattcattcttggaggaatttgtttattgatactgtttgccgggattatcaactttattaatctttattctgtattaatggtgaaacgagggaggacttacaatcttcgaaaagtattcggtgccagtggcaatacactgtttacgcaaattttcacagaaaacgttctactgatagccgtttctattgtgtttgcatggtttattgttgaaataacatctgtttttgtatcccacttgttggatagccggatagtctatactaaattcgactggatattgtcgatatctatcctgatattcctgtctttgactgtaagcctgtattcacatataaaatgccagcgctctttaccggctgttgctctcaaggcattaggtaccgataaacgttctattcgttttcgtatgatattcctttttgtacaatatgttgttacctttttattggtcttactttccatctattttaataagcaattcaatttgatgttgcagacagatccgggattccgtacaaaagatataattcaggcaaatatgatatatgaatcgaacgattattcttcgtatacatctgaaactgtaaaccaacgtaaagaaagagttttagcgatagatcaactgatagataattgtccggatatccaaagctggacaaccggtttttattctattcttgggtttgattattctgcaggatttcgaaatgcaaaaggagaactggttacgttgaatcagagttatgttaccgacagtttctttaaactctttgagattccttttattgaaggagatttatcggaagcagataaagaacaaggaggtgaaattatagttgtcaaccgtgccgcattggccgctttaggctacacaagttgcaagggggctactataattaatgagcagatgagaaagataaaatccgatttacaggcacagcctattggtgccgtaatagaagattattatgatagacatgtaggattgggtgctcgccctatggtatttatcgtaaataaacggttgaagggagattactatcagattgcttgttatccggggaaaactcaggtagtcatcaattatctgaaagatattcagaaaaaagtatatggtacggaagactttaaatattcactattggatgatgatgtggcggcactctataaaaacgaccggcgaatagccatggtatatgctatttttgcatgtattggaattataataatctgtctcggattattcggtatttcattatttgatattcgtcagcgctatcgggagattgcaattcgtaaagtaaacggtgcattggtgaaagacttgtacttgctgcttggatgtaaatatttggttgtattgggaagcgcttttgcggtatctattccattgtcctgctacttgatttatcagtatactaaagctcttgtgataaaagctccgttaagcatgaatgtctttctgatagcattgctcgtagtaagttgtatctctttaggcacactgtgctggcaaataaaaaaggcatcacgtattgacccggccaaaataatgaaaatagaataaaaataataatatatgatacgacactatttgaaagttgcttttcgtaatttactgaaatacaagacccaaaatataatttctatcatcggtcttgcggtaggattactatgtttctgcatatgtatgtattgtagtcgttttgttgagaccaccaaccattgtttcagtaattacactcgcattgtggaattaaacctttatgattatcagacagaaacatatttttccggtacacaagtggctttatccgaagaactccgcacatgggcaatgggagaggtggaagcaatttcttgtatgacatactcgcgtgaacgttcttatcttgccgaaatttcagaggaaaaatcattaccatacgaacttgaaacgatagaaatagatactttatacaataaggtattcactccccaaatagtagccggaaattggaagacggcaagccggacatctaatgccgttattttaagtgaatctactgccataaagatattcggtaaaatagaaagtgctatcggcaagcatctgactctggcgcgacgactccatacttcgcctgaaagtactccgaaaacaggaggtattgtttatacggtacaggcagtaatgaaagatatcccgctaaacaatggttttagttttatgacgcatactgatgcaatggttctgaacgatagcgaaggacttttccgaagtacgaaacgtcacgatatgacaggagccagaacctatgtcttgctttctcccaatacgaatatagctgaactggagcagcagtttgctaagcgtaattatagttatactatgtataatcagtcttatgcggttgttgctaattatattagcgacagggcacagaagaaaggtgcttttgtgttgggatgggtgacaggaatagtcggtacattgatattactggtcggactaatcaatttctttcactttctgatcggttcttttcttaatcgcactaaagaatacagtattatgaaaatggcaggatgtaattggaaacaacaattctgcctgctgtttgtacaatcattgattgtggtggttatatcttcctttttagtaatatggggaatagaattgattggcaaccgaatggatttttctctacagggcattacaatgacttttccgcccgaaattcttttgatacacgctatgcaatatatcattcttcttatattgctctgtgctgcaatttgtctgtttgtatctgtccgtattcgcagaatttcgatacaaacaggcattcatggaggagtaaataaacgtcgaggtaagcagtggggacgtaaccttatgctgggaatccagttctttatctgctggatatttgtatcattcactgtcgcattgtttttacagtcggagaaaacaacccaaacattgtttcatacgcttaaccaaaaagaaaaagaagcgattcttagcattccattagactattcgtttatgaaaaatgaagagaagttaagtgtggtagaacgttttcagcaacatgcaggggtaaaagatgtcttattggcagatattgcttatacacaaggagtatccggaaacctgttgatgaccgagaaagggaatgacaactcctggactgatatcaatattatgtgcgttccgctgaatttctttgcttttatgaatattccgatagaggagggcagaactatccggacaaaaaatgaccttgtcatggataaagtatggcaaaacaaacaaaagaagaatgtaattggaatgaatttttatgaccaaaataatgattataccgtatgtggagtttgtactcctttccagactgatgtccattatcatagtggcggctatgcttttatgctctatgatccttctgaatatgttggccattgctatgtaaaatgttaccctgaacaacaaaaagaagtcgtaaagtggattgagaaaatccgtcgtgaagtacttccggagaatatatcgtatcaggttcgtacatttcaagacgacctgtatgaaatacaggctatggaatatatgctgaaagatactatcctgtttttcgcaatcgtcagtatcatcattaccttgttgggtgtatattccagcattaccctcgatactgaacgtagacagaaagaagtggctatccgtaaagtaaatggagccggaatgtcgcatattatctggttgtttacccgtttgtatataactttgttgatggttaccgcagctctatcctttccgttagtatacctagtgttacagctatggaaacaaatatatacggtattctttaactgtggattctggttctggacagggatttttatatctgttgctatgataacggcactaacgatttggtttcgtatcttgaagattgccagagttaatccggtggagtctatcaaaaatgaataggaaaaccatatttgaattagaaaataaaagaaaacaaaatgatacagcactattcaaaagttgctttgcgcaatttgatgaaatataaaacccaaaatcttatatcaaccataggcttggctgtgggactgctatgcttcagtatttgtttctattgtagccgctatatgcagagtgttgaccaatgttttaataattatcatcgtttggtagacatcaatttagctgatgaaggtaggatgttatccggtactcctgcaatattggcggagaagttgacaaaagaatatggacatgaagtagaagcatattccagagttgcttatgcacggcaacggccttttgatgtgtatacaaatgatgaaaagaaactaccctatacatttgaatgcatagaagtcgactcgttttttaatcgtttgttcactccgactgttgtggcaggttcgtggagagtggcagcctatactcctaatgcggtagtaataacagaaagtacagcacgcaaattatttccatataatcaggaggctatcggtaaacgtatggtgatgacaagcaaaatatggtcttctccgaaaacaactcctgatagcggaggtatctcatacacaattcaggctgtgattaaagatattccagccaatgtcagtatgaacttcatgcggacaattgaagttctcattctgaacgatagtgaaggattatttaaaatgaccggtaataatgaccagacaggcgtttatacttacggattgcttcatgaaggcagaacagccaaagatttaaatgaagtgtatagaaagagtaatgtcactcaccgaatgtttaattgcgattatgacctgattgtttctcctattggaaaaagtaatggcaactctgacatgataaccatctttagctcaataactagcattgtagcagttttaatcttattagttgctttactaaactttttccattttcagattggaagtataatcaatcgccaacgggaatttacaattcggaagataataggaaatgatatgtttcatctggcaatgatgctttttgtgcaattgtttttggtcattgtaatcgcttctttatttatgttcggactcatagaaatattgtcttccggaatgcatatttcattgtctgatttaagtttgtccattgatagagagcgtttgatgttacaagccggacaatatattatcattcttctcatagcaacatttgtgatctgtttttctgttgctttttatatccgtagggtaaacatacaattaggcatgagcaatgggcttaaaagtaaaaagcatttctttcgtaatagcatgttaggaatccagtttttcatttgttggctattcgtttctatgactgtcgctctttatttacaaacaaatactacaatatctacgctgtacaatacgttgactaaagcggagaaaaatagcatattaagtcttaaattggactatacttttatgaaaaatgaagaaaaagttgcgcttgttgaacgtatccgacagtattcaggcgtgaaagatgtcttactttctgaagacggttacttaaatggtagtccggatcgtacaggcatacaattagataaagactcggataggtggctggaaataaatataatgagggtaacgcctgattttatttcttttatgaatatccccttgtcagcaggacaaaatatggaaggcaataatgatatattggtcgatgaaatatttatgaataaaaaagaaaatatactggggactactctttatcattataaagacgcttatactgtacgcggtatattgtcttcttttactccctcggtttatgcttataaagaggagcagactccttatgttttctttcctatgaaagataatggaaatgtaggtcattgttatatcaagtgttacacagataaaaaggaagaggtccgccaatggatgacccaacttttgcaggaagtgttaccggaaagtgttgagcccgaaataacaacttttttggatgatatcattgaacaacaggccatggaaactaaattcaagaatataactttatttttctctattgtaagtctgattataactttattgggagtatattcagctattactcttgacaccgaacgtcggcagaaagaagtggcaatccggaaaataaacggagcgggaataaaacagattatcttactgttttcccggttgtatatgttacttttgacaacatcggctttattagcttttcctgtggtatacgtcattctccatatgtggaaagaaatatatcagatattctttaatgacgggatattatattgggtaggaatatttgtaggagtaactttattgactgcactaaccgttatctttagaatcctaaggattgtacgactcaatcctgcggaagttatcaagaatgaataaattcaataatttttaaatagtacaattatgattaaaacaattaatttacagaagattttcaagacagaagaagtggaaacttgggcattgaataatgtcagtattgaagtgaaacaaggtgagtttgttgctattatgggaccttccggctgtggaaagtcaacgttacttaatattctgggactgttggacaatccgacaggaggagagtattatctgaatggaatggaagtttcgaagtacacggaatcgcagcgtacaaatctccgtaaaggagtcattggttttgtatttcagagtttcaatctgatagatgaactgaacgtatatgaaaacattgaattacctctgctctatatgggtatctcagcttccgaacgtaaaaagagagtggagactgccatggaacgaatggctattactcatcgtagcaaacatttcccccaacaattgtcaggtggtcagcagcaacgtgtcgctatcgcccgtgcagtagttgccaaccctaaattgatccttgccgatgagcctaccggtaatctggactcaaagaatggtaaagaagtaatggggctattgagcgaattgaataaggaaggaacaacgattgtaatggtaacgcactcccagcatgacgccggttacgctgatcgcgtcatcaatctgttcgacggacaagtagtaactgaagtcagcatgtaacattaaaagagtatgatgataaaacattatctaaaagtagctttccgcaatctggcgaaatataaggtgcaaagtattgtgagtattttaggattggcagtaggctttgtatgctttgcattgtctactttgtggattcgttatgaaatgacttatgatacttttcacgaaggtgcggaacgtatttatctggtgcgtgcacattatgcacatgaacctggtaagatatccaattctactccttatcctttagctgattatttacagaaaggtaatccggaaatagaggcaatggcttctacttccgtacagaaagttaaatttcgtgtgaaggatactgagaaggatgttgtgtcggctactgcagattctgttttgatgaacttttttaatatacgagtattaagaggaacagtgaacttcttgaagggaaccaatggggaaattgctataacagaagaattttctaaaaggatatttggagaggaagaggcattgggtcgggaggtagaggttagtggacatgcttctaaagttggagcaatcgtgagtggctggtcttctcattccaatattccatatagtatattaacttctgccagacattatacacaatgggggagtgcgaatgaaaacttatttgttcgcattcgtaaggggacaaatggggaagaatttcagaaaaaaattgctgctctccgtatcaatgatattgagaaggaaaatgaattgggagagctattattgaccccgctatcggctttacgctattccggttatgtatctcgggaagataccgtgattacttttagctatatcttatatttttcattagccggtggattggtcattatctgttcgttatttaattatttgactctctatatcagtcggttatatatgcgtaggcgtgaaatggcacttcgcaaagtgaatggagcaggtaataaagatttgtttgttcagttgaccgttgaactattgattgttcagtttatagctttggtagccggattgttctttattgaaatatgtatgtcccgtttcctcgagttcacacgaatagctcccaactcttattatggagagattttagtatatctgtttattgtgatagctttgtctcttttgttggctcagataccactatatcattttcgtcgccgaactttgcaagacgctgtcaaagggaaagtttcagtaaacagaccgtatgctttccgtaagttcgggattgttatacaattgatagtcagtcttgttttcatattctgtacagtggttataatgaaacagatttatttcctgaagcatacagacttaggaatggaacgtcataatattgccaatgttgcattatggagaggtgatataaaacagtggggcggtaagatagcagctttacctatggtgaccgaagttctgcctccccgttattttccgattatccctaccggaccaatgatgtatgcggaaatgaaccattgggaagatatgcctgaagcagtagaagaacctataactattggcataatgcctgcaatgaaggatttctttgatttttatgatttgaaattaattgaaggcgaactgctctcagaaaagaatgctcccaatgatattgtaattgatgaaaatacacttcggatatttggttggaaccaaggagtaggaaagactttgggatatgagaaggatggcaaaattcttcattcatatagagtggtaggagttgtccggaatttctgttatcaaccgcctacaagtattccgggatgtatcgctttacaacaacctcaagcacaaaattatctgctgtttcgtgccagtattttgtttaaatttgaggaaggttcctggcacgaatgccggaaagcgattgaggtcatgcataaagaagattttccgaatgcctatttacgattgtttaatgaggaggaagaatatgataagtatctccgttcggagagtgctttaatgaagctgttgactttcgtatcattagtttgtattctgatctctttgttcggaatattctcattggttacattatcttgtgaacaacgtcgtaaggagattgccatacgtagagtcaacggggcacaggtatatcatattcttcatctatttttccgtgagtatttattgttgctggcaacagctgttataatagcttttcctatcggatacgttttaatgaaacaatggattgatcggtatgtaaggcaaacgccgattgaggtatggatatatgtagctatatttggaattataggattttttatcttactatgtataggctgccgagtatggaaagctgttttgcagaatccggcagaaataattaagaatgaataataattaatggtgatattatgattacacattatttaaaagtagcttttcgtaacttagtaaaatacaaaacgcagacacttatcagcataattggattatcggttggttttacttgctttgcgctttccgtattatggattcgttatgaaatgacgtatgataattttcatgaaggagcagaccgtatttatctggcaggtgataaatttgatttgcaaggagacggattctcttattattcgtcaagtttgttggctgattatataatgaaaaactgtccggaagtagaaaaggcttgccatataatacaaaaaaacataatacccattgaatatgagaaaaatgtatatcagacacaacaattaagagttgattcaaactttgtctcaatctttaatattattgtattagaaggaagcaaccgtatgagattagagaataaccagattgccattactgataaaattgctaagcaaatatttggaactgaatctccgataggtaagcaatttatatttcctaatacaaataatacaaagatgacaatagttgcagtggtaaaatcatgggaaggtcattctttatatccttttgatatattattaccttatgaggatcaagatccacattgggggagtcaacgaagccatacacttttccgtatttaccctaatagtgatataaatgcattggagaaaagattggctaaatatgaagtgcaacaagactcatataaacagttaatgtctactcctattgctttattatctaccttacgaagtacatatccgagagaagatgttaatgtcaaattgaatcacattcgtctttttgcctggattggagctttggttattatttgtggattatgtaactatttaacaatgcttgttactcgtattcgaatgcgaaaacgtgaattggcattacggaaagtaaatggagcttctaatggtagtttgctgtcattacttctttgggaattggtattgttactcattgtatcatcgggattaggacttatgataatagaactcattttaccgggctttagatctctatcacaaatagccgaggatacttcattctattatagtgaaacgcttatgtatatattattattaatattgataactataagtctggcagccatacttatccgatatgtcagcaagcagtctttgcttgatagtattaaacataaatcaaatcttcatctttccggttggttttataaaggaagtgtttcctttcaattatttgttagtattggtttggtgttttgtactatggtgatgatgaaacagctggattatctattgaattcaaaagaacttgggttgaatagacataatataggagttatagcttccggttatggatttgaaggtgttccttttaaagaaattctggaacaaatgcctgatgttatagaatgtttatatggcttttatactcctattcctaaaatgtcattttatagttatgaagtgagggaatgggaaggacaggcggacaaagaacaacgtatcaagttagagaaggaaaccatcaatcaggattatgctaattttttccaagttgaagttttggaaggtaatatgttggatgaaaaagacgggaaagaggcggtccttataaatgaagctgcggcaaaggcttttggttgggatcatcctattggaaagaagatacacctgaacgaaaaatgtatagtaaaaggggttattaaaaatatttattataatgccccgatacatccggttactccagctatattcttcttgccggacaacaagcaaaaaagtgaaaatagaggtcatttgatttttaagtttaaagagggtacctggaaaaatgtttctcaaaaattgagagaagaagcttataaagttaatccgaatgcagaattacgtttgattaatatggaggagaaatacgatgagtacatgaaatcggaaaattctttaagtatgctattgagtattgtttcctttatatgcatagcaattgccgtattcggcatcttttctttagttactttatcgtgcgagcaacgtcgtaaagagattgctattcgtaaagtcaatggtgccagtataggaacaattctgaatttattctttaaagaatatctgcttttgcttatcattgcatcatgtatcgcttttccattaggatacgtcattatgaaacattggcttgaaagttatgtaaaacagactccgataagtctttggatatatggaggaatatttattgtaatgcttcttatcattttcctgagcattatttggagagtatggaaagcagcccggcagaatccggcagaggtgattaaaagtgagtaagaatattatttaataaaagcaatatgaagaatcagttatcagctatcaaggccctgtttcgttttagaatttatacgataataaatattatagggcttgcgattagtgtagcggcaacattaataatcgtacgttatattcatcaggaagtgaccgtagaccacttttgcaaggatctgaatcaattatatatattgacagctcaaagaagtaacggtcatatttcaataattgacaatacggacaggaataatgatcctaattttattgatccgatgaagaatccggaagtagaaaagtattcatattgcatttcttttaaggatgattatatcatagttgatgatcaccgttttcaagccaatgttttagtgaccgatagtttctttctacaactaatggattatcctgtcatttcaggcattaagactattcaacgtccggatgatgcgatcattacccgaaaatatgctaaacatctttttaaggatgaaaacccgcttggaaagcaacttgtttcttccgcaggctatacacttactatacggggaattgtagatgaaccggataccaaatcctctttgcagtttgatttgataactcctgtgaatcagggaaaatatatggattggagccgaatgggattttgtataacacgtttggttaagggtacggagttggctaagtttaatgaaaaaatctctaaaccacagtcattgatttgttttagtcattcacctatacaattcaggctttttccattgaaagagctatattttaataaggtggtaagctctgcatccggtttcttcttaagaggaaataaagaacatgttattgtgttgtctgttgtagcatgtatgctgttgctggtcggaattttcaattttatcaatatctacacggttattatactgaagcgggcgcgtgagtttggagttaaaaaggtgtatggtgcgagtggtattcaagtattttcccaaatatatgcagaaaatctatgtatggttgctacttcaatgctgattatatggatgctgatagaggttacagcagggttattcgcaactgtatattcaatacccgtgaaaccggatctaaagtttgatttactactgtctcttattatattattcgggttaccgttaattacgtctatctatccctttttaagatacaattactcttcacctatcacctcattgcgttcagtcagtgtcgggggacattccattgtgtctcgtgcattttttctattcgttcaatatatcatcactttctgtttaattgtggtttccttgtattttgtgcgccagttatatactatgcttcatgctgatttgggttatcgggcaaaggatattatatcttgccaattcctgtcacacgagacacaaaacaggaggtatgcaagtgatgaagaatggcagaaagagcacgatttggaacagcacaaagaacaagttattaagcagaaaatgaatgcgtgtcctttgttcgttacatggagctatggtgaaattcctataaatctggaaccttacattaacttggaagcggataacggagaaaaacataaagtagcccttatgaatgccgataaagagtatatggatatgttcggattgaaactgaaagaagggagggagtggaacgacaaagatcagtttgcccagtataaaatgattatcaacgaaacagctaagaagttatttcaaataaagaatatagaggaggcttcattacagccggaatcacgtttgtggtggagtatgggaatagatgaagggaaaaatcctcctttcgagatagtaggagtaatagaggattttcggacaggacatttggcgaaaggagatgctcctttagctatattatatgataaaggagataatcctactaaccctttgatagcgacaattgtggaaggaaagcgtaaagaagcggttgattttctgaaagagttgcatgatgaagtgttgggacagggagaatttgattactcgtttgtggaagatgaagtgaaaaagttgtatgatgaagataaaagagccactcagatctatgtcacttttgccggactggctatctgcatatcctgtctcggcctgttcggtctgtcgttgtatgatattcgccagagatatcgggagatagccttgcgcaaggtaaatggcgctacaggcaaacaagtggccttattgctggtacggaagtatctatatatactgggggcggcatttgcagttgctattcctttggcctattatatcattcatgattataccaaggactttacagtgaaagctccagtcggagtcgatatatttataacaggttttattcttacattaataatctctttaggaacattgttatggcaggttcgtagggctgtccgcatcaatccggcattgataatgaagagtgaataaatacaatgttttttgttgtttttagtttaaaagacaattgaataaattatctttgcactattccaattttatatcaaataggagaatgtgtatgaatagaatgaaagtttttttattgttggcagttatgattggttttagttcatgccagtcgagaagtaaacaaaacatagagcaggaggtagaagttgacagtttgtcgactaacccaactgaagagataaaaataataaccggagttgtaaaggacgcttcaatgaataactttatgctaattaccttgcaaggagatacactctttattagtacaatggatcaagagccaaacgatgtagcaggctttgagttaggagatacggtgagagtgaattatatagaagaggaggaagaacccgggttaaatactataccgaccgctcaaaaagtgattgtgataggaaagaaaaaccggaatcaataaataattaatctaacaataacgtagaattatgaaaaagaaaatgttggcaacaactttgttgacagggctattggctgcatgtagtggaaactctgcttccgtcacaggagtatggattgagcctatcccaggaatggaagaccaagtgcagggtattaaactggaagaaggtggtattgcatcttccgttaatatggctacattagtttataaaaattggaagcaggaaggtgatcaactgattctggcaggaaacagtattggcaatgggcagacaattgagtttatagatacaatgaagataaaaaaaataacggctgactcgttagttttggataatcggggaatggagattcgctatgcgaaacagaaatgatgtaatttaatatgtgaacatacattttatccaataaataaaaaaagctacttccctttttatggaatcaggaaagtagcttttttatatgattctaatactgattacaaaatatccaaagccttgaatgcttttactaacttctcaacagcacggtcaatctgctcttttgtatgagtagccattaatgccacacgcaccaatgtgtcttgtggagcacatgcgggtggaataaccggatttatgaataccccttcatcgaaagccagtttagtaaccatgaaagtcttgtctgtatcacgtacataaagaggaatgataggtgattcggtagcaccgatttcgaaacctgcctcacggaaacgtttcaaagcatagttggtagcttcccacagagcttcgagtctttccggctcattctgaatgatatgaagagcttctaaagcagatgcagtagcagccggagtattggatgcactaaatatatatgtacgagcattgtgacgcaaccagttgatgatagaagagtcagcagcgataaaaccaccgatagaagccaaagacttgctgaaagtacccataatcagatcaatctcatgagttaatccgaagtggtcacaaacaccgcgtccctgctttccgaatacacctaaaccatgagcttcatctaccatgatagtagcattgtacttatgtttcaaacgtacaatttcaggtaagtttgccaaatcgccttccatggagaatacgccgtcaacgataatcagttttactgaatctggattgcacttttgcagttgcttttccaaatcagccatatcattgtgcttatattttaattgctgggagaaggaaagacgacgaccgtctacgatcgaagcgtggtcacgatcatcacaaatgatataatcattgcggtctgtcaatgcaggaataactccggaattaactgtgaaaccggttgagaaacaaagcgcttcatctttacctacaaaggcggccagttctttctccagttggacatgcagatcaagcgtaccgttcaaaaaacgtgaaccggcacaaccggaaccatacttgtgcatggcttgtatacctgcttcaataactctttcatctcccgtaaggccagtgtatgcgttggaaccgaacatcaacacttcgtgtccgcccatttctacttctgtaccctgtttcccttcaatctcacggaaatatgggtaaacgccctgtgccataaacttttgtggcaggtcgtacttagctaacttctcttgtaataatcccatgaattataatttattatactcatactcagatcactcgctgatgatctaataatccttttttcttaacaagtgtttaaa

SEQ ID NO: 3062 - DNA, 34150 bp, Unknown
  gut microbiota DNA sequence
ttagaaacctctaatagattaaaatttaatatatttgtattacttttgtcgtctacaatcgacaagaatagcatgaacgaaagaatgaagaaaataatattcgtcgtcaatcctatttcgggtacacaaagtaaggaattgattcttagcttgctgaatgaaaaaatagacaaggcgagatactcttgggaagtagtgtatacagagagagccggtcatgcagtagaaatagccgcgaaagctgccgaggaaaaggcagatatagtagtagctatcggaggagacggaacgatcaatgagatagctcgttcgttggtgcatacggataccgctttgggaatcattccttgtggctcgggcaatggacttgcacggcacctgcatatacccatggaaccgaagaaagcattggaagtgcttaatgaaggttgcatggacgtaatagattatggcaagattaacggaacagattttttctgtacctgcggagtcggcttcgatgcttttgttagcttgaagtttgcgcatgccggcaaacgtgggttattgacttatctggaaaagacattgcaggaaagtcttaaatatcagccagaaacttatgaactggaaacggaaaatggagtaaccaaatacaaagcttttcttattgcatgcggtaacgcttcgcagtatggaaacaatgcatatatcgctccgcaagctacactgacagatggattgctggatgtgaccattctcgaaccgtttaccgttttagatgttccttcactcgcttttcagttattcaataagactattgatcagaatagccgtatcaaaacattccgttgtagacgattgtgtatccgtagaaccgctccgggtgtggtacatttcgacggtgatcctatggaaacggatgctgatgtgaatattgaattgattcagagaggtttgcgtgtggtagtgccacaagcagcagaaaaagatgcggcaaatgtgcttcaaagagcacaggagtacatgaacggaatcaaattaatgaatgaagcgattgtagataatataacagatagaaacaagaagatattaaagaaactgacgaaaaaggggtaataaatttattaattactactcacgaattacaaattattgcgtacttttgcaaagttttggctcgtccaaaattagaaacacgagtgataattatctaaataataaaatatatgttcagaacgcatacatgtggagaactgagaatctctgacgtaaataagcaagttacgttgtccggctgggtgcaacgcagccgtaaaatggggggcatgacctttattgaccttcgcgaccgttacggtattacccaattggtttttaatgaagaagtaaacgcagaactctgtgaacgtgccaataaattgggacgtgaattcgttattcaggtgacaggaacggtaaacgaacgtttcagcaagaatgcaaatattcctaccggagacattgaaatcattgtttccgaactgaacgtactgaatactgcaatgactcctccgtttacaattgaagataacacggacggcggtgacgatatccgtatgaaataccgttatctggatttgcgtcgtaatgctgtccgctctaatttggagttacgtcataagatgacaatcgaagtccgtacctatcttgacaagttaggtttcatcgaagtagaaacgcctgtattgatcggttccactccggaaggtgcacgtgattttgttgtgccttcacgtatgaacccgggacagttctatgcacttccacagtctccgcagactttgaagcaactactaatggtttccggtttcgaccgttatttccagattgcaaaatgcttccgcgatgaggacctgcgtgccgaccgtcagccggaattcacacagattgactgtgaaatgagtttcgttgagcaggaagacattatcgccactttcgaaggaatggctaaacatctgtttaaaacccttcgtggtgtggaactaaccgaaccgttcctgcgtatgtcttgggcagatgccatgaaatattatggtagtgataagccagacttacgtttcggtatgaaatttgtggaactaatggatatcatgaaaggccacggattttctgtatttgataatgctgcttacgtgggtggtatctgtgcggaaggtgctgcaacctatacccgtaagcaactggatgcattgactgagtttgtgaagaaaccgcagattggtgcgaaaggtatggtatatgcccgcgtcgaagcagatggaacggtgaaatcgagcgtagataagttctatacccaagaagtattgcagcagatgaaagaagcgttcggtgcgaaaccgggtgatttgatcttgatcctgtccggtgatgatgtaatgaagacacgtaagcaactttgtgagcttcgtttggaaatgggttctcaattaggattgcgtgataagaacaagtttgcttgcctttgggtgatagacttcccgatgttcgaatggagtgaagaggaaggccgtctaatggctatgcatcatccgttcactcatccgaaagaagaagatattcctttgctggatacagatcctgctgctgtgcgcgctgacgcatatgatatggttattaacggtgtggaagttggcggcggttctatccgtatccacgatgcacagctgcaagctaagatgttcgagattctgggctttacacctgaaaaagcacaggcacaatttggcttcctgatgaatgcgtttaagtacggtgcacctcctcacggtggtttggcatacggacttgaccgttgggtatctctgtttgccgggctcgattctatccgcgactgtattgcgttcccgaagaacaactcaggacgtgatgtaatgttggatgcgccgtctgctattgaccagactcaacttgacgaattgaatttgatcgttgatatcaaggaaggagagtgaaagaatcagtacgtatattccgttttatagtaatcggtacaatgaacgctttgattatggcgttggttgtatggttaatgatgaaagaaatatcattcgacggtgactatatggtggctaatataacggcgtacctgatagctcagattcataattttatctggtgtaagtactggatatttcccgtagaaaacaaaaagaacagtctctggaaacagatactgctcttttgctctgctttcggagtggcttacaccgcacaattcttatttcttatcctgttagtagaaggattggacgttaatgaatatcttgcgcaatttctgggcttgtttatttatggaggtgccaattttttggctaataaaaagataactttccaataagaagtccattatacagtatatagaaagggcacagagttttaattttacatttcactctgtgcccttcgttttttaatatacgactattgattatatctcaaactctagtccagaaagcgtttagtcagtccttcgtattcgtcaatccgacggtcacgcaagaatggccaccaacggcgtacattttccgaacgttccatatctatttcgacgaccatattctccggacggtcattacctgcttgcgctaagaattctccttgcggaccgaccacaaagctatttccccaaaatagaataccgttagtctgtcccgaaggatcgggttcatgtcctacacggttgacggaaataacaggaagaccgtttgcaacagcatgggcacgttgggagataatccatgcattgagttgacgagctttctcatcatccgtatcgctactttcccagccgatagcagtaggataaattaaaagttctgcacctttcagcgccattagacgggcagcttccggataccattgatcccaacataccaatactccaagttttcctaaagaagtctggatcggttcaaaccctatatctccgggagtgaaatagaacttctcgtagtaggcaggatcatcaggaatgtgcattttacggtattttcctgcaatgcttccgtcacggtcaaaaacaacggcagtattatgatagagcccgggagcacgtttctcaaaaagagaggtgacaagaaccactctattagctgctgccagttccgaataaaatccggtggaaggaccgggaatcggttcggcaagatcgaacaaattagtattctctgtctgacagaaataaagcgaattatgtaattcttgaagtacaatcaactgtgcgccatgagcagcacaagcctcaatacttttcgcaagattcattaaattcattcgtatatctgcggtattggattgctgtatcaatcctacttttatctttctcataatgactgtttatttaataactccttgtggatattgcatagtgacacaatgtaaagaaccgtgttgcttgataagcgcacggcaatcaattcctactatctcatgtttgggaaatgcttgttgcagtacttcacctgctttccggtcgtttgccggctggttgtatgtaggatagagaacggcatcattcattatcagaaaattagcgtatgtagcaggcagacgttcgcaattttcttctatcttatcgaccattggcaaagctaacagacgataaggttctcctgccagcgtacggaatgtcttcagttgttcttccattgcgcgcagtgcttcgtaatgctcatcctctttatcgtcacatttcacataagcaatggtatttgtagaacaaaaacgtgctagagtgtcgatatggctgtcagtgtcatcacctgccagataaccatgatccagccaaagaatcttttgcagatggaaggttgatttcaggtattcttctatctctacttgattgagttgtccgttccggttgggagagagcaggcattcggaagtggtgagtagaacacccataccgtcgctttcgatagaacctccttcaaggacgaaaccgagacgattgacataatgaccttttaatacttccgcttctacggcgtgtcgggtaattcgattatccaagtcggaggcaaactttaacccccaaccattgaatgtgaagtcgagcagggaaggagtgccgttgtctatcatggtgatagcaccatggtcacgcgcccatgtgtcgttggtttcacattccaagaaacggacgttatctatatttacgcttgaagcgatctgttctctcacggcttccggttcgggagtgacaatcaggagtaattcacgttctgctatttcccgggctatgtttataaaacactcctgtacttctgtcagcatatatgcccagtccgtaccggcgtgtggccatgttaattgtatgccgctttgcgtatgccattcggcaggcagatgaggagctctcatttccacctgtacggtcatattctttccgaaatttaattgtaaatccttctccgaaccactggggctggggagtccaaccataattcccattagactaatctatttaagtttatataaattgtttaatttaactcggccatacacggtgttaagccttggtttcctgtttaggcttccggtcgaaaaacggattcttggaggatgcacttacaggaattgccataaccattttgcagtcttttagccagttcaggcgttgtgctgccagtccggcagagaacatgacacgtgtgtctacgcgcatatcggcggctgtggcacaagcggaaccaatagcgatacctacatcaatactatttattgcgcaagggactccttccgtacgcccggcacaggttgtaaatccacaatggccacaattcaagccctgcgcttgttcgcgcgttcctattaatataacacattcggcatttaagatgttgtcagcgtcacgaaggaaaaatttcattccgtgctcttcaaccatagcaaccattgtatcggatagttgtttaatctcttcatcagtgattaaggccacttcaataatatcaattccctttcccttcggagcagtacgtgcagctgtcatcatctgacgggcaacctgcaatatatgctcgtgacgggcatctctttcgtttagtatcataacttttctcgaattaattagtgaggcaaagataacgtttttcaagaaaatagtacctttgccggaaagaaagaattaaaaacgccatgttacatatcaataatgcctgtatcgcttttggaacagaagtccttttttccggttttgaaatgaaattggagaagggagagacagcctgtatcgtaggacaatccggttgtggaaagacttccttactaaacgccgtaatgggctttgtgccattatatgaggggactattaaagtaggcgggacgttactggataaatcaaccattgatcttgtccgccgccagattgcatggattccccaagaactggcgttacctttcgaatgggtaaaagaaatggtatctttgccattcgagctgaaagtaaaccgttccgttcctttttcggaagaaaggctttttatgtgttttgacgagttggggttggagcatgaattatactttaaaagagtaaatgaggtttcgggtggacagcgccagcgcattatgttagctgtgaccgcattgctcaataagccgttgattgtaattgatgaaccgacatcggcattagataccggatcgacagacaaagtactggcttttttccgacggcaggcagaaaaaggggcagctgttttggcggtatcgcatgataaggactttgcttcgggatgccattatttaatagaattataaacgaaatctgttaggacgatataaaacgaaacttgttgtgggaaccattgatatatcatattataatctttttgttggcttgctgctgcttgccattccctttttctatctatggaaatttaagacgggattgttgaaacctgctgtgataggcacactccgaatgattattcaattattttttattggcatttatctaaaatatctctttttatggaataacccctggattaattttctttgggtcattgttatgatattcgttgcgggacaaacagcattggtacggaccggactgaaacgacgcatcttactgattcccattactgtgggattcttgtgcagtgtaatattggtcggattatattttataggtattgtgcttcaactggataatatttttagcgcccagtactttattccgatcttcggaatcctaatgggaaatatgctatcgagcaatgtgattgctttgaatacatattatagtggcctgaaacgtgagcaacaactataccgatatttattgggaaatggagctacgcgacaagaagcgcaggcaccatttatcaaacaagctattatcaaatccttcagcccgttgattgccaatattgccgtaatgggactagtagcccttccgggaacaatgataggacagattttgggaggaagcagtccgaatgtggctatcaaatatcagatgatgattatggtgatcacattcactgcatccatgttgtcgctgatgataaccatttcgttagcttcgcgaaggtcatttgatgcatacggaaagctcttggaggtatcaaaagaagctaagaaatgacaataatcgatcgtatatttcaggaagttgccggaatatctattccacatttcttcattacagtggagttttcggcaatgggctgcgaaatgccggaacatattgaagcctttctatgggaaaaatatgaaataattcttcgaggcgcaaacggtcgtaagttctttatcacaaaggagaatggcggttgatctttacatttttccccacagatagagtcgtggacgagcgatatgctttgaagaataaagttctattccgccatgtataataacttaatccgccctatatattaaataatataataataaataatccaattaattatattttttaatatatttgccaatatctttaaagaatagtacaataactgtttaattttgaaaacgatgaaaacacatctgattgctattttttgtttggtatctatttctttaatggggcaaaaaacttatgctcctgcatgggagtccttagatacaagacctgtcccttcctggtttgagaatgcaaagtttgggatttttatccactggggcttatgggaaattacagtttccagccttagaaactccggtttccagcgtatgaaactacagtttcgagccttggaactggagtttccaaggctcgaaacaccaagtctgaacggtcgggagaaatcgtcccctgttggaagaggagcggagtcttactttgctttgactttcccatataagcaacgaagctgaacgaactgttcacccggttgcacatatccgctttccaacattttttctgatacttgaaatttagcgagatgatgccgtacatacttctccatatccggcgattgttttttgacgaaagcctctaaatcgacctttccgttttcatgaatgagaacttttgctttaacagtacggaatccccattctttgcaatgttttgtctccgctttatctatccagaagatagcggtggcgcttattgtgtccgcaatacattcttcagtatcactgttacttacgttgtcggaaacttccttttcggtattctcgctctgtttcaattgacaggaaactgccaaaatagttagtagaaaatagaataaaattgttttcatcgtattcaatgattataggataggcgacaaatttactaaaaaaatgagaacaaagagtgtttgttcccttttattttcttatatttgcaaccaaattttctacgaataatgaaaattaaggaaatagtaagcgcccttgaacaattcgcgcctctgccattgcaagacggtttcgataatgccggcctgcaaatcggattgacagatgcggaagcagcaggggctttgttgtgtcttgacgtcaccgaggctgtgttggatgaagctatcgcgttgggatacaatctcgtcatatcacatcatccgctgatttttaaaggatataagtccattacgggcaaagattatgtggaacgctgtatgctgaaagcaataaagaatgatattgtgatctattcggcacataccaatcttgataatgcccaaggcggagtgaattataagatagccgaaaaaatcggactgaagaatctgaaagtacttgaaccgaaggagaatagcctgattaaattggttacatttgttcctaatacgcaagctgatgcagtgcgggaagcgctgtttgctgcgggatgcggaaacataggcaactatgattcatgcagttacaatttagaaggagaggggactttccgggcaaaggagggaacacatcctttctgtggggcaatcggcgaattgcatcgtgaaggagaagtaaggatagagactatcctccctgcattcaaaaaatcggcagtcgtcagagccttgctggccgttcatccttatgaggaaccggcgttcgacatttatccgttgcagaacgactggacacaggcaggctcgggaattgtcggtgaactggatgaatcggaaaccgaacttgaatttctgaaacgtatcaaaaaaaccttcgaggttggctgtctgcgccataataagttgacgggcagggaaatacgaaaagtagcactatgcggaggtgcaggcgcgtttctgcttccacaggcaatccggtcgggagcggatgtttttattacaggtgagataaagtatcatgattatttcggtcacgaaggggaaatcctgatgacggaaattggtcattacgaaagcgaacaatatacaaaagaaattttttattccataatccgggatttatttcctaattttgcgctccaattgagtaaaataaatacgaatcccataaaatatttgtaagtaaaatggctagagaagcaaaaaaagatccgaatgagttgacagtagaacagaagttgaagacgctgttccaactacaaacgatgttgtctaagattgatgaaatcaaaacattgagaggtgaacttccattggaagtacaggaccttgaagatgaaattgccggtttgagtactcgtatcgacaagatcaaagcagaagtggaggaactgagagttgctattgccggcaagaaggtggaaattgaaactgctaaatcttcagtagaaaaatataagtcgcaacaggacaacgttcgcaataaccgcgaatacgacttcctgaccaaagagatcgagttccagacattggaaatcgaactttgtgaaaagagaattaaagagtattctgcagataaagaagaaaaagaggctgaagtagcaaagaatgaactggtgcttgacgaaaggcagaaagaccttgaacagaagaaaggcgaactggacgaaatcatttctgaaaccaagcaggaagaagaaaaactgagagacaaggctaaagacctggaaactaagatcgaaccgcgcttgttacagtcatttaagcgtatccgtaagaactcccgcaacggtttgggtattgtatacgtacagcgtgacgcttgtggtggttgctttaacaagattccgcctcagagacagttggacatccgttcacgtaagaaggtaatcgtttgcgaatattgcggacgcatcatgattgaccctgaattggctggcatacaaatcgagcacaaggtagaagaagctccggcaccaactactaaaagagctatcagaagaaaaactgctgaataagagaagtcatccattaacaagtacaagtagttaaagttactgtttaatataggaagccctgcaacaatgcagggctttttttatcagtgtccgtataaacagggatctcgtacccaagattacatcacgctgaatagaaactttgttctgtcgttacgccggtaaacaaactcaccctttagttgttatcttttcatttcataaaaacctgaactgaatatgaacatacgagcatggagcatatcgctccttttgtttctttcaactgtgactgcggttgggcaaactgcaaaccgctatttgaaagctcctctccctaacggctgggaagaaaatggggaagtgtttcaacagacacttccggtagacgaccattggtggaaatctttcggggacagcaaactggattctctgattgctttggcggtagaccgtaactattccgttgcaatggcaattaaccgcatcgctgctgcccgtgccaacctttgggccgaacgtggcaatttctttccttcaatcggattgaatgccggttggacccgacaggaaacaagtggaaatacaagctcaattccccaaactacggaacattattatgatgcatcactcagcatgagttgggaaattgatgtgttcggtagtatccgcaaacgggtaaaggcacagaaagagaactttgctgccagtaaggaggaatataccggagtaatgatttctatggcggcggaagtggcttcggcctatatcaatttgagggaactgcaacaggaacttgaagttgtgaataaaaactgcgcttctcaggaagaagtactgaaaatcacggaagtacggtataacactggattagtggctaagctggatgtcgcacaggctaagtctgtgttatatagcacaaaagcttccattccacaactggaagccggtatcaatcagtatattacgatgttagcagttttgctgggaatgtatccgcaggacattcgtccggtactggaacctgtcggaacattgcccgactatatggaaccgatcggcgtgggaatgcctgtcgatctgttgatgagacgtcccgatgtgcggagtgcggaacgaagcgtaaacgcacaagcggcattgctcggagcttcaaaggcggactggttgccgaaagtttttctgaaaggctcgttcggttatgcggctcgtgacttgaaagacttgacaaagagtaaaagcatgatgtatgagattgcaccgtcaatgagttggacgcttttcagcggagggcagttggttaatgctacacgactggctaaagcccaactggacgaatcaattaaccaattcaatcagactgtcctgactgctgtacaggaaacagataatgcaatgaattcttaccggaattcaatcaagcagattgtagcgctgcgcgaagtacgcaatcagggaattgagacactgaaactttcattggaactttataaacaggggctttctccctttcagaatgtgttggatgcacagcggtctttgttgtcctatgagaatcagttggtacaggcacaggggaattcgctactccagttgataactctctacaaggctttgggaggcggttggcaagaataaagaatctataaataaaaatataacctaacgtaacggatatgaaaaaactaatgtatattttctttgcgctgccgatattgaccggttgcaaggagaaaaaaagcgcaggagcaatgggagggatgccaactccggaaattagcgtagctaaaccaataataaagaatgtaactctgacgaaagattatccgggctatctgacaacggaaaagactgtaaacctggtggccagagtgaacggaacgctgcaatcgacttcgtatactgcaggaggacgggtgaaacaaggacaattattgtttgtcatcgaacctaccttatataaggataaggtggaacaggcggaagctgcactaaaaacggcccaagcccagttggaatatgcccgcagcaattacagccgtatgaaagaagctgtcaaaagcgatgccgtgagtcagatacaggtacttcaagcggaatcttccgtggcagaaggtgtggcggcggtcaataatgcggaagcagctttgagcacggcccatacgaatctgagctattgctatgtccgcgctccgtttgacggaacgatcagtaaagcaactgttgatgtaggcagctatgtgggcggttcgttgcagcctgtcactttggctactatctataaggataatcaaatgtacgcatatttcaatgtagctgacaaccaatggctgggaatgttgatgaacaaccggcaaagtgcacaggaacttccgaagaaaataatggttcagttgggcaaggaaggttcggaaatgtatccggccacactggattatctgtctccgaacgtggacttgaatacgggaacgttgacagttcgtgccaactttgacaacccgcaagggatactaaagagcggattatatgtaagtatcacgttaccgtatggagaagccgataatgccatgttggtaaaagaggcttctatcgggacggaccagttgggaaaatacttgtatcttgtcaatgattctaacattgttcgttaccggcatattgagatagggcagttgataggtgatactttacggcaagtgacgggagggctttctccgcaagacaggtatgtcacgaaggctctgatgaaggtcagggacggaatgaagataaaaccgatgccgtaaactgaatattaatcctaaactataatcttatgttttctaagttttttatcaaccgaccgatatttgctaccgtccttgccttgctgattgtagtagccggtctggtgacactcaatatattgccggtagcgcaatttccggagattacaccgccaacggtacaggtatctgctgtttatccgggggcaaatgccgaaaccgttgcccaaacagtaggtattcctatcgaacagcaggtgaacggggtagacggtatgctttatatgtcctctaattcatcttcttcgggagcctattctctgacgatcacatttgccgtcggtacggatattgatatggcaaccgtccaggtacaaaacagggtaagcgtcgcacaatcatcgctccccgaacccgtagtggtgcagggagtcactgtacagaaacaatcatcgaatattgtcatgttcctgacaatgacctcacaggattctgtttacaacagtctgtatctgaccaattatgcaaagttgaatctcgtcgaccagttgacacgtgtgcccggagtgggtgccgtgaatgtaatgggagcaggggattactccatgcgtatctggctcgatccggaagcaatgcgtatccggaatatttcaccgcaacaagtttatcagtctatccagtcgcagaatatggaagtatctgccggatatatcggccagcctatcggggaagagaataagaatgcttttcaatatacactgaatgtgcaggggcggctcagttctcccgaacagttcggaaatattatcatccgccgcgaacaggatggggccatgctccgtctgaaagatattgccaggattgatctgggatctgcttcttacagtgtggtgtcccgattgaaagggcagcctacggcggctattgctatttatcagcaaccgggttccaattcgctggatgtctcgaaaggagtgaaagccaagatgcaggaactggccgccagcttcccggcaggagtgtcttataatgttacgttggatactacggatgtgattcatgcttctattgatgaagttatggttactttctttgaaacaacgctgctggtgatacttgtgattttcctgtttttgcagaactggagggcggtgattattccttgtcttaccattccggtgtctctgattggtacactggcggtaatggcagcattcggcttttctattaatacactgacattgttcggattgattttggcagttgccatagtggtggatgacgccatagtggtggtggagaacgcttcgagattgttggaaacgggacaatattcaactcgtgaagctgtgacgaaagctatgggagaaattaccggaccaatcgtcggagtggtgcttgtgttgcttgcggtatttattccgactatgctgattagtggaatttccggacaattatacaaacagtttgcgctgactattgcagcttctaccgtattgagcggtttcaactccctgacattgacacctgctctctgtgcgttgtttctggaaaagagcaagccttctaacttcctcatatacaaaggattcaacaaggcttatgataagacgcagggagcgtatgataagatagtcaaatggttgttggcacgtcccggaatggctcttgtgtcgtatggcatattgacggctattgccgtgttgctctttatgcactggccgtctacattcattccggatgaagatgacgggtattttattgcggttgtccaacttccgcccgcagccagtctggaacgtacacaggcggtaggcgacaagattaaccggattctagattcgtatccggaagtggagaattatattggaatctccggattttccgtcatgggcggaggagaacaaagtaactcggccacttatttcgttgtactgaaaaactggagtgaaaggaaagggaaggagcatacggcagccgctgttgtcaaccgctttaatggcgaagcgtatatgacgattcaggctgggactgtgtttgccatggttcctcccgccattccgggattgggagcgtccggcgggttacagcttcagttggaagaccggagaaatctgggaccgacggaaatgcagcaggctatcaatgccatgcttgcctcttatcattccaagccggctttagcttccgtctccagccagtatcaggcaaacgttccccagtattttctgaatatcgaccgggataaggtacagtttatgggcatcgctttgaatgatgtattctctacattaagttattatatgggtgcggcgtatgtaaatgattttgtagaattcggccgtatctaccaagtgaagatagaggcgcgcgaccaggcgcaacgggtgattgatgatgtcttgaaactgagtgttcccaatgcggcaggagaaatggtgcctttttcatctttcaccaaggtggaggaacagttaggacaggatcagatcaaccgttataatatgtactcgactgcttctctgacttgcaatgtcgctccgggaagtagcacagggcaagccattcaagaagtggaagcattgttcaaggaacagttgggcgatgaatttggttatgaatggacttccgttgcttatcaggagacgcaggccgggaatacaactaccattgttttagtaatggctctgattgttgcctttctggttttggctgcacaatatgaaagctggacgagtccggtggcggctgttatcggattgccggtagcattattgggagctatgataggctgtctggtaatgggaactccggtcagcatctatactcaaatcggtattatcttgcttgttgcgctttctgccaagaatggtattctgattgtggagtttgcccgcgacttccatgccgagggtaactctatccgtgagtcggcatttgaagccggacacgtcaggttgcgtcctatcctaatgacgtcttttgcttttgtattgggagtaatgccgttattatttgcttctggagcaggtgcacagagccgcattgcattaggtgccgccgttgtttttggtatggcaatgaatacactgctggcaacggtttatatacctaacttctatgaattaatgcagaaattgcaggagaaattcagcaagaaaaaaggaaataacgataagcaggaagggagtatgtaaagatagaatactatccggaaagtatccggaagacgactgaatcagggtgtcggtagatggatgtgatagtgacggtatgtgctttacatagcatcgctatcgtgaccggatagcgacactcttttttataagttattatagtctggaatatcctggaggaaaatataactctggtgttcataatccattcggcagcaatagtgttgcattccattgctgacaatcaggtaatctactttcagtaccatattataccgggttatctgatcgaatacggtctgtgtgatttcaatgtgcggtgccttgtattccacaatcatgcgtgccgataaatccctgcgatagagcactgtatcacaccgcttggtagtgccgttcaactttaccattacttcattggcaagaagggcggtcggatatcctttgtgtacaataagaaagtgaacgaagtgttgacgcacccattcttccggagtgagagcgacatatcgtttgcgaatcacgtcgaaaattacattttttccgtttcgtacgtttattttagtgtcgaatactggtaggtttaacgataacatttattatttttgtaagttaaataatggttcccatcatcgggagcacaaatttaatagataattatgaaaacaaaagaagaaatcgtagctaattggctgcctcgttacacaaaacgtaacctggaggattttggagagtatattctgttgactaacttcaacaagtatgtcgagattttcgcaaatcagtttaatgttcctattttgggaagggatgcaaatatgatttctgcttctgccgaaggtatcacaatgattaacttcggtatgggaagtcccaacgctgctatcatcatggacttgctgggggctattcgtcccaaggcgtgtttattcttgggaaaatgtggcggtatcgacaagaaaaaccagcttggcgacttgattcttcctattgcggctatccgtggggagggaacttccaacgattattttcctcctgaagttcctgcattacccgcatttatgttacagcgtgccgtttcttcgtcaatccgtgacaaaggccgcgactattggaccggtaccgtatatactaccaaccgccgtatttgggaacatgatgatgtattcaaggaatatctgaaaaagacacgggctatggcggtcgacatggaaactgcaactttgtttagttgtggctttgccaaccacattcctaccggtgcattattattagtatctgaccagcctatgactcccgacggagtaaaaacagataagagtgataatttggttaccagaaattatgtagaggagcatgttgaaatcggtattgcttctctgcgtatgattattgatgaaaagaaaactgttaaacacttgaaatttgactggtaaacccggtctttctgaaaaatatatatggcaaaacaagagctgacctgtgatgatatcctcaaggaattaaaggcaaagcagtatcgtcctatttattatttaatgggagaggaatcgtactatatcgacctgatagccgattacattactgataatgtgttgaacgatacggaaaaggaattcaacctgactgtggtatacggggctgatgtagatgtagcgactatcataaatgctgccaagcgttatccgatgatgtccgaacatcaagtggtagtagtcaaggaggcacaagcagtgcgtaacatggaggaactgtcttactatcttcagaagccgcttcattcaactatcttggtaatatgccataagcatggtacattggaccgcagaaagaagttggccgccgaagttgaaaagacgggtgtgctgtttgaatctaaaaagataaaagatgcacagctcccagccttcattgcttcttacatgaaacggaaaggcgtagacatggaacccaaggcaacagtcatgctcgctgattttgtcggctcagatttaagtcggctgacaggagaactggagaaattgattattactttacccgcaggacagaaacgtgttactcccgaacagattgaaaagaatatcggcattagcaaggattataataactttgaattgcgaagtgcactagtggaaaaagacattcttaaagcaaataaaataataaaatattttgaggagaatccgaaaactaacccgattcaaatgacattgtctctgctgtttagtttctattccaacttaatgttggcatattatgctcctgacaaatcggagcagggaatcgctacaatgttaggactaagaacgccctggcaagctaaagattatatggcggcaatgcgtaaatatagcggagttaagacgatgcaaatcgttggagaaatacgatatgctgatgcaaaatcaaaaggagtgaaaaatagttctatgtcggacggagatattctgcgtgaattagtgtttaaaattcttcattagaaaaagcgactgtttcacatcgataagaggtatatacttttactgtcattcaagtaagtatatacctcttattatattctctatattgaaccttccaaatgaatagttagcatcctaattttaaactgaatattttacaaaattaccacactttctttatctgtttttcctgatagaagatatgtgtttctgagttacttttcccgttttgttttcatcttacttgattcccgaattttgtctcttttaataaatcccattgaaaaatcaagattaaatcaaaacttgtaatgtatataatatcctcttgattttttaagcgaaaacgaaagagaaacttccttttgtttaaaacctggtctgtcattttgatagttttatgattttctgtaataatctccccattttttctagtttatctaaagattaatatcataaaaatgggaataacactctgtattatagattattatgataaaaataaggcctctagaattgaaaaaaagtagagaataggtgaagagtacgtaaatattgcaaggatttaccattttagacctgacatgtaaaagatgatttgaaaagcgttcgatatacatgggtgaattatagattttttctcttgttttattgctgatgcaactactcaatttcacttttgtgtatctcacactttctatttgtgaaatataatattgtaatgcaaacacaagtgtaacgagaaaaagctatacacaaaagtatatgatgtaaattacaagaataaataaagtagtataaaggtgaaaggagaggggttaacactttatttttacgcatttatacacctgtttatcagtaatatgcatgtgatatctaaatttttactataatagactatattatacacaatgtatttttgtgaataacaaaatcaacaaataaattacgaataatatataattaataattagtcatttaccactttttattaaacttgaaatatgacttagaaagatagtgtttttatgagtatacaaacatactaatacatcagtaaacaaatacacacatttgtcatatctatatttttagatttgtgatttgcatttgtgaaacaaaatatttacctttgtatattcacataaaggatttgtatttttgtgaaatcagcatgttatgcacacaattgtaatcaaaaaaggctatatggaaataaaagacagaattaggatgataatggagagagaaaaagttcctcccagagtttttgctgaaacaatcggagttcagcaatctactctctcacatattttaaatgaccggaacaaaccaagcctggaagtagtgatgaaagttcaccagacttataattacgtaaatcttgaatggttactatatggaagaggtgaaatgttggcttctgctgaagaatcttcattggcttcctctaatggtgattatcaaccttctttgtttgatgagaatcctgtaaatccgtccaaagagacgattactttggaaaatcgcaaggaaatggcattaagaagtaccggaaatacacctaaagagattgtaaaacaagagattaggtatatagaaaagcctgccaggaaaattactgaaataagaattttctttgatgataatacctatgaaacgtttagacctgaaaaataagtggtaaaatcacaggtttgagcaaattcctgtatctttgtacccggaatacgaatttatactttttatatccatacatgaagaaatttattttagatctgacggttactgagaatatcaaactgcatgctaactatgtattgctaaagttgacttctcagtcattgctgcccgaaatgctaccgggacagtttgccgaacttcgggtggacggttcgcctactacattcttgcgtcgccctatctctattaattttgtagacaaacagcgaaacgaagtgtggtttctcatccagttgcttggagacggaacaaggcgattggcagaagtaaatccgggtgatgttatcaatgtggtacttccattaggaaatggctatacaatgcctcagaatccttcagataagcttttgttagttggtggaggtgttggaacagcaccgatgttatatttgggcgagcaattggctaagaatggtcataaacctacctttcttttgggtgcacgtagtgataaggatctgttgcaactggaagaatttgttaaatatggcgaagtgtatactactacggaagatggcagtcacggagaaaaaggatatgttacccaacattccatattaaataaggtgcgttttgaacagatttatacttgcggtcccaagccgatgatggtagcggtggcaaaatatgccaaaagtaatcagatagaatgtgaagtctctttggaaaacacaatggcttgtggaatcggtgcctgtctttgttgtgtggagaacacgacagaaggtcacttgtgtgtatgtaaagaaggtcctgtttttaatataaataaactactatggcagatttaagtgtaaatattggtgaattacaaatgaaaaatccggtgatgaccgcatcgggtacatttggatatggcgaagagttctctgatttcattgatatagcgcgaataggtggtatcattgtaaaggggacaacccttcacaaacgtgaaggaaacccatatccgcgtatggcagaaactccttcggggatgttaaacgctgtgggactgcaaaataagggagttgattactttgtagagcatatatatccccgtataaaagacatccggacgaatatgattgtaaacgtatcgggatctgccattgaagattatgtgaaaacagccgaaattattaatgaacttgacaaaattcctgccatagagttaaacatctcatgccctaatgtaaagcaaggtggcatggcctttggcgtgtcagcaaaaggagcttctgaagtagtaaaagcagtacgttcagcttacaaaaagacacttatcgtaaaactctctccgaacgtgactgatattacagaaatagcccgtgcagcagaagaaagtggtgcagatagcgtgtcattaatcaatacattgctgggaatggccattgatgcagagcgtaaacgtcctatcctgtcgactgtaactggaggaatgtccggtgctgccgtaaaaccgatagcattacgcatggtttggcaagttgctaaagcagtaaatattccggtcataggattgggaggtatcatgaactggaaagatgccgttgaatttatgcttgccggtgcgtcagctatccagattggtacagcaaatttcatagatccagctgttacggttaaagtagcagaaggtataaataattacttggatagacatggatgtaagtctgtgaaagaaataataggtgcacttgaggtataattgaaaacacatgataacccttcgcataaattttcatgaataagtgttattttccccttaacatatacttattgaaagagtctttttaaataaaggaattatcaagaaaaaatgcgtatgaggaaaattaaataaaatccttgaacaggtcataaataaaaaacgacggtgaaaactcaatccatttccaccgtcgtttttatttgcatgtatttttacaatcaagttattcttctaataaatcaggacgaagtcttttcgtacgttctaatgattgctgcaactcccattctttaattttggcttcgtgtccggacaataggatatcgggaactttccaaccattataatcggctggtcgtgtatataccggtgctgccaacaaattatcctgaaatgaatccgaaagagcagactgttcatcggaaatgactccgggaatgatgcggacaatagcgtctgccataactgccgctgccagttcaccacctgtcaatacataatctcctatactgatttctttcgtaatcagatgctccctgatacgaaaatctattcctttaaaatggccgcaaagaataatcaggttctgagccaaagaaagagaattggccataggctgattaaattgttctccgtcaggagtagtaaaaatcacctcgtcatagtcacgttctgctttcaaagcattgatgcaacgttcaataggttcgatcttcattaccataccggcaaatcctccgaaaggataatcatctacacgacgatatttatcttcagtataatcgcggagattatggatatgaatctctgcaagtcctttgttttgagctcgtttcattatcgaacaattgaaaaagccttcaatcatctctggcaaaaccgttataatatcaatacgcataatctttaatttttcgcaaaagtacaaatattcaaagagaaacctgtatttttgccttaaacaatctaagaattatggatataaaagagaaaatagaaggattacgtgccgaacttcatcggcataactataattactacgtgttgaatgctcccgaaatatccgacaaggagtttgacgagaagatacgtgaacttcaggacttggagcaggctcacccggaatataaagatgaaaattcgcctacaatgcgtgtaggcagtgatataaataagaattttacgcaggtagcacataaatatcctatgttatctttggcaaatacttattcggaagctgaagtgacagatttttatgatcgggttcgcaaagcattgaatgaagattttgagatttgctgtgagatgaaatacgacggaacatccatttcgttaacttacgaagacggaaagttagttcgtgccgtcactcgtggtgacggagaaaaaggtgacgatgtgacagataatgtaaagacaatccgttctattccacttgtattgcatggcgataattatccttcttcttttgagattcgtggagagattcttatgccatgggaagtgttcgaggagctgaaccgtgaaaaagaagctcgcgaagaacctctttttgccaatccaagaaatgcggcgtccggaacattgaaacttcaaaattcagcgattgtagcttctcgtaagttggatgcgtatttgtattatttgttgggcgataatttgccttgcgacgggcattatgagaatcttcaggaagcagcaaaatggggatttaagatttctgatctgacacgtaaatacaaaacactggaagaagtctttgaatttatcaattattgggatgttgaacggaaaaatttacctgttgcgactgatggtattgttttaaaggtaaatagtcttagacagcaaaagaatctgggtttcacagcaaaatctcccaggtgggcaattgcctataaatttcaagcggaacgggcgctgactcgtctaaataaagttacttatcaggttggtcgaacgggagcagtcacacctgtagccaatttagatccggtccaactttcgggaactgtcgtgaaacgtgcgtcattgcacaatgcagatattattgaggggcttgatttgcacatcggagacatggtatatgtagaaaaaggtggggaaatcattcctaaaattaccggagtggataaggacgcgcgtagttttatgttaggtgaaaaggtcagatttattactaattgtcctgaatgtaatagcaaattggtgagatatgaaggtgaagctgcccactattgccctaatgaaacagcatgccctcctcagattaagggtaaaatagagcactttattagtcggaaagccatgaatattgatggattagggccggaaacagtggatatgttctatcgattgggattgattcacaatacggctgatttatatgatctgtcagttgaaaatattaaaggactggaccgtatgggtgagaaatctgctgagaatatcataacaggaattgctcaaagtaaagccgttccttttgaacgtgtgatctttgctttgggaattcgttttgtgggtgaaacagtagcgaagaaaattgccaagtcatttgagaatatagatgaattgcagcaggcggatcttgaaacattgataagtatcgatgaaatcggcgaaaaaatagctcaaagtatcctttcatattttgctaatgagtcaaattgtgagctaattaacagattgaaggctgcaggattacaactttatcgtaccgaggaggacttaagcgaatatacggataaacttgccggacaatctatcgttatcagcggcgtatttactcatcattcgcgtgatgaatataaagagctcattgagaagaatggtggaaagaacgtgggaagcatctctgcaaagactagttttatacttgctggagagaatatgggacctgcaaagctggaaaaagcaaaaaaactaggaataaccatactaagcgaggacgaatttctgaaacttatatcgtaagataagaaaaatattcgtacttttgcggctaaataaattagagattataattaaaactcatgatacagactaaattgaaaggaatgggggtagcactgattactcctttcaaagaggatgagagcgttgactatgacgcgctgatgcgcatggtagactatctcttgcagaataatgcggatttcttgtgtgtgctgggaactacggccgaaacaccgactcttactgaagaagaaaagaaaaccataaaaaaaatggtaatcgaccgcgttaacggaagaattcctattctgttgggggtaggtggtaataatactcgcgccattgtagaaactctgaaaaacgatgattttacaggagttgacgctatattgtctgttgtgccatattataataaaccttcccaagaaggtatttatcaacattataaagcgattgcggaagcaacggaacttcctattgtattgtataatgttccgggacgtacaggagtaaatatgaccgccgagactactttgcgcattgcacgtgacttcaataatgttattgccattaaggaagcatccggtaatattacacaaatggatgatatcataaaaaataaaccggaaaattttaatgttatctccggagacgatggtatcacgtttcccttgattacattaggagctgttggcgtaatttcagtaattggcaacgcttttcctcgcgaattcagtcgtatgacgcgtttggcactacaaggagactttgctaatgcactgactattcatcacaaatttacggaattatttaacctgttatttgtagacgggaatcctgcaggagtaaaatctatgttgaacgcaatgggaatgattgaaaataagcttcgtttgccattggttcctactcgaattactacgtttgaagcgatacgtaaggtcttgaacgagttaaatattaaatgctaatacaaggaaaaccgattcttgttgcagtatataaatgaatcacccttcactttaattctatcacgatggatagagtaatgtgaagggtgatttttccaggattgaagatacattttcttcgatgaaatgggcaaaaaataaaatcctccacataatatgcagaggatttcagtgatcgcgacaggattcaaacctgtaaccggctgatccgtagtcagctactctattcagttgagctacgcgaccattgtttcgttttaacgggtgcaaagatacgtacttttcccgaattagcaagcatttcaacgacttttttgtagaaaatttattcaatgaatcggtaattgaatagttgccaaccaatactcagtccgacattccactctcttttcggtgagctataatgatttacatatgccgagatgtctccgaatggtaattgacacacaacagatatttctcctaaatattcgaatttagagaaggcttttccataatatgccttattcaatgaatttctttcaatcggataaatgggcataaaaccataaaattctcctcgaagatgaaacatctggtttaaacgatagataggccggataccggcaccaacaaactggttggcacgaaatgcttcattataagtgagcttactatgctgtgtgggagaaaattcaccagcctgcatcattgttgcagtatagttctctgaaaaattcttagaggcatataatgctttcaaataccaccctaacacccaatgttcactcatattgtggtatttctctttcatataggataattgcaaccaggagtggtgctccttattattatttccagtagcaccttctcccggatagaatcgctctcttccaatgaaaatttgggcaatgagggcttctctataaccacgtgtcgggtattgtcgtgagtttaatgtgcttccgttaaaactgatagaaccaccaaacaaatcgtagcgacttttatcaaacttatcgtttccaaagtctattacacttttctgaaaatatttatcttctatccttgcaatccctattccaaactctgcccgtttgcttgaaagaaatggcaggcctacttgtagctttaggaatcgttcatccttttggttaaatgccggtttgtcatttctggagaaaagtttatccttcttgaaatagtcgaaagtactgatagatgcgatgaagcgatatgaagtaggtatagcagtagaaaagtctattttagccataaactgggcattattgtatacctttccaagttggccgtcaaaaacaaattccttggcatagtaatttaaatcctgataactgagccccagataaatctgattggaattagatgtggatatattacctcctaatcttacggcaaaattattttccaatttgactttcagatgcaaatcgtaagtatcatcttccggattatagatagcgtgtggaataatttcggaaatcatattatccgaaagtagacggaaatacccttgtttcaagtcttcgtagctgaattctttgttatctgatttatgaaattctttttttatgtatgcttgctgttgtgtgttggcaccgtcaataatgatattcttgaatcgtaattcaggataattacttcggtagaccattcttcttagacgtatattatcaagatttacgcgtcgatgtatgcggctttttatcgaatccatcatactgagagtccgattataacctatatcatgtaattcgtcaacacgttgaaaatccataagaccaacattatcatacttaaatgtcatcaaaatccccattgaatccggaatagagtagtcagttttctgcattaccatattttcaatctggctcatgagatcattttctttaggtttagtgggattagccgaaacgacacttccgataataatatccggatgaaaatcgttcttcatgacatctgtcggaaaattattataaattcccccatcataggctaatacgttatcaatctcgatgggcttgaacatgaacggaaaactcattgatgctctgacagcatctcctaaatcgccttctttcatgattaattgcttcttattgtatacgtcggaggcaatacagcgaaaaggaacaaagagtttgtcgaaatcacctttacatgctgcagtggcacgtgcgtacagatcaacgaaaaccagattcatttgaattggatttacgacgctagtgggcaggaattgaggtttcaaactttttagagaatctctaaaggagaaacgaatattgaagaactcaggagtaggaagattctttttaaagtgatatacatatttctcttctacttctccggaataccatcttttaaagtcttctgactttaaaagttctaccatgtcatcaggagaatatcccatagcatacagagaaccgattatggcccccatggaggtacctgcaatataatcgatagggatattattttcttccagagcacgaataataccaatgtgtgtcaatcctttagcaccgcctccacttaatacaagacctactttttgggcatagatagctggtacgattagccataaagtaataaacacaagaagaatttttctcataacccaaatcaaacagttgaacttttgtctttttaaacgttcaaatatatacaatacttttcaattaatcgatattttatcaaccgttttaaatcgaaaaagagcattacgacgtgttttaacgtcgaatgctctttcctgaagttatataatggataaaggggcgatattaaatcagctcgatactacgctttacgaagttattcaaagcttcacctttcaacatattgttttgcaacaaagccaaatcaataagttgacgaatcactttattattgctggcataaccaacaaaaatagcttcttttttacttttcagatcatcccatttcttatccaaatcattcaattcgtctttttcagaggttgggatatcttcgtcctttttgcctttttgtttatctttcaactcattacgttgtttattgacagcatccatttccgactgtattggggcaacttctgcctggcaagcactttcttcttcattaagcacttcttttattaacttatgatctgaattcaatattaagttgaacatatcaggcatttctccataaaaactcattccagcctgaatatttgccatttctttcatacggcgcatatattcactttgggtaatcattactggagctgtgttttctcctaacgcttgtgtcataacgttaaattcgaccttatccattttaggtaattgactcttaaaggcgattgtaatagcatcttgtttgcctgcttccaatacttcgctttttctatcttcttttacaataagattgtcaacaacatcactatccacacgggtaaaacgagatttctcgaatttttgttccaacatgcttaccatagctacatctaattgaccatccatcaacaaaacatcatagcctttattggtagctgcctctatataactatattgttcatccttattattagcatataaataaatcagatttccgtctttgtctgtctgattatctttaatcaaagtttggtattcttcaaatgtgtaatgtttactatccgtatcggtgaaaagggcgaatttctgcgctttctcgtaaaaatcctcttgagtcagcataccataattgataaatattttcaaatcattccacttgtcttcaaactgtttgcggtcattcttaaagatagattgcaaacggtcggaaactttcttcgtgatatatgttgatatcttcttcacattcgaatcgctttgcaaatatgaacgggaaacattcaatggtatatccggagaatctatgaccccatgcaataaagttaaaaagtccggtacaatgccttcaactgaatctgtcacatacacctggttgcaatataattgaattttattcttgttcagttcaatattactttttactttagggaaatagaggatacccgttaaatggaatggataatccacattcagatgaatccagaaaagtggttcatcagacatcggatacaacttactataaaacgatttgtagtcctcatccgaaagttcacttggtttgcgtgtccacaaaggagtagtatcattaatgatattatcttcggctgtttctacttgtttgccatctttccattcttttttctttccaaaggcaataggaacaggaaggaaactgcaatattttttcaaaagctcagatatacgggattcttcaagaaactctttgcagtcatcatcaatgtataagatgatatctgaaccacgacctgctttatctacttcttcaatagtaaattctgggctaccatcacaagtccattttacagcttgtgcaccatctctatacgatttggtgatgatttcaactttcttggcgaccataaatgctgaatagaacccaagtccgaaatgaccgataatagcatttgcatcattcttgtatttttccaggaagtcattagctcctgagaatgcgatttgattgatgtatttttcgatttcttctgcactcagaccaataccgtgatcggagatagtaatggtgtctttacctaattcaacatgaatagtcaaatcgcctagttcacctttaaattcaccaatagaagcgagtgtatttagcttctgagtggcatctactgcattggatactaattcacgaagaaaaatttcatggtcactgtacaaaaactttttgatgatagggaaaatgttttctgttgtaaccccaatattacctttttgcataatacgtatattttttaatttatctatttgattgattttagttgatatatttgttcagataaacacaaaaaaaatgccagaccctaaggtctgacattatggcatatcttatgtgcccttattgaaaataaatcctttattgaggagtaacgactttcatctccaaacctcctttttcttcattaagagagacttgaattatatctttttcttttaaagaagaagatatgataagttcagataatccatcttccaaatatgtctgaattgctcgctttaaaggacgggcaccatattgtacgtcatacccttttccagcaataaattctttcgccttatcatcaataacaagtttataaccaatagcttcgattctatcatacaatcctttcagctcaatatcaataatcttcgtaatagcttccaaggaaagttggtcaaatgttatgatttcatctacacggttgataaattcgggcgcgaatgatttattcaaagctttctgtatgacacttcgcgaaaattctttgtcatccagacggctttgtgttgcaaatccgaccccgcgaccaaaatctttcaactgacgagttccaatattggaagtcatgataataaccgtatttttaaaatctaccattctgccataactgtcagttaggcgaccttcatccattacttgaagaaggagattaaacacatcgggatgtgctttctctatttcatcaagcaggacgatagaatatggtttacgacgcactttttctgttaattgtccgccttcttcatatcctacatatcccggaggtgctccaaccagacgtgatacggtaaacttctccatatactcactcatatctatacgaatcaacgcatcagaagaaccaaacatatatttagctaattctttggccaaatgagtcttaccaactcctgtcggacctaagaacataaacgtaccaatcggcttgtttggatctttaagccccacacgacttcggagaattgcttttaccaacttttcgatagcggtatcttgtgctataaccttagactgcaagtcttctttcataccagcaagtttgattccttctgcctgcgccatacgctgcacaggaatgcctgacatcattgatataacattggctatttcttctgcatcgacagtttgcctattttctttcaagttggcttcccattcttttttcatctcatccagttgggaggagagctctttttctttatcgcggaaactggcggcgagttcgaaattctgtgattttacagcttcatttttcttgctcttggcttcttctattaacttctcttgttcttctatttcttttggaacattgatattcgtaagatgtacacgtgagcctgcttcgtccaaagcatcaatagccttgtcggggaaattacggtctgtaatgtaacgatctgtcaacttgacacaagcttctaatgcctcgtctgtgtagtacacattgtgatgatcctcgtacttgtctttaatattgcgtaatatttgaagagtttctccagcagtggtaggctctaccattactttttgaaaacgacgttccaaagcaccatccttctcaatatttttacgatattcatcaagggttgtagcaccaatgcactgtatttctcctcttgccaatgctggttttagcatattcgccgcatccatagagcctgcggcagaacctgcacctacaatggtatgaatctcatcaatgaataaaatcacattagggtttctctgtaattcattgagaatagaacgaatacgttcttcaaactgtccgcggtatttggtccccgcgacgacagcagtcatatcaagagctaccactcgtttatcaaagagaatccgtgaaactttcttctgaatgattcttagagcaagaccttcaacaatagctgatttacctacgccgggttctccgatcagaattggattattctttttacgacggcttaaaatctgcgccaggcgttctatttctctttctctgccaacaacaggatccaaccggccttcttctgccgcttttgtcatatcagtgccgaaattatccaataccggcgtatcgttagacggcttttttgaagcggtttgcgcttgttgctgatgttcttcggcattacctctgccaccggagcgtgatgaagacatttcttcttcgtcatcatcgtcttcagtaaaacccataccggaattaatatccggttgcaatgtagcttgttccaatactttcacgtaatttacattatttgattcaagtacggaagctgccatattgtttttctctcttaagattgccaacaaaacatgttctgtgtcagcgatgttacttttcattccacgtgcttctaatatacacatttttaatattttcgccgcatcattagacaacggcacctctgtatcgggcaatagcatatcatcagtttctgccttcaactgagcttcaatctgctgctttatcgcagctaaattggtgttgagtttagacaatatctcgatagcttttccttcaccgtcgcggagcattcccagaagcaggtgttcagggcctatatacctacttctcaatcgattagcttcttctttactatagacgataatgtcggaaactctttgtgagaattgattattcatacttcttccttttcttctaagggttatttactggcaaatatacgcattaaatcaggtttgtattgcaatatttgctttatttcttatatctacaaatggcgtgccataaaaacagtgtatttgtattatatataaggt

SEQ ID NO: 3063 - DNA, 10033 bp, Unknown
  gut microbiota DNA sequence
aatacatccgtccccgcgattccattgcagagggctgacagtcgggttgaagtctttagtaataggctgtatcttgcgggtagccaggttcatgataaatgcctgtgtgtcgaaatcattggcaataggatgattaccgcaattctttccgattccgccgaaggcctcgggacttgctgtaagcaataactgcttgccgtccggtgaatagctggcacctcccaggaagcgttcgtcgtggaaaagagtgtcaaccttcaacgtttccaaatctaccaggtagagagaagacagagagaacggacgttgagtgatgttttctttcgatgtactatatatcataaatttcccatcgggagaaatatcctgtaagtaagtgctatggttaccataagtcaaccgttcggaaacaccgttggctatgttatatttagccaggaagcttcgtccgcgagtgttgggaatacggtctgccgggctgacgatacggcggagagcaccttgttctttttctccttcttctctggggtaatagatcaggaagtcttcgttgggcgaccatgtaaagctctgttcgggaatccctttcaagagagtttcttcgttcagtgtagcagggtcgagcgtgataacgtcatttccgctaagcgctgttacggtataatagagtttgtcgcttttgggcatccaacgcataccgtctcttgcattattcaaaagaacctttccggttttcagctccgtgagctgacagtatgtacgcgagcgtttggcagcatggttgttccaataacgggtcagcaggtattttccactcggagagatcgcaacggagataacacggttgccgtacactgtattatccagtgaaaaacgcttctttgcattcggatctagtgtgcaggcgatatctttgaatttattgtccttgataaactcgcatttcagggtaggagcagctttgtcttctgcggtggaaagcaatttgattgtgatttcataatctctttccggttccagagtaagagttatatcccgagaggaggcagaactgatactatcttcggcggcgtcctttgtctgcttggaaacttcgtcgataaagacttcccagcggacgggagaagtaactttcaattttcctttcaggaaacgttccgccctgatctgtgttttaagtacataaatcttgctgtttttgtcagccttatctaatgttagataccctgccgtgtcaacggtcagtgattgcaggggcgcatcagggaggtcgagtactaccggagttttaagcaacatcttggttgaatgcttttctcctttcgggttgatactgtcgttcatgataggtgtacgaacctcaatagcgtcgcggactttgtattgtgtcactctttcctgcgcctggagagtgagtccggtcaacagaaaaatggctaaagccacttctttctttttcatgtgttgtgtattaaattaaataatatgattaattaggtagcaaatgtaaacttaatgttcttagtatacaaccaaaacagctctttttttagtattcaatccgatctagtatcccattgaggaaagcaatggctactccatagtttgtcatgggaatattttgctttcgggctaactcgatacggctgagtacatatttgcggttgaacatacatgccccacagtgaatcactaaagaataaggtgtcaggtcttgtggaaagtctgttccgcccacgatgtctatttgcagtttctcaccgatacgttttctcagtaagcggggaagtttcacccgcccgatatcctcggaaagaggggcatgggtacaggcttcggctattagcacacgtgatgattcggtcagcatctcaatagcggccgcacttttcacataataatgaatatctcccttatatccggcgaaaagcacagaaaaggacgtaagtttgctctcttccggtttttgctcgtagactgttttgaaaacctgcgaatccgtaataatcaatttgggaggatgagcaagggcgtgtaatgtttccggcaacttgtcggtggtacaggtggcaatcagacatttcttgtccagcaattcacgaatcgtctgtacttgcggcaggatgagccggcctttgggagcctgtatgtcctgtggcattacgagaagtacgaggtcattctctgcgactaacgttccggtgatactttgctggccgaaatccggagggagtttttccagtatagtccggcggatctgttcgatccctgttttctcttttgcactgattaggacaggagtatctccgaaactttctctgactttgatagccaacgcctgtgaatctttccgtatatctgttttgtttatcagcagaatcgtcggaatccctttagcctttaactgttccagccagtaaagttcttctgtaaaatcgggctcctttgtctcctttgaaagctcggcagacgtatcgcctccacaaaataagatagccatatctgttttctctaccgctttccatgtgcgttcaatacgcattcgcccaagttcgccttcatcgtcgaatcccggtgtatcgataaacaggcacggtccgatcccatgaatttccatggctttcgctaccgggtcggtggttgttcccggagtatccgagacgagcgcagtgtcctgtcctgtcaaagcgttgataagagaagacttgccactgtttcgtctgccgaaaagagctatgtgaagcctgttggcgttaggggtatctgttaaactcataatcgaaaatctcttttgccttcggcgattgcttttaagttacgtatggcgatttctctgattttgggattcggaatatgttccgtttccttttcaatcagtttcagcccttttttccgggtgtcttcggaggcataatcttccagatactctttcagtgtcattaaggcattcggggcacagcagtttgctatctgtccggatttgacgagcgacatgaaacggtcgcccgttcttccttcgcggtaacaggcagtacagaagctggggatatgcccgagatcgagcaaccagttgacaacctcgtccagtgtccgtgtgtcactgacatcgaactgtgcggaattgttctccggcagttctctttccgcataccctccgacactggtacgcgaaccgccgctgatttgtgaaatgcccagttcgaggaccttcttgcgtgactcctgtgattcgcgggtcgaaataatcattccggtatatggaacggctatccggataacggctacaatcttactgaatatctcgtccgagatagcattggggaaatcccctgcatcaatatcatctgccgagcagatgcgcggaacgctgatcgtatgcggacctacgccgaatctggcttccagatgttcggcgtgcatcagcagtccggtaaagtcataacggtatgtattcagtccgaagagaacgcctacccctacatcgtcaatacccccttccatagcacggtccatggcttccgtgtggtaggcatagttgcttttcggtccggtggggtggagggcttcgtagttttctttatgataagtctcctggaacaatatataagtgccgatgcctgcctctttcaaccggcggtagttttctaccgtagtggctgcaatatttacgttcacccggcggatagccccgtttttatgtttgataccgtaaatcgtccggatagattccagaatatattctatcggattcagggtgggatgttctcctgcttcgagtgccaggcgcttgtgccccatatcctgtaaggcaatcacttcctgacggatctcttcttgtgtcagtttcttgcgggcaatcgttttgttcttggcatgatacgggcagtaggtacagccgttgacgcaatagttcgagaggtacagcggtgcaaacattacgatacggttgccgtaaaacttttgtttgatttctttggcgagatgaaagatgtgttctatcagatcgggctggtcacattccaataggacggctgcttcccgatgtgtcagtcctttacatagagcagctttttcaatcagttgttcaatcagtgtacgattgtctttgttggtccgtgcatattccagtgtttccagaatttcttcatggtggatgaattcttctgcttcaggtgaatctactttgtatgtcataatctattctaaacttctaagttccaactaactgacttctaactgtcaaccgttttaaaatctcctctggagaaagaaatctcgtagccgatgttatgtaattgttgttgcaatatcctgattccttctgccgattcagctccgagggaggctttgttattatataaggtatactttttccgttcctcctgtggcgacagattgggcatgactacatttgctcctgccaatatcccccgttcccgtccgtcgggagtcagtgtagccagagctgttgtcgatggaatcagtgccgaagggtgcatcaggcggaagatagacaataagagcagtgtctgttcgagcgttccgctggaatatcgggcaaaaggcgtatcctgatgaggcagaaaaggaccgatgccgatcatttcaggacggagtttttcgataaacagaatgtcttgaatcagatgttctacagtctgtcccggactaccgaccataattcccgttccggtttgataccctgtttcttttaagttttgcaggcattgcaggcgttgcttgccggacattccggcagggtgcagttggctgtaatgcgtcgcgtcgtaagtttcgtgccgtaacaggtagcgattggctccagcgtgaaagaaacgttcatacgcttcgcgtgacttttcgccgagtgatagcgtaatggcacagtccggataatgccgccgtatggcggcaacgattgtctctatgcggtcgtccgtcagtgcaggatcttctcccccttgcaggacaaaagtccggaatcccagtgcgtatccttgtttgcagcaatccagaatactttccggactcagccggtaacgtgctacgtgcggattacctttccggatgccgcagtaatagcagttgttccggcagcaattacttatttcaatcagtccacggatataaatccggtttccgaaatgccggaggctgacctcccgtgcctgttcgttaatgattcgcagggagtccgcgtcacatccggtcaacagttgccggaattcttcgggtcgaagggttctttcctgccgtagtttatctatccattgtttcatagctctcttttcgtttgagcagctcttgtgccagttggcgacgtcccgaaacaatgtcattgtgcgtgctcggtccggtgatacaaccaccttcgcaagccatgacttcaataaattgtccggctgcctttccggtcttggcacaggcacgcagcagggctatgttcttcttattgatatccgacacttggatcgcgtttatcttttccgcttcttctttcaggtatgctttgacagctcccattacaccgccggcttgtgcgaaaccgtgtgcttcgcggacggaagtatgcaatatggagaaagcctgtgtctgctccagttggatgtccaacccgtcaagaatggaacccacctcttcgaatgtcaggatataatctacggcctcgtcgcggcgcacctctttacgtttggctacacatggacctacgaatacgatttttgcatccgggtgcttctccttggcgatccgtgccgtgtaatacatcggcgaaccggtggtggaaacgtatggtttcatccccggaatatgtttttctaccagttcgatgtaagaagggcagcaggaagtagtcatgaaactttgtcctttttccaacttctccagtaactcgtgtgcttcgttgctggtagtcgacattgctccttcggccacttcaatcacatcggtaaatcctatttctttaaaagctccatatacttgttcgatcgaagtcttgaactgcccgaggatagacggagcaataatagctaccattttctctcctttacggattcgttgcaaaacgtcgaatgtctgtgaaatctcgaagatagcaccgaacggacaagcattcatgcactttccgcaatatatacatttgctttcgtcgatatgctctattccgtgttcatctttactgatagctttcaccggacaggattcttcgcaaggcacaggaatatagacgatggcatgatacgggcaactcttatgacagataccgcaactgatacacgtctcatggtcgatcattgcctgaccgtttttcttgaaacgtatggcatctttggggcagttcatatagcaactacgggccacacatccgcgacaaaggttggttatttcataattaatctgtatgcaggaagaacacgcttcgtcaatgacgcacattatattttctttatccggttcgggacggctcaatgcttgctgcgcatattcggagagaggagttacttcgtcatgttcgtctgtcatgtccagtcccattagggggaacatcttgtatctccacacggctcgttctttgtgtacacaacagcgtcccagaggctttgacttgcgtgggctcaattcaataggtagccggtctattttttctactaactggtcgtttttccagagtcttacaaggtcagccagcaacttgtgccggacaatcataatgttattcgtaaatgccatattgtaattaaggggttgttagcggatgcaaagatacgaacactatttcaatatttaagctttttgaaacattcttgtaaattttttgtagcctttctgcgttatctttgcagtaggtaaaattaagaggaggaagaggtatgaatagcagcattttagaacaaagaaaccgtttcgctttgattggtgtactaatgactattgtcagcctgatgtttttattctatatgggaagttctttggtcagttcgactaagaaatatctggaacagatccggatgatagagataacttgtgtggacgaataaaagagaaagctgtaaagcaggatatccggaggaaatcattacttttgccggaagaaaacaagaaaccttatggaagagaaaaacaaagcatggaaaacggtgagcagcaaatacctgtttcgccgcccgtggctgaccgttcgttgtgaagatatgttgcttcccaatggaaatcatatccccgaatattatattcttgaatatcccgactgggtaaacacgattgccataaccaaagaaggcaaatttgtatttgtccgccaataccgtcccggcatcggccggacttgttatgaactttgtgccggtgtgtgtgaaaaggaagacgcttcgccattggtatccgcccaacgcgaattatgggaagaaaccggctacggaaatggcaactggcaggaatatatggtgatttccgccaatccgagcactcacaccaatctgacgtattgcttccttgcaaccgatgtggaactcatcgaccaccaacatctggaagctaccgaagatctttccgtgcatctgctcaccttggaagaggtgaaacggctgctggataacaacgaaatcatgcaagcgctgaacgctgctccgctatggaagtatatagctagtttatagctttcgcatacatacattcccttcacacataatcaggaggtttgggctgcaaagttcagacctccttgtttgttttcctggagacatatagataagtttcacttcatcctttgcaaacttcctctatatagagcgtaaagttgctcttgctttatcataatctataaacgaaacttccgtttataaaaacgcaagtttcgtttatataatcaaagccttcatttataaaaacgcaacttccgttttaagtctgaaacggggcggaaagaactttgtggtaaagggaagggaagtttgcgccctatggggagtaacttctttgttaatactatgaaggtagggtagtggtagctctctctttttgccataagaggtgaactgtcagtcattttgtcagtcaatttctgccaaacaatcattcttttgctttggcacgcttttcgcaatgtctttaacggttcgcctgcagaacaggcgggtgacaattaatattataatgtataactaaaatataataagtaactatgaacattaaaccattagcagacagagtgcttatcctccctgcacctgcagaagaaaaaacaattggtggtatcattattcctgatacagcaaaagaaaaacctttgaaaggtgaagttgtggcagtaggtcacggtacgaaagatgaagaaatggtattgaaagtaggcgatacagttctttatggtaaatatgccggaacagaacttgaagtcgaaggtactaaataccttatcatgcgtcagagcgatgttctcgctgttttgggttaataaatgtagtaaataatcaatcattaaattgtaaatatcattatggcaaaagaaatattattcaatattgacgcccgtgaccaattgaaaaaaggtgtcgatgctttggcaaatgcagtaaaagtaactcttggtccgaaaggacgtaacgttatcatcgaaaagaaattcggtgctccgcacatcacaaaagacggtgtgacagtagcaaaagaaatcgaactggcagacgcttaccagaatacaggtgcacaactagtgaaggaagttgcttccaagactggtgatgatgcaggtgacggtacaacaactgcaaccgttctcgctcaggctatcgtagctgaaggattgaagaacgtgactgccggtgctagcccaatggatatcaaacgtggtatcgacaaggctgttgccaaagtggtagaatcaatcaaatcgcaagcagaaacagtaggtgacaactacgacaagattgaacaagtggctaccatatctgcaaacaatgatccggtgatcggtaaattgattgctgatgcaatgcgtaaggtttctaaagacggtgttatcactatcgaagaagcaaaaggtactgacactacaatcggtgtagtagaaggtatgcagttcgaccgtggttatctgtcagcttactttgtgacaaatacagagaagatggaatgtgaaatggagaaaccttacattctgatctacgacaagaagatttctaacctgaaagatttcttgcctatcctcgaaccggctgtacagactggtcgtcctctgttggttattgcagaagatgtagatagcgaagcattgactactttggtagtaaaccgtctgcgttctcagttgaagatttgtgctgtgaaggctccgggctttggcgaccgtcgcaaagaaatgctggaagatatcgctatcctgacaggtggtgtggttatcagcgaagaaaaaggattgaaactggaacaggctactatcgaaatgttgggtactgccgataaggtaacagtttctaaagattatactacaatcgtaaacggtgccggtgcaaaagaaaacatcaaggaacgttgcgaccagatcaaagctcaaatcgttgctactaaatcagactacgaccgtgaaaaattgcaggaacgtctggctaagttgtcaggtggtgtagctgttctttacgtaggtgctgcttctgaagtagaaatgaaggaaaagaaagaccgagtagacgatgcattgcgtgcaactcgtgctgctatcgaagaaggtattatcccgggtggtggcgtagcttatatccgtgctatcgattctctcgaaggcttgacgggtgacaatgctgacgaaacaacaggtattggtattatcaaacgtgctattgaagaaccgcttcgcgaaattgtagcaaatgccggtaaagaaggtgcggtagttgttcagaaagtacgtgaaggtaaaggcgactttgggtacaatgcccgtacggatgtttacgaaaacctacacgctgccggtgtagtagaccctgctaaggttgctcgtgtagctttggaaaatgcagcttctatcgctggtatg
